United States Patent Application Publication US 2025/0074962 A1 - sequence listing, part 15

SEQ ID NO: 25572 - DNA, 3135 bp, synthetic construct
  misc_feature 1..3135: note = Description of Artificial Sequence: Synthetic coding sequence
  source 1..3135: mol_type = other DNA
atgccccccggcgtggactgccccatggagttctggaccaaggaggaaaaccagtcagttgtggtggactttctgctccctacaggagtttatttaaacttcccagtttctcgtaatgcaaatttgagcacaattaaacagctgctgtggcaccgagcccagtacgaacctctgttccacatgttatctgggcctgaggcttacgttttcacttgcataaaccaaaccgccgaacaacaggagcttgaagacgagcagagacggttgtgcgacgttcagccttttctgcctgttcttcgcctggtggcacgagagggcgatcgcgtgaaaaagttaataaactcccagatctctctcctgattggcaagggactccacgaattcgatagcttatgcgaccctgaagttaacgatttccgtgcgaaaatgtgtcagttctgcgaggaggcggcagctagacgccagcagctcggctgggaggcctggctgcaatactcctttccattgcaactggaaccatcggcgcagacctggggccccggcacgctccggctaccaaatagggctctgctggtgaatgtgaaatttgaagggtctgaagagagtttcacgttccaagtatctaccaaagacgtcccactggccctgatggcctgcgctctaagaaagaaggctacagtgtttcgacaacctcttgtggagcagcctgaagattacactcttcaggttaacggccgccacgaatatttatatggctcatacccgctgtgtcagtttcagtatatctgttcctgcttacatagtggcctaacaccacacctcacaatggttcatagttcgagtatccttgccatgcgagatgagcagtccaaccccgcccctcaagtgcagaaacctcgcgccaagcctccacccatccctgccaagaaaccatcttctgtcagcctctggagcctggaacagccctttaggatcgagttaattcaaggttcgaaggtcaatgccgatgaaaggatgaagttggttgtgcaggccgggctcttccacggaaacgagatgttatgtaaaacagttagttcttctgaagtcagtgtctgctccgaaccagtctggaaacaacggcttgagtttgatattaatatctgtgacttgccaaggatggcacgtctttgtttcgcactgtatgccgtgatcgaaaaggctaagaaggctcggagcaccaaaaagaagagtaaaaaggcggactgtccaatcgcctgggcaaatctgatgctgttcgattacaaagatcaacttaaaaccggtgaacggtgtctctacatgtggccatctgtgcccgatgagaagggcgagctcttgaacccaaccggcacagtgcgatccaatcctaacacagatagcgccgcggccctcctcatatgcctgccagaagtagccccccaccctgtttactaccctgctctcgagaagattttggaattaggacgtcacagtgagtgcgtacacgtgaccgaggaggagcagttgcagctgagagaaatcctggaacgaagaggctcaggcgagctttacgaacacgagaaggatctagtgtggaaactgcggcacgaagtgcaggaacattttcccgaagccttggcccgactccttctggtaacaaagtggaataagcacgaggacgtggcccagatgttgtatcttctgtgctcatggcccgaactacccgtattgtccgccttagaacttctggacttcagttttccagattgccacgtcggctcattcgccatcaaatccctgcgcaaacttaccgacgacgaactgtttcaatatttgctgcagttagtccaggtgctaaaatatgaatcttacctagactgcgagttaacaaagttcctgcttgacagagccctagcaaaccggaaaattgggcactttctgttctggcacctgagatcagagatgcacgtcccgtcggtggcccttagattcggccttattctggaggcttattgtcgagggagcactcaccatatgaaggtcctcatgaagcagggtgaagcgctcagcaagctgaaggctttgaacgactttgttaagctgtcctctcaaaaaacacctaaaccacagactaaggagctgatgcacctgtgcatgcggcaagaggcttatttagaggccctatcacacctgcagagcccgttggaccccagtactttacttgctgaagtatgcgtggagcaatgcacttttatggattccaagatgaagccactctggatcatgtattcaaacgaggaggccggctccggtggatccgtaggcatcatttttaaaaacggggacgacctgcgtcaggatatgctcaccctacagatgatccaactgatggacgttctgtggaaacaagaaggattggatcttaggatgactccttacgggtgtctgccaacaggagaccggacaggcctgatcgaggtcgttctccgttcagacacgattgctaacatccagctaaataagagtaacatggctgcaaccgccgcctttaataaggatgccttgttaaattggttaaagagtaagaaccccggtgaggccctggacagggcaatagaagagttcactctgtcttgtgctggttactgtgtcgcgacctatgtactcggaattggagacaggcattctgacaacattatgatccgtgagtctggccagctgttccatattgactttggacacttcctggggaactttaagacgaagtttggcatcaaccgcgaacgggttccctttatattgacctatgattttgtacacgtcatccagcagggaaagactaacaattcagaaaaatttgagaggtttcgaggttactgcgagcgagcctacacaatcttaaggaggcatggtctgctgttcctgcacctgtttgccctgatgcgcgctgccggactacctgagctcagctgcagcaaggacattcagtacctgaaggactccctggctttggggaaaacagaagaggaggcgctgaaacactttcgggtgaaatttaacgaggcgctgcgcgaatcctggaaaaccaaggtgaactggctcgcccataacgtgagcaaggataacaggcaatag

SEQ ID NO: 25573 - DNA, 3207 bp, synthetic construct
  misc_feature 1..3207: note = Description of Artificial Sequence: Synthetic coding sequence
  source 1..3207: mol_type = other DNA
atgccccccggcgtggactgccccatggagttctggaccaaggaggaaaaccaatcagtcgttgtagatttcctcctacccacaggtgtctaccttaactttcccgtatcacgcaacgcaaacctctccacaattaagcaattactgtggcatcgcgcacagtacgagccactatttcacatgttgtctggcccagaggcctacgtctttacttgtattaaccagaccgctgaacaacaggaactcgaagatgagcagcggagactctgtgatgtgcagccgttcttgccagtattgcggctcgttgcccgtgagggcgaccgggtcaagaaacttattaattcccaaatctcattgctcataggtaaaggactacatgaatttgattctctttgcgaccccgaggttaacgatttccgggccaagatgtgtcagttttgcgaagaagctgcagccagacgccagcagctgggttgggaagcttggctgcagtactcctttccattacagctggagcccagtgcccagacgtggggacctggcacattgcgcctacccaaccgtgccttgttggttaatgtgaagttcgagggatctgaagagtctttcacattccaggtgtccacgaaagatgtgccactcgcactcatggcctgcgcattgcgaaaaaaggccaccgtatttagacagccattagtcgagcagcccgaggactatactctgcaggtcaatggtcgacatgagtatctttatggcagttatccgctctgccagtttcaggtgcagaagcctagagcaaagcctccacctattccggcgaaaaagccctcttctgtgagcctgtggtcactcgagcaaccatttagaatcgagttaattcagggaagcaaagtgaacgcagacgagcgcatgaagctagtggtacaggcaggcctgttccacgggaacgagatgctgtgcaaaaccgtctcatccagcgaggtgagtgtgtgcagtgaaccagtctggaagcagcgcctcgagttcgacattaacatttgcgatttgccccgcatggctagactatgtttcgctttgtatgccgtgattgagaaggcaaagaaagccagatcaactaagaaaaagagtaagaaggctgactgtcctatcgcatgggcaaacctgatgctgttcgattataaagatcaactgaagactggcgagcgctgcctgtatatgtggccctctgtgccagatgaaaaaggcgagttgttaaaccccaccggaacggtgcggagcaaccctaacacagacagcgccgctgcattactgatctgcctgccagaagttgctcctcatcccgtatactatccggccctggagaagctcccgggaggaatgctgcttgcgtctagagagtggcgtccggagcttctgtggatgcggctccacgctgaggactccgcaccttcccgcatgattggagtggccatgccggggctgggagtgctgcctgggctggtccaggccccaggcgacgcagagtgttctagactgttgcagatcctcgagctgggccgccattccgagtgcgtccatgtgaccgaggaagagcaactgcagcttagggagattctggaaagaaggggaagcggagagctatacgagcacgagaaggacttagtctggaagttaagacatgaggtgcaggagcattttcccgaggcacttgcccgcctgttgttagtcaccaaatggaataaacatgaggacgtcgcacagatgctttaccttttatgcagttggccggagcttcccgtactgtctgctcttgagcttctcgatttttcatttcctgactgccacgtcggctctttcgccatcaagtccttgcgaaagctcaccgacgatgaactgttccagtatcttcttcaactggtccaagtcctgaagtacgagtcttacttagactgcgagctcaccaagtttttgctggatagagctttggccaaccgaaagatcggccatttcctgttttggcacctccggagtgaaatgcacgtcccctcagtggccctgagattcggtctaatccttgaagcttactgcaggggcagtacacatcacatgaaggtgctgatgaagcagggggaggccttgtccaagctgaaggctctgaacgattttgtgaagctctctagccagaagacccccaagccacagacgaaagaattaatgcatctttgcatgagacaagaggcttatctggaggcactgtcacatttacagtctcctcttgatccctcgactttgttggcagaggtatgcgtggagcagtgcacattcatggactcaaaaatgaaaccactatggattatgtattctaatgaggaagcgggcagtggtggcagcgtgggcatcatttttaagaatggagatgatctgagacaggatatgctcactctgcaaatgatacagctgatggatgtgctgtggaagcaggaaggtctcgacctgagaatgaccccgtatggatgcctccccacaggtgaccggactgggctgattgaggtggtccttcgttccgacacaattgccaatatccagctgaacaaatcgaatatggcggccaccgccgcctttaacaaggatgctctgctcaactggcttaagtccaagaatccaggcgaagccttggatagggcgatcgaagaatttacactgagctgcgctgggtactgtgtcgccacatacgtcctgggcataggggatcgccattctgacaatatcatgatccgggaaagcggccaactgttccacatcgattttggacacttcctggggaacttcaagaccaagtttggcatcaaccgcgaaagggtcccgtttatattgacatatgactttgttcacgtaattcagcagggcaagaccaataattccgaaaaatttgagcgattccgtggctattgtgaacgggcctacacaatcctccgcagacatggactgctctttttacatctgtttgctctgatgcgagctgccggtctgcctgagctgagctgttctaaggatatccagtatctgaaagattcccttgcactaggtaagacagaagaagaagcactcaaacatttcagggtgaagttcaatgaggcccttcgcgagagctggaaaacaaaggttaattggctggctcataatgtgtcaaaagacaaccgccagtag

SEQ ID NO: 25574 - DNA, 960 bp, synthetic construct
  misc_feature 1..960: note = Description of Artificial Sequence: Synthetic coding sequence
  source 1..960: mol_type = other DNA
atgatccccgagagcagcgagctggtggtgcaggccggcctgttccacgggaacgaaatgctgtgtaaaaccgtttctagtagcgaagtgtcagtctgtagcgagccagtgtggaagcaacggttggagtttgatatcaatatttgcgacctgcctaggatggctaggctctgtttcgcgttatatgccgtaatcgagaaggctaagaaggcacgtagcacgaaaaaaaaaagcaaaaaggctgactgtccaattgcgtgggcgaacctcatgctgtttgactataaggaccaactgaaaacaggtgaaagatgcctctacatgtggccgagcgtgccggacgaaaaaggtgagttgctcaaccccactggaaccgtgcgctccaatcctaatactgattcagcggccgcccttttgatttgcctccccgaagtagctcctcaccctgtttattacccggctctagagaagatacttgaactaggcaggcattcagagtgtgtgcacgtgaccgaagaggaacagttacaactgcgcgagattctggagaggcgcgggagcggggaactctacgagcatgaaaaagatctggtgtggaagcttagacacgaagtccaggagcactttcctgaagccctcgcccgtcttctgcttgttaccaagtggaataagcacgaggacgtcgctcaaatgctctacctgttgtgctcctggcctgagctccctgtgctgagcgcgttggagcttcttgattttagcttcccagattgccatgtgggcagttttgcaattaaaagtctccgcaagcttactgacgacgagctgtttcagtatcttttgcagctcgtgcaggtactgaagtacgagtcatacctggactgcgagctgacgaagtttcttctggacagagccctggccaaccggaagatcggacattttcttttctggcatctgcgatag

SEQ ID NO: 25575 - DNA, 3309 bp, synthetic construct
  misc_feature 1..3309: note = Description of Artificial Sequence: Synthetic coding sequence
  source 1..3309: mol_type = other DNA
atggagctggagaactacaagcagcccgtggtgctgcgggaggacaactgcagacgtagacgcaggatgaagccccgcagtgcagccgctagcctgtcaagtatggaacttatcccaattgagttcgtgcttcccacttcgcagcggaagtgcaagtcgcccgaaacagctctgctccacgtggcaggtcacggaaatgtcgagcagatgaaggcacaggtctggttgagggccttggagaccagtgtcgctgccgacttttatcaccgcttagggccccatcactttctgctgctatatcagaaaaaaggacaatggtatgaaatttatgataaataccaagtagtacagacacttgactgcctaaggtattggaaggcaacccacagaagtcccggtcagatccacctggtgcagaggcaccctccttccgaggagtcccaggctttccaaaggcagctcacagccctgatcggctatgacgtgaccgatgtctcaaatgtgcacgatgacgagctggaattcactcgcaggggtttggtgacccctcgtatggccgaggttgcgtcccgggacccgaaactgtatgccatgcacccctgggtgacatctaaacctctcccagagtacctctggaagaaaattgctaataattgcatcttcatagtgatccacaggagcactaccagtcagaccataaaggtcagccctgatgataccccaggagcaatcttacagagtttcttcaccaaaatggccaagaagaagtcacttatggacatccccgaatcccagagcgagcaggacttcgtgctgcgcgtctgtggcagagacgaatatctcgtaggggaaacacccataaagaatttccaatgggttaggcactgtctcaaaaacggggaagaaatacatgtggtattggatacaccaccagacccggccctggacgaggtacgcaaggaagaatggcccctggtggacgattgcaccggggttaccgggtaccatgaacagctgaccattcatggcaaagatcacgagagtgtcttcactgtgagcttgtgggattgcgatcggaaattccgggtgaagattcgcggaatcgacattcccgttctgcctcgcaacacagacttaacagtgttcgtagaggcgaatattcagcacgggcaacaggttctctgccaacgcaggacttctccgaagccatttactgaggaagtgctgtggaacgtatggctggaatttagtattaaaattaaagacctgccaaagggagcccttctgaatctccagatttactgcggcaaggcccctgccctctcttccaaggctagcgcagaaagtccctcctctgagtccaaggggaaagttcaactactgtactatgtcaacctactactaatcgaccataggttcctgctgagaaggggggagtacgtcctccacatgtggcagatttcaggaaagggcgaggatcaggggtcctttaacgcagataagctgacatctgctaccaatcctgataaagagaactccatgagcatttcaattctgctcgacaactactgccatcccattgcccttccaaaacaccagccaacacccgatccggagggggaccgtgtgagagccgagatgcccaaccaattgcgcaagcagttggaagcaatcatcgccactgacccccttaaccccctgactgcagaggataaagaactcctgtggcacttccgctatgagtccctcaaacaccctaaggcctaccctaaactgttctcatccgttaagtggggccagcaggaaattgtggcgaagacataccaactgctggctagacgcgaggtctgggatcagagcgcactggatgtcgggcttaccatgcagcttttagattgtaacttctctgatgaaaacgtacgagccatagctgttcaaaaactggagagcctcgaggacgacgacgtcctgcattatctcctgcagctcgttcaggcggtaaagttcgaaccctatcatgactctgcgctcgcccgattcttattgaaaagaggactgagaaataagcgcataggccactttctgttttggttcctccgcagcgaaatagctcagagtcggcactaccagcagagatttgccgtgattctcgaggcttacctgagagggtgtggaacagccatgcttcatgatttcacccagcaagtgcaggttattgagatgttgcagaaagtgactctagatattaaatctcttagcgcagaaaagtatgacgttagtagccaggtgatctctcagctgaagcagaaactggagaacctgcagaattctcagcttcctgagtcgttccgggtaccctatgacccaggcctgaaggcaggcgcattagccattgagaagtgtaaagtgatggcatcaaaaaagaagcctctatggttagaatttaaatgcgccgacccaaccgccctgtctaacgaaacaattggcatcatctttaaacatggcgacgatctgaggcaggacatgttaatcttgcagatcctgcgcataatggagtctatctgggagaccgagtcacttgacctctgtctcctgccctacggttgtattagcaccggggacaagattggcatgatcgaaattgtcaaagacgctaccaccattgccaaaatccaacagtccaccgtgggcaatactggggctttcaaagacgaagtgctgaaccactggctgaaagagaaatcccctaccgaagaaaaatttcaggctgctgtcgagcgcttcgtgtattcatgcgccggctattgtgttgcaaccttcgttttggggattggggatcgacacaacgacaacataatgatcactgagaccggcaacctgtttcacatagactttggccacattctgggcaactacaaaagcttcttgggcattaataaagaacgggttccttttgtgctcactccggactttctgttcgttatgggtactagtgggaaaaagacatccccccacttccagaaatttcaggacatatgtgtgaaggcatatcttgctcttcgacatcacacaaatctgttaattatcctgtttagcatgatgcttatgaccggtatgccccaactaacctctaaggaggatatcgagtatatccgagatgccttgactgtgggcaagaatgaggaagatgccaagaagtactttttggaccagattgaagtctgccgagacaaagggtggacagtgcaattcaattggttcttacacctcgtgctgggtatcaagcagggtgagaagcactctgcgtag

SEQ ID NO: 25576 - DNA, 3309 bp, synthetic construct
  misc_feature 1..3309: note = Description of Artificial Sequence: Synthetic coding sequence
  source 1..3309: mol_type = other DNA
atggagctggagaactacaagcagcccgtggtgctgcgggaggacaattgtagacgccggcgacggatgaagccccgaagtgcagccgccagcttgtcctccatggagctgattcccatcgaattcgtgttgcctacctcacagaggaaatgcaaaagtccggagactgcgttactgcacgtagccgggcacgggaatgtggagcagatgaaagcccaggtgtggctaagggcccttgagacttctgtggcagccgatttttatcaccgcctggggccccaccatttccttcttttgtatcagaaaaagggtcagtggtatgaaatatatgataagtaccaagtcgtccagacattagactgcctacgatactggaaagcaacacataggagcccaggtcagatacaccttgtacaaagacacccaccctccgaagaatctcaggcctttcagcggcagttaactgctctgatcgggtatgatgttaccgacgtatccaatgtccacgacgacgagttggaatttactcgacgcggactggtgacccctcgcatggccgaggtggcaagccgggatccaaaactttatgctatgcacccgtgggtgacttctaagccccttcctgagtacctgtggaagaaaatcgcgaacaactgtatctttattgtgatccacagatctactacaagtcagacgattaaggtgtcgcctgacgacacgcctggcgctatactccaaagcttcttcactaagatggccaaaaagaagtcactgatggacatccccgaatctcagtccgaacaggacttcgtcctgcgggtatgtggcagggacgagtacctggtgggagaaacacctattaaaaacttccagtgggtccgtcattgcctcaaaaatggagaggagattcatgtcgtcttagacaccccacctgacccagctctggacgaagtgcgcaaggaagagtggcctctggttgatgattgtaccggggtaactggataccatgagcagcttacaatccatggaaaggatcacgagagcgtgtttaccgtttctctctgggactgtgaccgcaagtttcgcgtgaagatcagaggaattgacattcctgtcctgccacgcaacacggacctcaccgtattcgtagaggcaaatatacaacacggccagcaggtactctgccagcgaagaactagcccaaagccctttactgaagaggtcctctggaacgtctggctggagttttccatcaagattaaagatctgcctaaaggcgccttgctaaaccttcagatttactgcggcaaagcaccagctctctctagcaaggcttctgcagagtccccttcaagcgaatcaaagggcaaggttcagctactctattacgtcaatttgctgctaatcgatcacaggttcctcttgcggagaggcgagtacgttcttcatatgtggcagatcagcggcaagggcgaagaccagggatccttcaacgctgataagctgactagcgcaaccaatccagataaggaaaattctatgagcatcagtatccttctggacaactactgccacccaatcgcactccccaaacaccaacccacacccgaccctgaaggcgacagggtgagagccgaaatgcccaatcaactccgcaagcagctggaggcaataatagccacagatccactaaacccacttactgccgaagacaaagagcttctgtggcattttcgatacgagagtttgaaacatccaaaagcctatcccaagttgttctcgagcgtcaagtggggacagcaggagatcgttgcaaagacatatcagctcttagccaggagagaagtctgggatcaatctgccctggacgtgggattaacaatgcaactgctggactgtaatttcagtgacgaaaacgtgagagccattgctgtgcagaagctggaatcactggaagacgacgatgttctgcattatctgttgcaactggtgcaggccgtgaagtttgaaccataccacgatagcgctttggctcgctttctactgaaaaggggcctgaggaacaaaaggattggccacttccttttctggttccttaggagcgagattgctcaatcaagacactaccagcagcgttttgctgtgatcctggaggcgtacctccgtgggtgcggcactgccatgctacacgactttacccagcaagtccaagttattgaaatgctgcagaaggtcacacttgatattaagagcctgagtgccgaaaaatacgatgtatcttcacaagtgatttcacagctgaaacagaagcttgagaatctccagaattcccagttgcccgaatcttttagggtgccctatgatcccggactaaaggctggcgcccttgcaattgaaaagtgtaaggttatggcctctaaaaagaagcctttgtggcttgagtttaagtgtgctgaccctactgcactttctaacgaaaccattgggatcatttttaaacacggcgacgacttacgccaggatatgttgatactgcagatactccgaataatggaatccatttgggagaccgagagcctggatctatgcttgctcccatacggatgcatttctacaggagacaagatcggcatgatcgaaatcgtgaaggatgctaccacaattgccaagatccaacaatctactgtcggcaacacaggggcgttcaaagatgaggttctgaaccactggttgaaggagaaatcacctaccgaggaaaaatttcaagctgccgtggagcgcttcgtttactcctgcgcaggttactgcgtggccacattcgtcctcggcattggcgaccggcacaacgacaatataatgattactgagactggcaacctgttccacatagacttcggacacatcctgggcaattacaaatcattcctcggtattaacaaggaacgcgtgccctttgtgttaactccggactttctgttcgtaatgggcacttcaggcaagaagacgtctccgcacttccagaaatttcaagacatttgcgttaaggcttatctcgcccttcggcatcacacaaatttactgatcatcctgttttctatgatgctcatgaccggcatgccacagctgacctcgaaagaggacattgagtatatccgagatgccctcaccgtggggaagaacgaagaagacgccaaaaaatacttccttgatcagattgaggtgtgcagggataaggggtggaccgtgcaatttaattggtttctccatctggtgctggggatcaaacaaggggagaaacactcagcctag

SEQ ID NO: 25577 - DNA, 3309 bp, synthetic construct
  misc_feature 1..3309: note = Description of Artificial Sequence: Synthetic coding sequence
  source 1..3309: mol_type = other DNA
atggagctggagaactacaagcagcccgtggtgctgcgggaggacaattgccgaaggaggagaaggatgaaacccaggtcagcggcagcctcactcagcagtatggaactgattcctattgagttcgtgctgcccactagccaaaggaaatgcaagagtccggaaacagctctgctacacgtggcaggtcatgggaatgtcgagcagatgaaggcccaggtctggctgcgagcgctggagacgtccgtagccgctgacttctaccacagattgggtccccatcacttcctgcttctgtatcagaaaaagggccaatggtatgagatctatgacaaatatcaagtcgtccagactcttgactgcttacgatactggaaagctacccatagatcccctggtcagatacacttagtacaacgccacccacccagtgaggagagccaagcctttcagcggcagctcaccgcactaattgggtacgacgttacggacgtgagtaatgtgcacgacgatgagctggagttcacgcgccgcggccttgtcaccccaagaatggctgaggtggccagcagggacccgaagttatatgccatgcatccatgggtgacatccaaacccctaccagagtacctctggaagaaaatcgccaacaattgcatttttatagtaatacaccgatccaccaccagccagacaattaaggtttctccggatgacactcctggggccatcctccagagtttttttacgaagatggccaaaaaaaaaagcctaatggacatccctgagtctcagagcgagcaagatttcgtgctgcgggtgtgcggccgggacgagtacctggtgggagagactccaatcaagaactttcagtgggtccgacactgcctgaagaacggtgaagaaatacatgtagtactggatactcctccggaccccgcgctggacgaggtgagaaaagaagaatggccactcgttgatgattgcaccggggtgactgggtatcatgaacaactgaccattcacggaaaggatcacgagagcgtattcaccgtaagtctgtgggactgtgatcgtaagttcagagtgaaaataaggggtattgatattccggtcttaccacgcaacaccgacctgacagtctttgtcgaggccaacatccagcacgggcagcaagttctttgtcagcggcggacctcccctaagccgtttaccgaagaggtactgtggaatgtatggcttgagttcagcatcaagataaaggacctgccaaaaggagccctgctgaaccttcagatctactgtggcaaggctcctgcactcagttccaaagctagcgcagagtctccttccagcgagtccaagggcaaagttcagttactgtactatgtcaatctgcttctgatcgaccacagattcctgcttagacgaggcgagtatgtattacatatgtggcaaatctcaggtaagggggaggaccagggctctttcaatgccgataaattgacaagtgctacaaatcctgacaaagagaattcgatgagtataagcattctcctggacaattactgtcacccaatcgcactgcccaaacatcagcccacgccagacccagaaggagatcgcgttcgtgccgaaatgccaaaccagcttaggaagcagttagaggctatcatagcaactgacccgctgaaccccttaactgccgaggataaggagctgttatggcacttcaggtacgaaagcctcaagcaccccaaggcgtaccctaagttgttcagtagtgtcaagtgggggcaacaggaaattgtcgctaagacctaccagcttctggcccggcgcgaagtctgggatcagagtgcactggacgtgggcctcaccatgcagctgctggactgtaacttcagtgatgaaaatgttagagccatcgcagtgcagaagctcgagagccttgaggacgatgatgttctacattatcttctgcagttagtgcaagccgtcaagttcgaaccgtaccacgactccgctctggcccggtttcttctgaagagaggcctcagaaataagaggattggccatttcctcttttggttcttgcgatcagaaatcgcccaatctagacattatcagcagagattcgctgtcatactggaagcttatctcagaggatgtggcaccgctatgcttcatgatttcacccagcaggttcaggtcatcgagatgttacaaaaggttacactcgacatcaaaagcctctcagccgaaaaatacgatgtaagtagccaggtaatcagccagctgaagcagaagctcgagaacctccagaactctcagctaccagagtcttttagggtcccatatgacccaggcctcaaggctggcgccctagccattgaaaagtgtaaagtgatggcgagcaaaaaaaagccattatggcttgagttcaagtgcgcagatcctactgctctctctaacgagaccattggaatcatcttcaaacacggggatgatcttcggcaggacatgctcattcttcagattctgagaatcatggaaagcatttgggagacggaaagtctggacctatgtctcctaccctacggctgcataagtaccggagacaaaattggaatgatagagattgtgaaagatgctacgacaatcgccaagatacagcagtctaccgtaggcaacaccggggcctttaaagacgaggtcctgaaccattggttgaaggagaagagccccacagaggaaaagttccaggcggcggtggagcgctttgtctactcttgcgcgggctattgtgtagctaccttcgtattggggatcggggatcgccataacgataacattatgattactgagacgggcaacctttttcatatagacttcgggcacatcctcggcaattacaagtcctttctcggaattaacaaggaaagggttccattcgtcctgacacccgacttcttatttgtgatgggtacttccgggaaaaaaacttccccgcacttccagaaatttcaagacatctgtgtcaaggcttaccttgcactgcgtcaccacaccaacctgctgatcattctgttctctatgatgctgatgactggaatgcctcagcttacctctaaggaagacattgaatacatccgggatgcactgacagtaggaaaaaacgaggaggacgccaagaagtacttccttgatcagattgaggtgtgcagggataaaggttggaccgtccaattcaattggttcctccacctggttctcgggatcaaacaaggcgaaaagcactccgcctag

SEQ ID NO: 25578 - DNA, 5061 bp, synthetic construct
  misc_feature 1..5061: note = Description of Artificial Sequence: Synthetic coding sequence
  source 1..5061: mol_type = other DNA
atggcccagatcagcagcaacagcggcttcaaggagtgccccagcagccacccggaaccaacacgcgccaaggacgttgacaaagaggaagctctgcaaatggaagctgaagctttggctaaactccaaaaagacaggcaggtgactgacaatcagcggggatttgagctatcctcatctactcgaaaaaaggcccaggtatacaataagcaggattacgacctaatggtctttccggaatcagactctcagaaacgggctctggatatagacgtggaaaagctcacccaggcagagttggaaaaactgctgctggacgacagtttcgagaccaagaagactcctgtcctcccagtcacaccaattctctccccctctttctccgctcagctctacttcaggcctacaatccagagaggccaatggccgcccggactaccaggcccctcgacctatgctcttccctctatctaccccagtacttactctaagcaggccgccttccaaaatgggtttaaccctaggatgccaacatttcccagcactgaacctatctatctctctcttccaggccagagcccctacttctcataccccttaacacctgcaacccctttccatccccagggctcactgccaatttatcgacccgtcgtctccacagatatggcaaaactgtttgataaaatcgcctctacatccgagttcctgaagaacggcaaagcccgaactgatctagagatcaccgatagcaaggtgagcaatttgcaggtcagccccaaatcagaagatatttccaaatttgactggctggatcttgacccactctcaaaacctaaggtggataacgtggaggtcctggatcacgaagaggagaaaaatgtgagtagtctcctggctaaagatccctgggatgcagttttactggaagaacgatcgacagccaattgtcacctggagaggaaggtgaatgggaaaagtctatccgtcgctacggtaaccagaagtcagtcgctcaacatacgaaccacccagcttgctaaagcacaaggccacatttctcagaaagatcccaatggcacctcttcacttcctaccggctcgagtctcctacaggaagttgaggttcaaaacgaggaaatggctgcgttttgcaggtctattactaagttgaagacaaagttcccctataccaaccatcggaccaaccccgggtatttgctgtcgccagtgactgcccagcggaatatttgtggagagaatgcctctgtcaaggtctcaatagatatcgaaggctttcagctgccagttactttcacatgtgatgtcagttcaacagttgaaatcatcattatgcaggcgctctgttgggtacatgacgacctcaatcaggtcgatgtaggatcctatgtgttaaaagtgtgcggacaggaggaagttctccaaaacaatcactgcctcgggagtcacgaacacatacagaattgtaggaagtgggacacagagatcaggcttcagctactgaccttcagtgcaatgtgccagaacctcgcccgaactgcggaggatgatgagacaccggtggacctgaacaagcacctgtatcagattgagaaaccctgcaaagaagctatgactcgtcaccctgtcgaggaactgctcgacagttatcacaatcaggtcgaacttgccctgcagatcgaaaatcagcaccgtgctgtcgatcaggtgatcaaggcagtacgtaagatctgttcagccctcgacggtgttgagacactagcgatcaccgagtccgtgaagaaactgaaaagagcagtgaacctcccgcggtcgaagaccgctgacgtgaccagtctctttggtggtgaagatacctctaggtcttctactcggggctctctcaatcctgagaacccagtgcaggtatccatcaaccaactgacagcagccatttatgatctgcttcgcctccacgcaaattcaggcagaagtcctacagactgcgcacagagctcaaaatcagtcaaagaagcttggaccacaacggagcagctccagttcaccatcttcgccgcccacggcatctccagtaactgggtcagcaattatgaaaaatactacttaatctgctctctgagccataacgggaaagatctgttcaagcctattcagtcaaaaaaggtagggacttacaaaaacttcttttacctcatcaagtgggatgagctgatcatttttcctatccagatctcacagcttccgcttgaatctgtcttgcacctgactctctttggcatcctgaaccaatcatcaggctcttcccccgacagcaataaacagcgaaaaggccctgaggcccttgggaaggttagcctgcccctttttgactttaagagatttctcacctgtgggactaaactgctatacctttggacttcaagtcatactaatagcgtgccgggcacagtcaccaagaaaggctatgtgatggagcggattgtgttgcaagttgatttcccttcacccgctttcgacatcatctacaccacaccacaagtggacagatcaatcatacaacagcacaacttagagacactggagaacgacatcaagggcaaactgctggatattctacataaagactcaagccttggcctttctaaagaggacaaggcatttctgtgggaaaagagatactattgctttaagcaccccaactgcctgccaaaaattttagcctctgcgccgaattggaaatgggtaaatctggcaaagacatattcactcctccaccaatggccggcgttataccctctgattgcgctggaattgctcgactctaaatttgccgatcaggaagtacggagtttggccgttacttggatcgaggcgattagcgatgacgaactgacggacctacttccacagttcgttcaggcgctcaaatatgagatttatttgaactccagcttggtgcagtttctcctgagtcgtgcgctgggcaacattcaaatagcacacaatctatactggctgcttaaggacgcgctgcatgatgtgcagttcagcacccggtatgagcatgtgctcggggctctgctgtccgtaggcggaaaacgcctaagggaggaactgttaaaacagacaaagctggtccagttgctggggggagtggcagagaaagtgaggcaggccagcggatcagcaagacaagtggttctgcagagatcgatggagcgcgtccagtcctttttccaaaaaaacaaatgccgattgccactgaaaccgtcattagttgctaaggagctgaatattaaaagctgctcattttttagctccaacgctgtacccctaaaggtgacaatggtgaatgctgaccccatgggagaagagatcaacgtcatgtttaaggttggcgaagacttacggcaagacatgttggccctgcagatgattaagatcatggataagatttggttgaaagaggggctggacctgagaatggtgattttcaagtgcctgtcaactggaagggatagaggtatggtggagcttgttcccgccagcgacacacttcgcaaaatacaggtggagtacggcgtgacaggatcattcaaagataagcccctcgccgagtggctgcgtaaatataacccctccgaagaggagtatgagaaagccagtgaaaactttatttactcgtgtgccggatgttgtgtcgccacgtacgttctcggcatttgtgataggcataatgacaatatcatgctgcggtcaaccggtcacatgttccacatagactttggtaaattccttggacacgcacagatgttcgggagctttaaacgtgatcgagcacccttcgtcctgacatccgatatggcatatgtgatcaacggcggcgaaaaacctacgattcgattccagttgtttgtggatctttgttgtcaggcctataatcttataaggaagcaaaccaatctcttcctaaatctgttgtctttaatgataccatctggcttaccagaattgacatccattcaggacttgaaatatgtaagagacgccctgcagcctcagacaactgacgccgaggctacaatattctttacacggctgatagaatcaagcctggggagtatcgccactaaattcaattttttcattcataatctggcccagctcagattttccggattgccatcaaacgatgagcctatcctgagctttagtcccaagacgtacagcttccgtcaggacgggcgcatcaaagaagtaagtgtgttcacgtatcataaaaagtataatcccgacaagcattatatttacgtcgtgcgaattctgcgtgaaggccagatcgagccttctttcgtattcagaacatttgacgagttccaagagcttcataataagctgtccataatattccccctttggaagctgccaggtttccccaatcggatggtattggggagaactcacatcaaagatgtggcggccaaacgtaagatcgagctgaacagttatctgcagtctctgatgaacgcaagtacggacgtggcggagtgcgatttggtgtgcacatttttccaccccctgcttcgggatgagaaggctgagggtatcgcgaggagtgccgacgctgggtctttcagccccacacccggccagattggcggcgccgtgaaactctcaatctcatatcggaatgggactttattcatcatggtgatgcacattaaggatctggtaacagaagatggcgcggacccaaacccttatgtgaaaacgtacctccttcctgataaccacaaaacctcaaaacggaagactaagatcagtagaaaaaccaggaacccgactttcaatgaaatgctggtgtactctggatactcaaaggaaacattgagacagcgcgagcttcagctcagcgtgttaagcgctgagagtctgagggaaaatttcttcctcggaggtgtgacactgccactcaaagacttcaacctttccaaggagaccgtgaagtggtatcaactcactgccgcaacttacctctag

SEQ ID NO: 25579 - DNA, 393 bp, synthetic construct
  misc_feature 1..393: note = Description of Artificial Sequence: Synthetic coding sequence
  source 1..393: mol_type = other DNA
atggcccagatcagcagcaacagcggcttcaaggagtgccccagcagtcacccagagcctaccagggcaaaagacgtggacaaggaggaggccttgcaaatggaggccgaagcactggccaaactgcaaaaggataggcaagtgaccgacaaccaaaggggctttgaactcagcagctccacccgaaaaaaagcgcaagtctacaataaacaggactacgacctgatggtatttcccgagtcggattcccagaagagagcccttgatattgacgtcgaaaagctcactcaggccgagttggaaaagttattgttagacgactcatttgagacgaagaagactcctgtacttcccgtgacgcccatcctctccccttcctttagcgcccagtag

SEQ ID NO: 25580 - DNA, 1452 bp, synthetic construct
  misc_feature 1..1452: note = Description of Artificial Sequence: Synthetic coding sequence
  source 1..1452: mol_type = other DNA
atggcccagatcagcagcaacagcggcttcaaggagtgccccagctcccatccagagccaaccagggcaaaagacgtggataaagaggaggccttacagatggaggccgaagctttggcaaagctgcagaaggaccggcaggtgacagacaatcaaagagggttcgaactgtcgagctcaacacgaaagaaggctcaggtatacaataagcaagattacgatttgatggtatttccagagtctgattcgcagaaaagggcactcgacatcgacgtcgaaaagctgacccaggccgagttagagaagctgctcctggatgattccttcgaaaccaagaaaacgcccgtgctgcccgtgacgcccattttgagcccctccttcagcgcccaactgtattttcggcctactatacagcgaggtcagtggccaccagggcttccgggcccatcaacctatgccctgccttctatctacccaagcacttactccaaacaagctgcctttcagaatggatttaatccaagaatgcctacgttcccatctaccgagcccatctacctgtccttgcctgggcagtccccctatttctcatatccactcaccccagccacgcctttccacccgcagggatccctcccgatttaccgcccggtggttagcacggacatggctaagctgttcgacaaaattgcaagtacgtccgagttcttaaagaatgggaaagcaagaactgatctggagattacagatagcaaagtttccaatttacaggttagccccaaatcagaagacatttctaaattcgactggctggacttagaccctctcagcaagcctaaagtggataatgttgaagtgttggaccacgaggaagagaagaacgtgtcgtccctgctcgccaaagacccttgggatgcagtccttcttgaggagcggagcaccgccaactgccacctcgaaagaaaagttaacggtaaaagcctgtccgtggcaacagtgactcgttctcaatcattgaacattcgcaccacacaactcgcaaaagcccaaggccacatctcacagaaggatcccaatggaacaagttccctgcccactggatccagtcttctccaagaggtcgaagtccagaatgaggagatggcggctttctgtcgtagcatcacaaagctgaaaacgaagttcccctacactaatcatcggaccaaccccggatatttgctgagtcccgtgactgcccaacggaatatctgcggggagaatgctagcgttaaagtgagtattgatattgaagggttccagttacctgtcacattcacctgcgacgtgtccagcactgtagagattattatcatgcaggcattatgttgggtgcacgacgatttgaatcaggtggatgtcggcagctatgtgctgaaagtttgcggccaggaggaagttttgcaaaaatag

SEQ ID NO: 25581 - DNA, 3921 bp, synthetic construct
  misc_feature 1..3921: note = Description of Artificial Sequence: Synthetic coding sequence
  source 1..3921: mol_type = other DNA
atggccgccttctgccggagcatcaccaagctgaagaccaagttcccatacactaatcacaggaccaaccccggctatcttctatcccctgtaacagcccagcggaatatttgcggtgagaatgcgtcagttaaagtgtcaatcgatatcgagggctttcagctgcccgttacttttacttgcgacgttagctctacagtggagatcataataatgcaggccctatgctgggtacatgacgatcttaatcaggtcgacgtggggtcatatgtgctgaaagtatgtggccaggaggaagtgctgcagaacaatcattgtcttgggtcgcacgaacatatccagaattgtcgcaagtgggacacggagataagattgcagttgcttacgtttagtgcaatgtgtcagaacctcgcacgtaccgctgaggatgacgagactccagtggatctgaacaaacacctgtatcaaatagagaaaccttgtaaggaggccatgacaagacatcccgtggaagaactcctggactcttatcacaaccaggtggagctggctctgcaaatcgagaaccagcatcgagctgtggatcaggtgatcaaggccgttaggaaaatctgctctgctcttgatggagttgaaaccttggccatcactgagagcgtgaagaagctgaagcgcgcggtgaacctccctagaagtaagactgctgatgtaacatctttatttggcggcgaggatacgtcgcgttctagcacccggggctcactgaaccccgagaatcccgttcaggtctctatcaatcagctgactgctgccatctatgacctcctcaggttacacgctaattccggaagatccccaacagactgtgcgcaatcatccaaatctgtcaaggaagcatggaccacgacggagcagttacagttcaccatattcgctgcccacggaatttctagtaattgggttagtaactacgaaaagtactatctgatctgttctttgagtcacaatggaaaagacctgtttaagccaatacagtccaaaaaggtgggtacttataaaaactttttctacctaatcaaatgggatgaacttattatttttcccatacaaattagccagctgcccctcgaatcagtgttgcacttaacgctgtttggaatcctgaaccagagttccgggtcttcccctgactccaacaagcaacgtaagggtccagaggctctgggtaaggtctccctgcctctgtttgacttcaaaaggtttctgacttgcggcacgaagctcctatacctgtggacctccagccacaccaactctgttccagggaccgtcactaagaaaggatacgtgatggagagaatcgtgctgcaggtagatttcccatctccagcgttcgatataatctacacaacacctcaggtggatcgcagtatcatccagcaacataacttggagacactggagaatgacattaagggtaagctgttggacattctccataaagacagttcgctcgggctctcgaaggaggacaaggcatttctgtgggaaaagcggtactattgctttaagcatcctaactgcctgcccaaaattctggcatccgcacctaattggaaatgggtgaacctcgccaagacctattctttgttacaccagtggccagcgctgtacccattgatcgctctcgagcttctggatagtaaatttgctgatcaggaagtgcgctcactcgcggtgacttggattgaggccataagcgacgacgagctgactgacctcctgccccagtttgtgcaggccctcaagtacgaaatctatctcaactcctcattggtccaatttctcctctcaagagccctgggtaacattcagatcgctcataatctctattggctgctaaaggacgccttgcacgatgtgcagttcagcactcggtatgagcacgtcctgggcgccttattaagcgttggtggaaaaaggctgcgggaggagctgctgaaacagacgaaactggtgcagttgttgggtggggtggccgagaaagtcaggcaggcctccggctcggcacgtcaagtcgtattgcagcgaagcatggaacgggtgcagagcttcttccagaagaataaatgccggttgcccctaaaaccatcactggtcgcaaaagagctaaatatcaaatcctgttccttcttctcttcaaacgccgtacccctcaaggtaactatggtgaatgcagaccctatgggcgaagaaatcaacgtaatgtttaaggtcggcgaggacctcaggcaggacatgctggcgctgcagatgatcaaaattatggacaagatctggttaaaagagggattggacttgcggatggtcatattcaagtgtctgtcaaccggccgggatagaggcatggtagaactggttcccgctagtgacacacttagaaaaattcaagtggaatacggggtgaccggatctttcaaggacaagccactcgccgagtggctgaggaagtacaacccttccgaggaggagtacgagaaggccagcgagaattttatctactcctgcgctggctgttgcgtggctacttatgtgctcggaatctgtgatcgtcacaatgacaatatcatgctaagatcaactggacacatgtttcatattgactttggcaaattcctcggtcatgcgcagatgttcgggagtttcaaacgagatcgcgcacccttcgttctaactagcgacatggcgtacgttatcaatggcggcgagaaaccgacaatcagattccagttgtttgtggatctatgctgtcaggcctataaccttatccgcaagcagaccaatctgtttctgaacctcctgagcctgatgattccttcaggcctacccgaattgaccagcatacaggatttgaagtacgtgcgtgacgccctgcagccccagaccaccgatgccgaagccaccattttcttcactcggcttatcgagagctccctcggttcaattgcgaccaagttcaacttttttatacataacctggcccagttgcgattttctggtcttcctagcaatgacgagcccattctctcattttctcctaagacctacagttttagacaggacggtcggataaaagaggtgagcgtatttacataccataagaaatacaacccggacaaacactacatttatgtggtccggattctgcgtgaaggacagattgaaccatcgtttgtgttcagaacatttgacgaatttcaggagctccataacaagctgtctattatcttccccttatggaagttgccagggttccctaatagaatggtacttggtcgtacacacatcaaagacgtggcagccaaaagaaaaattgagttaaacagttatctgcaaagccttatgaatgctagtacagatgtcgccgagtgtgatcttgtgtgtacttttttccaccccctgcttagagacgaaaaggcagagggcattgctaggtcggccgacgcgggttccttcagcccaactcctggccaaattgggggcgccgtcaagttgagtatttcataccggaacgggacactcttcatcatggtgatgcatatcaaggatctggtgactgaggatggggctgacccaaatccctatgtcaagacgtatctgctgccagataaccacaaaacatctaaaagaaaaactaagatttcaagaaagactcgaaacccgacctttaacgagatgctggtctacagcggttatagcaaagagacccttcgccaaagggagctgcaactatccgtgctcagcgccgaaagcctaagggagaatttctttttgggcggtgtcactctgcctctgaaagattttaacctgagcaaagagactgtcaaatggtaccaacttacagccgccacatatctctag

SEQ ID NO: 25582 - DNA, 1947 bp, synthetic construct
  misc_feature 1..1947: note = Description of Artificial Sequence: Synthetic coding sequence
  source 1..1947: mol_type = other DNA
atggcccagatcagcagcaacagcggcttcaaggagtgccccagctcgcatcctgaaccaacccgcgccaaggatgttgataaggaggaggccctacagatggaggcggaggcacttgccaagcttcagaaggatcggcaggtaactgacaatcagcgtggctttgagttgagctcttcgacgcgaaaaaaagcgcaggtatataataaacaggattacgacctgatggtctttccagagagcgatagtcaaaaaagggctctcgatatagatgttgaaaaactgactcaagcagagctggaaaaactcctgctggacgacagctttgagaccaagaagactccggtgctccctgtgacccccatcttatctccaagcttcagcgcgcaactgtactttcgaccaacaatacagcggggccagtggccacccgggcttccgggcccatcaacgtatgccctgccttctatttacccaagcacttattccaagcaagccgcttttcagaacggattcaatcctcgtatgccgacttttcctagtaccgagccaatttacctaagcctgccgggacagtccccatacttcagctaccccctgaccccagctactccattccatccccaggggagcctgccaatttatagaccagtcgttagcaccgacatggccaagttattcgataagatcgcttccacatcagaattcctcaaaaatggcaaagcacgcaccgacttggaaatcaccgattcaaaggtgtcaaacctccaggtttcacctaagagcgaggacattagtaagttcgactggctggatcttgatccactgtcaaagccaaaggtggataatgtagaggtgctggatcacgaggaagagaagaatgtctcgagcctcttagctaaagatccctgggacgctgtgctattagaggagcggtccacagctaactgtcacttggaaaggaaggtcaatggcaagtcgctgtcagtagctacggtgaccaggtcgcagtcactgaatataaggactacacaactggccaaggcccaaggccatatctcccagaaagaccccaatggtaccagtagccttccgactggttcatctctgctgcaagaggtcgaggtgcagaatgaggaaatggccgctttctgccgatcgattaccaagctgaagactaaatttccttatactaatcaccggacgaaccccgggtacctgctgagtccagtgacagcacagcggaacatttgtggcgaaaatgcaagcgtgaaggttagtatcgacatcgagggattccagttaccagtaaccttcacctgcgatgtgagctccaccgtggaaataataatcatgcaggctctgtgttgggtgcacgatgatcttaaccaggtcgacgtgggcagctacgttctcaaagtctgtggtcaggaggaggttcttcagaacaaccattgtctcgggtcccacgagcacatccagaactgcaggaagtgggacacagagatcaggctgcaattactgaccttctccgctatgtgccagaatctggcccggacagcagaagacgacgagacccctgtagaccttaataaacacctgtaccagatcgaaaaaccctgcaaagaggcgatgacaaggcatcccgtggaagagctcctggactcatatcacaatcaggtggagcttgccctccagattgagaaccaacatcgggccgtggatcaggtaattaaggccgtacggaaaatctgttccgccctcgacggcgtcgagaccctggccatcacagaaagcgtcaagaagctcaagagggcagtgaatctaccccgctctaagactgccgatgtgacaagtttgttcggaggcgaggacacatctcgaagctccactagaggatcactcaacccagaaaaccccgttcaggtgagtataaaccagctctag

SEQ ID NO: 25583 - DNA, 2664 bp, synthetic construct
  misc_feature 1..2664: note = Description of Artificial Sequence: Synthetic coding sequence
  source 1..2664: mol_type = other DNA
atgggcgaggccgagaagttccactacatctacagctgcgacctggatataaacgtccagctcaaaataggatctctggaaggcaaacgagagcagaagtcctacaaggccgtcttggaagatcccatgttaaagttctcgggcctgtaccaagagacatgctctgacttatacgtaacatgccaagtgtttgccgaaggtaaacctttggcccttcccgtgcgaacaagttacaaggccttcagcacgaggtggaactggaatgaatggttgaagctccctgttaagtaccctgatctccctcgaaacgcacaggttgcactgacgatctgggatgtgtacggaccaggcaaagccgtaccagttggagggaccacggtgagcctcttcgggaaatatggcatgttcaggcaaggcatgcacgaccttaaggtatggcctaacgttgaggccgacggctctgagcctaccaaaacacctggccggacgtcttcgactctatccgaggaccagatgtcaaggcttgccaaactcaccaaggcacacaggcaaggacacatggtgaaagtagactggctggataggttaaccttccgcgagatcgaaatgatcaatgagagtgaaaagaggtcctcgaattttatgtacctgatggtggagttcagatgcgtcaagtgcgacgacaaggagtacgggatagtgtattatgaaaaggatggtgacgagtcatccccaatcctcacctcctttgagcttgtcaaggtgccggacccccagatgagcatggaaaatctagtggagtctaagcaccataaacttgccaggtccctgaggagcgggcccagcgatcacgacctcaagcccaatgctgccacgagagaccagctgaacatcatcgtgtcttatccccccaccaagcaattaacatacgaagagcaggacctggtgtggaagttcaggtattacctgaccaaccaagagaaagccctgacaaagttcttgaagtgcgtgaactgggatctaccccaggaagctaaacaagctctggaactgctgggcaagtggaaaccaatggacgtggaggacagcctggaactgcttagctctcactacaccaatccgaccgtgcggaggtatgctgtcgctcgactgagacaagcggatgacgaagacttactcatgtacctgctgcagctggtacaagccctgaaatacgagaacttcgatgacataaagaacggactcgaacccacgaagaaagacagtcagtcctcggtgtcagagaacgtatccaattccgggatcaatagtgcagaaatcgacagttcccagatcattacttcacctctgccatccgtctcttcaccaccgcccgccagcaaaactaaggaggttcccgacggcgagaatcttgaacaggatctctgtactttcttgatcagccgggcatgtaagaattccacactggccaactacctgtactggtacgtgatagtcgagtgcgaggatcaggatactcaacagagggacccgaagacacacgagatgtacctgaacgttatgcgaagattttctcaggccctgctaaagggggacaagtctgtcagggtgatgcggtccctgttggccgcccaacaaactttcgtagataggttggtgcaccttatgaaagccgttcagcgcgagtccggaaatagaaagaagaaaaatgagagattgcaggcactcctgggggacaacgagaagatgaacctgtccgatgtagagcttatccctctgcccctcgagccccaggtgaaaattcgtggtataatccctgaaaccgccactctctttaagtccgctcttatgcccgcccagctgttcttcaagacggaggatggggggaaatatcctgtgatcttcaagcacggcgatgaccttaggcaggaccagctcattctgcaaatcatctctctgatggataagctgcttcgaaaagaaaacctggacctgaaactgacgccctacaaagttctggccacatctaccaagcacggatttatgcagttcattcaatccgtaccagtggctgaggtgctcgacacagagggttctatacagaacttttttagaaagtatgctccatctgaaaatggccctaatgggatttcagctgaggtcatggacacttacgtcaaatcctgtgcagggtattgcgtgatcacatacattttgggggtgggcgatagacacttagacaatttactgctgacaaagaccggcaaattatttcacattgatttcgggtatatcctggggagggaccctaaaccccttccccccccgatgaaactgaataaagagatggtagagggcatggggggcacccagagtgagcaataccaagagttccgaaaacagtgttatactgcctttctgcaccttcggaggtactcaaatcttattctgaacctattctctctcatggtggacgcaaacatccctgacatcgctctggagcctgataagactgttaaaaaggttcaggacaaattccgactggatttgtctgacgaggaagcggtgcactacatgcagtccctgatcgacgaaagcgttcatgcgctgtttgctgcggtggtagaacaaatccacaagttcgctcagtactggaggaaatag

SEQ ID NO: 25584 - DNA, 2475 bp, synthetic construct
  misc_feature 1..2475: note = Description of Artificial Sequence: Synthetic coding sequence
  source 1..2475: mol_type = other DNA
atgggcgaggccgagaagttccactacatctacagctgcgacctggacatcaacgtgcagttgaaaatctggaatgaatggttgaaattgccagtcaagtacccggacctcccccgcaatgcccaggtggccttaaccatctgggatgtctacgggccaggaaaagccgtgccggtggggggcactaccgtatcgctttttggcaagtatggcatgtttcggcaggggatgcatgatctgaaagtttggcccaatgttgaagctgacggaagcgaaccaaccaaaaccccggggagaacctcatccacactctccgaggatcaaatgagtcgactagccaagctcaccaaggcacatcgccagggacatatggtgaaagtagattggctggacaggttaacatttagagaaatcgagatgatcaacgagtcggaaaaacgctcaagtaattttatgtatctgatggtggaattcagatgtgtgaagtgcgacgacaaggaatatggcatcgtttactatgaaaaagatggtgatgaatcctcccctatcctgacctcttttgaactggtaaaggtcccagacccccaaatgagcatggaaaatctggtagagtccaaacaccacaagcttgcacgctcactgagaagcggcccttcggaccatgatctgaagcctaacgcagccaccagagatcagcttaacatcatcgtgagctatccgccaaccaagcaactgacatacgaggagcaggacttagtgtggaagtttcgatactacctgacaaatcaggaaaaggcactcacgaaatttttgaagtgtgtgaattgggacctaccgcaggaggccaagcaggccctcgagcttttagggaagtggaagcctatggacgtcgaggactctctggaactgctgtcatctcactacactaacccaacagtgcggagatacgccgtcgcgcgcctgcgccaggccgacgacgaggaccttctgatgtacctgctgcagctggtgcaggccctgaagtatgagaactttgatgacatcaaaaatggcctggaacccacaaagaaagattcgcagtcaagcgtgagtgaaaatgttagcaattctggtatcaacagcgccgagatcgactccagccagataattaccagccccctgccttcagtgtctagtcctccaccagcttctaaaacaaaggaagtgcctgacggcgagaaccttgagcaggacttgtgcacatttctcatctctagggcctgcaaaaactctactctcgcgaactatctttattggtatgtaatagtcgaatgcgaggaccaggatacacaacagagagaccctaaaacacatgagatgtacctcaatgtgatgcgaaggttctcccaggcactgctcaagggagataagagcgtgcgtgtgatgcgaagtctgctcgccgcccaacaaaccttcgtggacagacttgttcatctgatgaaagcagtacagcgagagagtggaaaccgcaagaagaagaatgagcgtttacaagccctgctgggggacaatgaaaaaatgaatctgagtgacgtggagttaatcccgctgccactggaaccccaagtaaagataagaggcatcataccagaaacagcaacactgttcaagtccgctttgatgccagcccagctgttcttcaagacagaagacggcggcaagtacccagtgatcttcaagcatggggatgatctgcgacaggatcagctcattctacagattattagcctcatggataagcttctacgaaaagaaaacctcgacctcaaattgaccccttataaggtgttggccaccagcaccaagcatggcttcatgcagtttattcagtcagtgcccgtcgcggaggtcttggatacagaggggtccattcagaacttttttcgcaagtacgctcccagtgagaatggtccaaacggaatctctgcagaggttatggatacctatgtcaagtcgtgtgctggatactgtgtgataacctatatcttaggtgtaggagaccggcacctggataacctcttgcttacaaagacggggaagctgtttcacattgacttcggatacatcctagggcgggacccaaaaccgctgcctccccccatgaagctgaataaagaaatggttgagggcatggggggaacccagtcagaacagtatcaggagttccgcaaacaatgctataccgcgtttctccatctccggcgatactcaaacctcatcctcaaccttttctctctgatggtagatgctaatatccccgatatcgctctagaaccagataagaccgtgaaaaaggtgcaggataagtttaggcttgatctgagtgatgaagaggccgtgcactacatgcagagtcttattgacgagtcagttcatgccctttttgcagccgttgttgagcagatccataaattcgcgcaatattggaggaagtag

SEQ ID NO: 25585 - DNA, 2175 bp, synthetic construct
  misc_feature 1..2175: note = Description of Artificial Sequence: Synthetic coding sequence
  source 1..2175: mol_type = other DNA
atgagcgccgagggctaccagtaccgggccctgtacgactacaagaaggagcgggaggaagacattgatcttcatctaggcgatatcctaacagtaaacaaaggaagtctggtggccctgggattttccgatggacaagaggcacgccccgaagagatcggatggctgaatggctataacgaaactacaggggagcgtggcgacttccctggaacctacgtggagtatatcggacgaaagaagatttctccccccacccccaagccgcgcccccctcgaccgcttcctgtggctccaggttcctctaaaaccgaggcagacgtcgaacagcaagccctcactctgcctgatcttgctgagcagttcgcgccccctgatatcgcccctcctctactgattaaactagtagaggctattgaaaaaaaaggtctggagtgcagcactctctatcgaactcagagttccagcaacctggccgaacttcgtcagctgctcgactgcgacactccgtcggttgacctggagatgatagatgtccatgtactggctgatgcattcaaacggtacctgttggatcttcccaaccccgtgatcccggctgctgtatacagcgaaatgatatctcttgcaccagaggtgcaaagttcagaggaatacatccagctacttaaaaagctcatccggagtcccagtattcctcaccaatactggctcaccttgcagtatcttctcaagcactttttcaagttatctcaaacgtccagcaagaatctgctgaacgctcgcgtgctgtcagaaatattctccccgatgttatttagattctctgctgcaagctccgataataccgagaacctgattaaggtaatcgaaatattaatctccaccgaatggaacgagagacagccagcgcctgctctgccgcccaaaccccctaagccaactaccgtggcaaataatggcatgaacaataatatgagtcttcaggacgccgagtggtactggggggatatctctcgcgaggaggtgaacgagaaattacgagatactgctgatggcacatttctggtccgggatgccagcaccaagatgcatggggattatacactgacactgaggaagggagggaataataaactgatcaaaatctttcacagagacgggaagtatggctttagcgacccactgaccttctcctccgtggttgagctgatcaatcattaccgcaatgagagcctggctcagtacaatcctaagcttgatgtgaaactgctatatcctgtttccaagtatcagcaggatcaagttgtgaaggaggataatattgaggccgtcggcaagaagctgcatgagtacaacacccagttccaggagaaatccagggagtatgacagactgtacgaggagtacactcgcacaagccaggaaatccagatgaaaaggaccgctattgaggcattcaacgagaccatcaaaattttcgaggagcagtgccagacacaggagaggtactcaaaagaatatatcgaaaagtttaaaagggaggggaatgaaaaagagatacagcggatcatgcacaactatgataaacttaaatcacgcataagtgaaatcatagattcacgaagacgcttggaagaggacctcaaaaagcaggccgctgaatatcgtgaaatcgacaagaggatgaattctattaagcctgatctgatccagctccgcaaaacccgcgaccagtatttgatgtggctgacgcagaagggtgtgagacaaaagaaattgaatgagtggctgggaaatgagaatactgaggaccagtattctctggttgaagatgatgaagatttgccacatcatgacgaaaagacatggaacgtgggctcaagcaacaggaataaagcggaaaatcttctcagggggaaaagagacggaacttttcttgtccgggagagcagtaagcagggatgctacgcttgcagcgtcgttgtcgatggcgaagtcaagcattgtgtaattaacaagacggcaacagggtacggtttcgccgagccctataacttgtacagctccctcaaagagctcgtgctgcattaccagcataccagcctggtgcagcataatgactcactaaatgtcaccctggcttacccagtatacgctcagcaacgacgctag

SEQ ID NO: 25586 - DNA, 1275 bp, synthetic construct
  misc_feature 1..1275: note = Description of Artificial Sequence: Synthetic coding sequence
  source 1..1275: mol_type = other DNA
atgcacaacctgcagaccctgccccccaagccccccaagcccaccacagttgccaacaacggcatgaataataacatgagcctacaggacgcagagtggtattggggcgacatctcaagagaggaggtgaacgagaagctgagggatacagccgacgggactttcctggtcagagatgccagcactaagatgcacggtgattacaccctgaccctcagaaagggcggaaataacaaactgatcaaaattttccacagagacgggaagtacggcttctccgacccacttactttttccagtgtggttgagctgatcaatcactacagaaacgaaagtctcgctcagtacaatccaaagctggatgtcaaactcctctaccccgtgagtaaatatcagcaagatcaggtcgtgaaggaagacaatatcgaggctgtcgggaaaaagctccacgagtacaatacgcaattccaggaaaaatctcgcgagtatgaccgactgtacgaggagtatacgcggaccagtcaggaaattcagatgaagcggaccgccattgaagccttcaacgaaacaatcaagatcttcgaggagcagtgccagacgcaagagagatatagtaaggagtatattgaaaaattcaaacgggaaggaaatgaaaaggagatccaacgcatcatgcataactacgacaagctgaagagtaggataagtgaaattatcgattcccgccgacgcctggaggaggatttgaaaaaacaggctgccgagtatagggagatcgacaaacgaatgaactcgatcaaacctgacctgattcagttgagaaaaaccagggaccagtatctcatgtggctaacacaaaagggcgtgaggcaaaagaagctaaacgagtggctgggcaatgagaacacggaggatcaatacagcctggtagaagatgacgaagatctccctcaccacgacgagaaaacatggaatgtaggcagctctaacaggaataaagccgaaaatttgctgagggggaagagggatggaaccttcctcgtcagggaaagctctaaacaaggctgctacgcctgttctgtggtggtcgacggtgaggtgaagcactgtgtaattaacaagacagcaactggctacggcttcgcagagccttacaatctgtatagctcactcaaggagctggttcttcattatcagcacactagtctagtccaacataatgactctttaaacgtgacactcgcctatccagtgtacgcacaacagagaagatag

SEQ ID NO: 25587 - DNA, 1365 bp, synthetic construct
  misc_feature 1..1365: note = Description of Artificial Sequence: Synthetic coding sequence
  source 1..1365: mol_type = other DNA
atgtacaacaccgtgtggaacatggaggacctggacctggagtacgccaaaaccgacatcaattgcggaacagaccttatgttttatatcgaaatggatccgcccgcattgccacccaagccgccgaagccaactactgtggcgaacaacgggatgaataacaacatgagtctgcaggacgccgaatggtactggggggacatcagtagagaagaggtcaatgagaagctacgcgacaccgccgatgggacattcctggtgcgggatgccagcactaagatgcacggagactatacattaaccctgagaaagggcgggaataataagctgatcaagatctttcacagggacggtaaatacggcttcagtgatccactcaccttctcctctgttgtggagctgatcaatcactataggaacgagtcccttgcccagtataatccaaagcttgacgttaagctgctgtacccagtgtctaaatatcagcaggaccaagtggtaaaagaagataacattgaggcggtcggcaaaaagctccacgagtataacacacagtttcaggaaaagtctagggaatacgaccgcctgtatgaggaatacaccaggaccagtcaggagatacagatgaaacggacggctatcgaggcttttaatgaaacgattaaaatctttgaagaacaatgccagacgcaggagagatactccaaagaatacatagaaaagttcaagcgagaaggaaatgagaaagaaatccaacggattatgcacaactacgataaactgaagagcaggatttccgaaatcattgattcccggcggcgattggaagaagaccttaagaagcaggccgcggagtaccgcgagattgacaagcgaatgaactccatcaaaccagacttgatccagctgcgcaaaaccagagaccaatacctcatgtggctgacccagaaaggcgtgcgacagaagaagctgaacgagtggcttggcaatgaaaacaccgaggatcagtactcattggtggaagacgacgaagacctgccacatcacgacgagaaaacatggaatgtcggcagctcaaatcgtaacaaggctgagaaccttcttagggggaagagagatggcacattcctcgtaagagagtctagtaagcaggggtgctacgcgtgctccgtggtggtcgacggagaggtgaagcactgtgtcatcaataaaaccgcaaccggatatggttttgctgagccgtacaacttgtactcttctctcaaggagcttgtcctgcactatcagcatacatcgcttgttcagcacaatgactcgttaaacgtgacactcgcgtaccctgtctacgcgcaacaaaggcggtag

SEQ ID NO: 25588 - DNA, 2199 bp, synthetic construct
  misc_feature 1..2199: note = Description of Artificial Sequence: Synthetic coding sequence
  source 1..2199: mol_type = other DNA
atgagcgccgagggctaccagtaccgggccctgtacgactacaagaaggagagagaggaggatattgacctgcatctgggtgatatcctgactgtgaacaagggaagtctggtggctctggggttttctgatggtcaggaggcccgacctgaagagattggttggctgaatggatataatgaaaccactggggaacgaggggattttccaggaacttacgtcgagtatataggaagaaaaaagatatctcctcctactccgaagcccagaccaccccggcccctacctgttgccccagggtcaagcaagacggaggccgatgtggaacaacaggccctgaccttgcccgatctagcagaacagttcgcccctcctgacatcgcccctcccttacttataaaactggtggaggcgatcgagaaaaaaggtctggaatgttccacactgtatcgtactcagagctcaagcaacctggcggagttacgccagttgcttgattgcgacaccccctcagttgacctggagatgatcgatgtgcacgtgcttgccgatgcattcaaaaggtatctgctggatctgccaaatccagtgattccggccgccgtgtatagcgagatgatcagtttggctcctgaagtacaaagctctgaggaatatatccagctgctgaagaagcttatccgcagcccgagcattccacatcaatactggctcacactgcaataccttctcaaacactttttcaagttgagtcagacttcatcaaagaaccttctgaacgccagggtcctatctgaaatcttcagccctatgctgtttagattctctgctgcttcctcagacaataccgaaaacttaattaaggtcatcgaaatactgattagtacagaatggaatgagagacagcctgcccccgcccttccacccaaaccgcctaagccgactacagtggctaacaacgggatgaacaacaatatgtccctgcaggacgctgaatggtactggggcgacatatctcgggaggaagtgaacgaaaaacttagggacacagctgatggtacctttctggttcgcgacgccagcactaaaatgcacggggattacacccttaccctacgaaaaggagggaataacaaactcattaagatctttcatcgggacggtaagtatgggttctccgatcctttgacgtttagctcagtggtggaactgataaaccactaccgtaacgaaagcctggcccaatataatccaaagctggatgtgaaactgttgtatccagttagcaaatatcagcaggaccaagtagtgaaggaggacaacatagaggctgtcggaaagaaactgcacgagtataacacgcagttccaggaaaagtcccgggagtacgatcgtctgtacgaggagtacaccaggactagccaggagatccagatgaagaggactgccattgaggcttttaacgagactatcaaaatattcgaagagcagtgccaaactcaggaaaggtactcaaaagaatacattgagaaatttaagcgcgaagggaacgaaaaggaaatacagaggatcatgcacaattatgataagctgaagtctaggatctcagaaattatcgactcacggcgcaggctagaggaggacctgaaaaagcaggcagcagagtatcgtgagatcgacaagcggatgaacagcatcaagccagaccttatccaactgcggaagaccagggaccagtatctcatgtggcttacacagaagggagtacggcagaagaagctgaacgagtggctaggtaatgagaacaccgaggagaacttcctgtcctgtttgccttcacaatactctttagttgaagacgatgaagatctacctcaccatgatgagaagacctggaacgtggggagttctaacaggaataaagctgagaaccttctgaggggaaaacgggacggcacgttcctcgttcgggagtcaagtaaacagggctgctacgcgtgcagcgtggtggttgacggcgaagttaaacattgtgtgattaacaagaccgcgaccgggtatgggtttgcagagccctacaatctgtattcttctctgaaggagttggtgcttcactaccagcacacctcattggtacaacataatgacagcctgaatgtgaccttggcgtatcctgtgtacgcgcagcaacggcggtag

SEQ ID NO: 25589 - DNA, 2175 bp, synthetic construct
  misc_feature 1..2175: note = Description of Artificial Sequence: Synthetic coding sequence
  source 1..2175: mol_type = other DNA
atgagcgccgagggctaccagtaccgggccctgtacgactacaagaaggagagggaggaagacattgacctgcatttgggggacatcctgacagtgaacaagggctcacttgtggcactgggattctcagacgggcaagaagcccgccccgaggagatcggatggcttaatggctataatgagacaaccggagagcgtggtgattttcctggcacctacgtggagtatatcggtcggaaaaaaatctcccctcccacccctaaacctcgaccacctaggccactgccagtcgcgccagggtcatctaaaactgaagcggacgtggaacaacaggccctaactctgcccgatctcgcagagcagttcgctcctccggacatcgcaccacctcttctgataaaactcgtggaagcgatcgaaaagaaaggacttgaatgctccacactatacaggactcagtccagctccaacctcgctgaactgagacagctgctcgactgtgataccccaagcgttgatttggagatgatcgatgtccacgtgcttgccgacgcctttaagcgctaccttttggacctacccaatcctgtgatacctgcggcagtttattccgagatgattagtctggctcctgaagtgcagtcctcggaagaatacatacagcttctcaaaaagctcatccggtcaccctcaatcccacaccagtattggctgacacttcagtatctgctgaagcacttttttaaactttcacagacctcctctaagaacttacttaatgcacgggtcctgagcgagattttttccccaatgctctttcgattctcggctgccagtagcgataatacggaaaatctgatcaaggtaatcgaaatattgatttctaccgagtggaacgagagacagcccgcgcctgcccttccccccaagcctcctaaacctactactgttgccaataatgggatgaacaacaacatgtcgctccaggacgctgaatggtattggggtgatatttcccgcgaagaagttaacgaaaagctgcgcgacacagcggacggcacattcctggtacgcgacgccagtactaaaatgcacggcgattataccttgacactccgcaaggggggcaataacaagttaatcaaaatctttcaccgagacggtaagtacgggttctcagatcccctgaccttctctagcgtagtggaattgatcaaccattaccgaaacgaatcactggcccagtataaccccaagctagatgtcaaacttttgtaccctgtgagtaaataccagcaggatcaagtggtcaaagaagacaacatagaggccgtcggcaaaaaactgcacgagtacaatacacagtttcaggaaaaatctcgggaatatgatcgtctgtacgaggagtacacccggacgtcccaggagattcaaatgaagcggactgcgattgaggcctttaacgaaactattaaaatcttcgaggaacaatgccagacacaagaacgctactcaaaagagtatatagagaaatttaagagggaagggaatgagaaggagatccagcggattatgcataattacgataaattgaaatctcggatctcagagattatcgacagtcgcaggaggctggaagaggatttgaaaaaacaggccgctgaataccgcgagatagataagaggatgaacagcattaaacccgatcttatccagcttcgaaaaacaagggaccaatatttgatgtggctaacccagaagggtgttagacagaagaagcttaacgagtggcttggcaacgaaaataccgaggaccagtattctcttgtggaggacgatgaagatcttccacaccacgatgagaaaacttggaatgtgggcagcagtaatcgtaacaaggctgagaacctactccgtggcaagcgtgacggcacatttttggtcagggagtcttcgaaacagggctgttatgcgtgctcggtcgttgtcgatggggaagtcaagcactgcgtgatcaacaagacagcaacgggatacggctttgctgaaccgtacaacctttattcatcccttaaagaacttgttctgcactatcagcatacctcattagtccagcacaatgactcacttaacgtgacactggcctaccctgtctatgcacagcagaggcgctag

SEQ ID NO: 25590 - DNA, 414 bp, synthetic construct
  misc_feature 1..414: note = Description of Artificial Sequence: Synthetic coding sequence
  source 1..414: mol_type = other DNA
atgcacggcgactacaccctgaccctgcggaagggcggcaacaacaaactaatcaaaattttccatcgagacggaaagtacggattctctgacccactgactttcagctccgtagtggagcttattaaccactatcggaacgaatccctggctcaatataatcccaaattagacgtgaagctcctttatcctgtgtccaagtatcagcaggatcaagtcgtgaaagaagacaatatcgaagcagtcggcaaaaaattgcacgagtataatactcagtttcaggagaagtcccgagaatacgaccgattatacgaggagtatactcggacttcccaagagatacaaatgaagagaaccgccattgaagctttcaacgaaaccattaagatttttgaggagcaatgccagacttag

SEQ ID NO: 25591 - DNA, 2175 bp, synthetic construct
  misc_feature 1..2175: note = Description of Artificial Sequence: Synthetic coding sequence
  source 1..2175: mol_type = other DNA
atgagcgccgagggctaccagtaccgggccctgtacgactacaagaaggagcgggaggaggatatcgacctgcatctgggggatattcttaccgttaacaagggaagtttagtggccctagggttctctgacggtcaggaagcacgacccgaggagatcggatggctgaacggatacaacgagaccacgggcgaacggggcgatttccccggaacgtacgtggaatacatcggtcggaagaagatcagtccgcccaccccgaagcctcgaccgccccgacccctacccgtcgcaccgggctcaagtaaaacagaggcagacgttgagcagcaggccctaacactgcctgatcttgcagagcagttcgcacccccggacatagcgccacctctgctgatcaaattagtcgaggcaattgagaagaaggggctggagtgtagtactctctatagaacacagtcatctagcaacctggcagagctgaggcagctgctggactgcgataccccctctgtcgatctggagatgatcgatgtgcacgtcctggctgatgcattcaaacgctatctacttgatcttccgaatcccgtcattcccgcagccgtgtactcggaaatgatctccctggctcccgaagtccagtcttccgaggagtacattcagttactgaaaaaactgatcaggagccccagcataccccatcaatactggctgacgctgcaatacctgctgaagcacttttttaaactgtcccagacctcaagtaaaaatctgctgaacgcccgagtcctgagcgagattttttcaccaatgctgttcaggttcagtgccgcgagctccgacaatacagaaaatctcattaaggtgatagaaattttgatcagcaccgagtggaatgagcgccagcccgctccggccctgccacctaagccaccgaaaccaacaactgttgccaacaatggcatgaacaacaatatgtcccttcaagatgccgagtggtactggggtgacattagccgagaagaggtaaatgagaagctccgtgacacggccgatggtacctttcttgtcagagatgcctccacaaagatgcatggtgattataccctgacactgaggaagggagggaataacaaattaataaagatatttcaccgcgacgggaagtatgggttctccgaccctctgactttctcctccgttgtagagttaatcaaccattacagaaacgagagcctggcacaatataacccgaaactcgacgtgaagctcctgtaccccgttagcaagtaccaacaggaccaagttgtaaaggaagacaatattgaagcagtggggaagaagctccatgaatataacacccagttccaggaaaagtcccgagagtatgatcggctctatgaggaatatacaagaacctcacaggagatacagatgaagcgcaccgccattgaggcattcaatgaaactattaagatttttgaagagcagtgccaaacccaggaaagatatagtaaggaatacatcgaaaagttcaagagggagggaaacgaaaaggaaatccaacggattatgcacaattatgacaaattgaaatcaaggatctctgagatcatcgacagccggcggcggcttgaagaggatcttaaaaagcaggctgcagaatacagagagattgacaagagaatgaatagcataaaacctgatctgattcagctcagaaaaacccgagatcaataccttatgtggctgactcagaagggggttcggcagaagaagctgaatgagtggctgggtaacgagaacacggaggatcaatactcgttagtggaggatgacgaggatctaccccatcacgacgagaagacatggaacgtggggtcgagcaaccggaacaaggcagagaacctcctcagggggaagagggacggcacctttctcgtgagggagtcctcaaagcagggttgttacgcttgcagtgtcgtcgtcgacggtgaagtcaagcactgtgtgatcaacaagacggccactggctacggttttgccgagccctacaatctgtactcctcgctgaaagagcttgtgctgcattaccaacacacatcccttgtgcagcataacgacagcctgaacgtgactctagcttatcccgtctatgcccagcaacgtcggtag

SEQ ID NO: 25592 - DNA, 1224 bp, synthetic construct
  misc_feature 1..1224: note = Description of Artificial Sequence: Synthetic coding sequence
  source 1..1224: mol_type = other DNA
atgctgttcgacaaggtgaaggccttcagcgtgcagctggacggcgctacagccggcgtggagcccgtcttctccggagggcaggcagtcgcaggccgggtcctactggagctgtcctctgccgctcgcgttggagctctcaggctccgggctcgaggtagggcacacgttcactggaccgagagcagaagtgctgggtctagtacggcctatactcagagctactcagaaagggtggaggtggtgtctcacagagctaccctgctcgctccagatacaggggaaactaccactctgccgcccgggcgccatgaatttctgttctcttttcaattaccgccaacactagttacctcctttgaaggcaaacatggctcggttagatattgcatcaaagccactctgcatcgcccatgggtgcccgctaggcgcgcaagaaaagtgtttactgtgatcgaaccagtagatatcaatacgcctgctctcttagccccccaggctggcgcacgagaaaaagtcgcgcgctcatggtactgtaacagaggtctggtgtccttatctgccaagatcgaccgcaagggctacacccccggggaggtgattcccgtttttgcggagatcgataatggctcgacccgcccggtgttaccaagagctgctgtggtgcagacccagactttcatggctcggggcgctcggaaacagaagagagccgtcgtggcatctctggccggagaaccagtggggcccggacagcgggccctgtggcagggccgcgcactacggatcccccccgtggggccaagtatacttcactgtagagtgctgcatgtagattacgctctcaaggtctgcgttgacatccctggcacttccaaactcttgctcgagctcccacttgtgattggcaccatcccgttgcatcctttcggttcacgcagctctagcgttgggagtcacgcgtccttcctgctcgactggcgtctgggtgctctccccgaaaggcccgaggctccacccgagtacagtgaagtcgttgccgacaccgaagaagccgcgctcggtcagagccccttccctctgccccaagaccctgatatgagtctggaggggccattcttcgcttatattcaagaattccgatacaggccgcctcctctgtactctgaagaagaccccaaccctctgctgggcgacatgcgacctaggtgtatgacttgttag

SEQ ID NO: 25593 - DNA, 1386 bp, synthetic construct
  misc_feature 1..1386: note = Description of Artificial Sequence: Synthetic coding sequence
  source 1..1386: mol_type = other DNA
atgtacaacaccgtgtggagcatggaccgggacgacgccgactggagggaagtgatgatgccatattctacagaactcatattctatattgagatggatccgccagctcttccaccaaagcctccaaaaccaatgacttctgcagtccccaatggaatgaaggactcatccgtcagcctgcaggatgccgagtggtactggggcgacatttctcgcgaagaagtgaatgacaagttgagggacatgcccgacgggacctttctggtgagggacgccagcacgaagatgcagggtgactatacactgacgctccggaaagggggtaacaacaagctgattaaaatttaccaccgcgatggcaagtacggattctcagacccacttacctttaattccgtggtagagctgatcaaccactatcaccatgagtctctggcacagtataaccccaagctggacgtcaaactcatgtacccagtttccaggtatcagcaagaccagttggttaaagaggacaatattgatgctgtgggcaaaaaactgcaggaataccattcccagtatcaggagaaaagtaaagaatacgacaggctttacgaagagtacaccagaacgtctcaggagatccagatgaaaaggacagccatagaagcattcaatgagactattaagatctttgaagaacagtgtcatactcaggagcaacactcaaaagagtatatcgaacgttttcggcgcgaaggcaatgagaaggaaatcgaacgcatcatgatgaattatgacaagctgaaatcacgactaggggagatccatgatagcaagatgcgcctggagcaggacctcaagaaccaggctctggacaacagggaaattgataaaaaaatgaattccatcaaacccgatctgatacagctacggaaaatcagagatcagcatctcgtgtggctcaatcataaaggagttagacaaaagcggctcaacgtatggctgggaattaaaaacgaagacgcagatgaaaactactttattaatgaagaagacgaaaaccttccccactatgacgagaaaacctggtttgtggaagacattaacagagtccaggccgaagaccttctttatggcaagccagacggtgccttcttgatcagggaaagttcaaagaaggggtgttacgcgtgttctgtcgtggccgatggcgaagtgaaacactgcgttatctacagtaccgccaggggctatggcttcgctgaaccatataacctgtatagcagtctgaaagaactcgtgctgcattaccaacaaacctccttggtccagcacaatgattcactgaatgtccgcctcgcatacccggtgcatgctcagatgcctagtttgtgccgatag

SEQ ID NO: 25594 - DNA, 1101 bp, synthetic construct
  misc_feature 1..1101: note = Description of Artificial Sequence: Synthetic coding sequence
  source 1..1101: mol_type = other DNA
atgtacaacaccgtgtggagcatggaccgggacgacgccgactggcgtgaagtgatgatgccctacagcaccgagcttatcttctacatcgagatggatcctccagccgctgaagttaatgataagctccgggatatgcccgatggcacattcctggtgcgggatgcttcaacaaagatgcagggtgactacacattaacattgcgtaagggcgggaataataaactcatcaaaatttatcacagagatgggaagtatggcttctccgacccactcacattcaactccgtggtggagctaattaatcattaccaccatgagtccctggctcagtataatccgaagctggacgtaaaactgatgtatccagtgagccggtatcaacaggatcagttagtaaaagaggacaatattgacgcggtgggcaagaaactgcaggaatatcactcacaatatcaggagaaaagcaaggaatatgataggttgtatgaagaatataccagaacctcacaggagatccagatgaagagaactgcaatcgaggcattcaacgagaccattaaaattttcgaagaacaatgccacacccaggagcagcattctaaagaatacatcgagcggtttaggagagaaggcaacgaaaaggaaatcgaaaggtggttaaatcacaagggggtgcggcagaagcggcttaatgtgtggttggggattaagaatgaggacgccgatgagaattatttcattaacgaggaggatgagaacctgcctcactacgacgaaaaaacctggttcgtcgaggacattaatagggttcaggctgaagacttactgtacgggaaaccagacggcgcctttttgatacgggaatcttccaagaaggggtgttatgcatgttccgtggttgcggacggcgaggtcaaacactgtgtcatttatagtactgcaagaggctatggctttgccgagccttacaatctgtacagctcacttaaagagcttgtgctgcactaccagcagacaagcctcgtccaacataatgactccctgaatgtgcgcttggcataccctgtgcatgcccagatgcccagcctgtgcaggtag

SEQ ID NO: 25595 - DNA, 1209 bp, synthetic construct
  misc_feature 1..1209: note = Description of Artificial Sequence: Synthetic coding sequence
  source 1..1209: mol_type = other DNA
atgtacaacaccgtgtggagcatggaccgggacgacgccgactggcgagaggtgatgatgccatacagtaccgagctcatcttttatattgaaatggatcctccggctcttccccccaagccaccgaaacctatgacgtccgctgtaccgaacggtatgaaggacagctccgtctccttgcaggacgcagagtggtattggggtgacatttcccgagaagaagtcaacgacaagctgagagatatgccagacgggaccttcctggtgcgagacgccagcactaagatgcaaggcgactacacactgacgctcaggaaggggggaaataataaactgatcaagatctaccaccgagatggtaagtacgggtttagcgatcccctcacatttaattccgtcgtggaactcattaatcactatcatcacgaaagcctggcccagtacaatcccaagctggatgtaaaactgatgtacccagtttctcgttatcagcaggaccagctagtgaaggaggacaatattgacgcggtaggaaagaaattgcaagagtatcattcccagtaccaggagaagagcaaggagtatgacaggttgtatgaggagtatacccggacgagccaggagatacagatgaagcgaactgcaatcgaagctttcaatgaaaccataaagatctttgaggaacagtgccatacacaggagcagcactctaaggagtacattgagcggttccggagagagggcaacgaaaaagaaattgagaggtggttgaatcacaagggtgtcagacaaaaacgtcttaatgtctggctgggaatcaagaacgaggatgctgacgagaattactttattaacgaagaagatgaaaatctccctcattatgatgagaagacgtggttcgtggaggacattaatcgggtgcaggctgaagacttactgtatgggaagcccgatggtgcttttctgatcagagagagttcaaagaagggatgttacgcctgctcagtggtggcagacggagaagtcaagcattgtgtaatttactcgaccgcccgaggttacgggtttgcggaaccctacaatctctacagctctcttaaagaactcgtgctacattatcagcagacctccctggtgcagcataacgacagccttaacgtgagactggcctaccctgtacatgcccaaatgccatccctgtgcagatag

SEQ ID NO: 25596 - DNA, 1386 bp, synthetic construct
  misc_feature 1..1386: note = Description of Artificial Sequence: Synthetic coding sequence
  source 1..1386: mol_type = other DNA
atgtacaacaccgtgtggagcatggaccgggacgacgccgactggcgtgaggtgatgatgccgtattccactgaacttatattctacattgaaatggatccccccgcattgccgccaaagcccccaaaacccatgacctctgcagttcccaacggtatgaaggactcatcagtgagtcttcaggatgctgaatggtattggggtgacatctcacgggaagaggtcaatgacaagctgcgcgatatgcccgacggcactttcttagtgagagacgctagcactaaaatgcaaggtgactacaccctcactctgcggaagggcggtaacaataagcttatcaagatctatcaccgagacggcaagtatggattcagtgaccccctcacgttcaactccgttgtggagctgatcaaccattaccaccatgagtcactggcccaatacaatccaaagctggacgtaaaactgatgtacccagtgagccgctaccagcaagaccagctggtgaaggaggacaatatcgacgctgtaggtaagaaactccaggagtaccatagccaatatcaggagaaatccaaggaatatgatagactctacgaggaatatacgcggacatcccaggagattcaaatgaagagaaccgcaatagaagcattcaatgagaccatcaagatattcgaagagcagtgtcatacacaagaacagcactctaaggaatatatcgagcgattcaggagagaaggcaatgaaaaggaaatagaacgcatcatgatgaattacgacaagctgaagtccaggctgggagaaatccatgacagtaagatgcggctggaacaggatttaaaaaatcaggccctggataaccgtgagattgataagaaaatgaatagtatcaagcccgacctgatccaactcaggaagatacgagaccagcatctcgtgtggcttaatcataagggtgtcagacaaaagcgattaaacgtgtggctaggaattaaaaacgaagacgctgacgaaaactacttcatcaatgaagaggatgaaaatttgccccactatgatgaaaagacatggtttgtcgaagatatcaatcgggttcaggccgaggaccttctttacggcaaaccggacggggcctttttaatccgcgaaagcagtaaaaagggttgttacgcatgttctgtcgttgccgacggcgaggtgaaacattgtgtgatctacagcacggctagaggttacggcttcgccgaaccatacaacttatattctagcctcaaagaacttgtactgcactatcaacagacgtcactggtgcaacacaacgattcgctcaacgtgaggcttgcctatccagtgcacgcgcagatgccttcactgtgccgatag

SEQ ID NO: 25597 - DNA, 1386 bp, synthetic construct
  misc_feature 1..1386: note = Description of Artificial Sequence: Synthetic coding sequence
  source 1..1386: mol_type = other DNA
atgtacaacaccgtgtggagcatggaccgggacgacgccgactggagggaagtcatgatgccgtacagcaccgaattaatcttctacatcgagatggatccccctgcattgcctcccaaaccccctaagcctatgacctcggcagttcccaacggcatgaaagacagtagtgtgagtctgcaggatgctgaatggtactggggggatatctccagggaggaagttaatgacaaactccgcgatatgcctgatggtactttcctcgtgcgcgacgcctccacaaagatgcagggagactatacactgactctgcgaaaaggcgggaacaacaagctcatcaagatttaccacagggatggcaagtatggattctccgaccccttaaccttcaacagcgtagtggagcttatcaatcactatcaccacgagtccctcgcgcaatataaccctaaactggacgtaaagcttatgtaccccgtcagtagataccaacaggatcaactggtcaaggaggataatatagatgccgtaggaaagaagttgcaagagtatcactctcaataccaggagaaatcaaaagaatatgatcggctctatgaagaatatacgcgaacctcacaggagatccagatgaaacgaaccgctattgaggcctttaacgaaactattaagatttttgaagaacagtgccatacacaggaacagcattccaaggaatatatcgaaaggtttcgcagggagggcaacgagaaggagattgaaaggatcatgatgaattatgacaagcttaaaagccggcttggtgaaatccacgatagcaagatgcgactagagcaggatttgaagaaccaagcgcttgacaatcgagaaatcgataagaagatgaatagtatcaagccggatctgatccagcttcggaagataagggaccaacacctggtgtggttgaatcataagggcgttaggcagaaacgcctcaatgtgtggctggggatcaagaatgaggacgctgacgaaaactacttcattaacgaggaagatgagaacctgccccactatgatgagaagacatggtttgtggaagacattaacagggtgcaggctgaagaccttctttatggcaagcctgacggggccttcttgatccgcgaatcctccaagaagggatgctatgcctgttccgtggtggcagacggcgaagtgaaacactgtgttatctattctacggcccgcgggtatggttttgctgaaccatacaatctctattcttcacttaaggagctagtgctgcactaccaacaaacatcactcgtgcaacataacgatagcctgaatgtcaggttagcatatccggttcacgcccaaatgccctccttgtgtcgctag

SEQ ID NO: 25598 - DNA, 1209 bp, synthetic construct
  misc_feature 1..1209: note = Description of Artificial Sequence: Synthetic coding sequence
  source 1..1209: mol_type = other DNA
atgtacaacaccgtgtggagcatggaccgggacgacgccgactggcgggaagtgatgatgccttattctactgagttgatcttctacattgaaatggacccccctgcgttgccgcccaagcccccaaaaccaatgacatcagcagtcccaaacggcatgaaggactcgtctgtctctcttcaggacgcagagtggtactggggggacattagccgtgaggaagtaaacgacaagctgcgagatatgcctgatggaactttcttggtgcgcgatgcaagtacaaagatgcaaggcgattatacacttaccctgcgcaaggggggaaacaacaagcttatcaagatataccacagagacggaaagtatggctttagcgacccgctaacctttaacagcgtggttgagctgatcaatcactatcatcatgagtccttggcacagtataaccctaagcttgacgttaaacttatgtaccccgttagcagatatcagcaagaccagctcgttaaggaagacaatatcgacgccgtgggcaagaagctgcaagagtaccactcccagtatcaggagaaatcaaaagagtacgaccggctatacgaagagtacacaagaacaagccaagagattcaaatgaagcgcaccgcgatcgaggcctttaacgagaccattaaaatctttgaggaacaatgtcacacccaagaacagcatagtaaagaatatatcgagagatttcgtagggaagggaacgagaaggagattgagcggtggctcaaccacaaaggggttcgacagaagcggttgaacgtctggttgggtatcaagaatgaagacgccgatgaaaactacttcattaatgaagaagatgagaacctccctcattacgatgagaagacttggtttgtagaggacattaaccgcgtgcaggccgaggacctgctctacggaaaacctgacggtgcttttctcattagagagtcctctaagaaagggtgctacgcatgtagcgttgtagccgatggagaggtcaagcactgtgtgatctattctactgccaggggctacggcttcgctgaaccttataacctctatagctcactgaaagagctggtccttcactaccagcagactagtctcgtgcagcataatgacagtttgaacgtccgcctggcttacccagtgcacgcacagatgccttctctctgtcgctag

SEQ ID NO: 25599 - DNA, 621 bp, synthetic construct
  misc_feature 1..621: note = Description of Artificial Sequence: Synthetic coding sequence
  source 1..621: mol_type = other DNA
atgtacaacaccgtgtggagcatggaccgggacgacgccgactggcgcgaagtgatgatgccatacagcaccgagcttatcttttacattgagatggatcctccagcccttccacctaagcccccaaagcctatgactagcgccgtccccaacgggatgaaggatagctccgtatcccttcaggatgcagagtggtactggggtgatatatcgcgggaagaagtgaacgataaactgagagacatgccagacggaaccttcctcgtgagagatgcaagtaccaagatgcagggggattatacacttaccctcagaaagggggggaataacaaactcatcaagatctaccacagggacggaaagtacgggttcagcgatcctctgacattcaattctgtggtggaacttatcaaccactaccatcacgagagcctggcccagtacaatccgaaactcgatgttaaacttatgtatcctgtgagtcgataccagcaggaccagctggttaaggaggacaatatcgatgcagttgggaaaaagttacaagaatatcacagtcagtatcaggaaaaatctaaggaatatgatcgcctctatgaggaatatacccgtactagttag

SEQ ID NO: 25600 - DNA, 1524 bp, synthetic construct
  misc_feature 1..1524: note = Description of Artificial Sequence: Synthetic coding sequence
  source 1..1524: mol_type = other DNA
atgggccccagccggctggtgcggggcccccggccccagggcatgcgcagcccctatcggcggcctggcatgggttggcctcgcccgcggtttccccgtatgtttaaatgctctcgcagaaggtaccagcagggcctgcgtggccgcacggcttcttctgcagctatcaaccctgctacccgcgcaatgggaattaacaatacccatacagataccaccatagtgtggatatttccgccacaagcgttgccccctaagccgcctaagccgatgacctcagccgtaccaaacgggatgaaagatagcagtgtctccttacaggatgcagagtggtattggggcgatattagtcgggaggaggtcaatgacaaactgagggatatgcccgacggaaccttccttgtaagggatgcaagtacgaagatgcagggtgactataccctcactctcagaaagggagggaacaataagctcataaagatctatcatagagatgggaagtatggctttagcgatcccctgacctttaactcagtggtggaactgataaaccactaccaccacgagagcttggcccagtataatcctaagctcgacgtgaagcttatgtaccccgtaagtaggtatcagcaagatcagttagtaaaggaagataatatcgacgctgtgggtaagaaactacaggagtatcattcccaataccaggaaaagtccaaggagtatgatcggctctacgaagaatatacaagaactagccaagaaattcagatgaagaggacagctatcgaggccttcaacgagacaatcaaaatctttgaagagcagtgtcatactcaagagcagcacagcaaagaatacatcgagcgattcagacgtgagggtaatgaaaaagaaatcgaaagaattatgatgaactacgacaaactcaagtccaggctgggagagatacacgacagtaaaatgagactggaacaggacctcaagaaccaggcactcgacaacagggaaatcgacaagaagatgaatagcatcaagccagacctaatccagctgagaaagatccgggatcaacacctggtctggctaaatcacaaaggcgtccgacagaagaggctgaatgtttggttaggaatcaaaaacgaggatgccgacgagaattactttattaacgaagaggatgaaaacctgcctcactatgatgagaaaacatggtttgtggaagacataaatagggtacaggccgaagatctgctgtacggaaagcctgacggggccttcctaataagggagtcatccaaaaaggggtgctatgcttgttcggtggtcgccgacggggaggtcaaacactgtgtgatctacagtaccgctcggggctacgggttcgcagagccatacaacctgtattcaagcctgaaggagctggtgctgcactatcagcagaccagccttgtgcagcacaacgattcattgaacgtacggctggcttacccagtccatgcacaaatgcctagcctgtgcagatag

SEQ ID NO: 25601 - DNA, 2643 bp, synthetic construct
  misc_feature 1..2643: note = Description of Artificial Sequence: Synthetic coding sequence
  source 1..2643: mol_type = other DNA
atgcagcccggcgccaccacctgcaccgaggaccggatccagcacgccctcgagcgttgcctccacggactatctctgagtcgccgcagcacctcatggagtgccggcctctgtctgaactgctggagtctgcaggagttggtgagcagggatcctggccacttcctcatcttactcgagcagattttgcagaaaaccagggaggtgcaggagaaagggacatacgatctactgactcccctggccctgttgttctatagcaccgtgctatgcacgcctcacttcccgcccgattctgacttactgttaaaggccgcttcgacctatcaccgtttcctcacctggcctgttccctattgtagcatttgtcaggagcttctgacgttcattgacgccgaactgaaggcacctggcatatcttaccagagactggttagggccgagcagggacttcccatccgatcccacaggtccagtactgtgaccgtactgctcctgaatcccgtcgaagtccaagccgagtttctggctgtagcgaataagctctctacacctggacactccccccactctgcatacactacactgttactgcacgcatttcaagctactttcggggcccactgcgatgtgcccggactgcattgcagactccaggcgaaaaccttggcagagctggaagatatatttactgaaactgcggaggcccaagagctagcctcaggcatcggggacgctgcagaggcgcggcgctggttacgaactaagttgcaggcagtgggggagaaggctggattcccaggtgtgctggacaccgccaaaccagggaagttacataccattcccatacctgtggctcgttgctacacctacagctggagtcaggacagcttcgacatactccaggagattcttctcaaagaacaggagctgctgcaacctggaattctcggggatgatgaagaggaggaggaagaagaagaggaagtggaagaggacttagagacagacgggcattgtgcggagagagatagtctgctgtctacatcctccctggcaagccacgatagtacgctcagccttgcatcatcgcaggctagcggcccagccctcagccggcatttgctgacatcttttgtcagcggcctgtcagacgggatggatagtggttatgtcgaagacagcgaggagtcatcgagtgaatggccctggcggcggggctcccaggaacggagaggccatagaagacccggccagaagtttattcgcatctacaagctgttcaagagcacaagtcagctcgtacttcgcagggattcccgatcgttagagggaagcagtgatactgccctgcccctgcggcgcgccggctccctatgcagccctctcgatgaacccgtatcccctcccagccgcgcacaaagatcccggtctctgccccaacccaagctgggcacccaactccctagttggctgctggctccggctagccggcctcagagacgtagacccttcctgtcaggcgacgaggaccctaaggcttccactcttcgggtggtggtttttggctctgaccgtataagcggaaaggtcgcccgggcctacagcaacctgcgccgcttggaaaacaatcgaccactattgactagatttttcaaactgcaatttttctatgtgccggtgaaacgtagccacggaacatcccctggtgcgtgcccacctccaaggtcccagacccccagtccacctaccgacagcccgcgccacgcttcccctggcgaattaggaacaactccatgggaagagtccactaacgacatttctcactacctgggtatgcttgatccttggtacgaaagaaatgtgctgggtctgatgcatctcccacccgaagtcttgtgtcagcagtcactgaaggcagaggctcaggccctggaggggagcccaactcagctgcccattttagccgatatgctcctgtattactgtcgatttgctgcacggcccgtgctccttcaggtttatcagactgagttgacattcattactggcgaaaagactactgaaatcttcatccacagtctcgagcttggtcactctgccgctactagagctatcaaagcatccggccccggtagtaagaggctcggaattgacggtgacagggaggcagtgccgcttactttacagattatctactctaagggtgccatctcaggtaggagccgttggtctaacctggaaaaagtctgcacatctgtcaacctgaacaaggcatgccggaaacaggaagaactcgattcaagtatggaagcactgaccctcaatctcacagaagtggtgaagcggcagaactcgaagtcaaagaaagggtttaaccagatatccacaagccagatcaaggtggacaaggtacagatcatcggaagtaatagctgcccctttgccgtctgcttagaccaggacgagagaaagatccttcaatctgtggtgcgctgcgaggttagcccatgctataaaccagagaagagtgatctgagctctccccctcagaccccaccggatctgcctgcacaggccgcccctgatctatgctctttactctgtctcccaattatgactttcagtggtgcattgccatag

SEQ ID NO: 25602 - DNA, 2643 bp, synthetic construct
  misc_feature 1..2643: note = Description of Artificial Sequence: Synthetic coding sequence
  source 1..2643: mol_type = other DNA
atgcagcccggcgccaccacctgcaccgaggaccggatccagcacgcacttgaacgctgccttcacggactgtctttgtccagaaggtccaccagctggtccgcaggcctgtgtctgaactgctggagcctccaggaactggttagccgagatcccggacatttcctgattctgctagaacagatcttacagaagacaagggaggtgcaggagaaaggaacctacgacttactgacccctttggctcttctcttttacagcaccgttctctgtacccctcacttcccccctgacagtgacctgctgctgaaggccgccagcacctatcatcggttcctaacgtggcccgtgccttattgtagcatatgtcaggagctgctcacttttattgacgcggagctaaaggcgccaggaattagttatcaaaggttggttagagcagagcagggactgcccatcagatctcacagatcttctaccgtcaccgtgttgttgctgaatccagtggaagttcaggcagagtttctggcagttgctaacaaactgtccacaccagggcactcaccacattcagcctacacaactttacttctccatgcctttcaggcaacatttggtgcccattgtgatgtacctgggttgcactgccggctacaggcaaaaacactggcggaactagaggatattttcacagagacggctgaagcccaggaactggcctcaggcataggcgacgccgccgaggcaaggaggtggttgagaaccaagctgcaagctgtcggagaaaaagctggttttcctggagtactagacactgcgaaacctgggaagttgcataccattcccataccagtcgcccgctgctatacctattcctggtcccaagattctttcgatatattacaggaaattctcctgaaagaacaggaattattgcagcccgggatcttaggtgatgacgaggaggaggaagaggaagaggaggaggtagaggaggacctggaaactgatggacactgcgcagagcgggattcactgctgtccacctcctcactggccagccatgactctacactgtctctggcatcgtctcaggcaagcggacctgccctgtcacgacatctgctcacgtcgtttgtgagcggcctatctgacggcatggacagtgggtatgtggaggactcagaggaaagctcttcggagtggccatggaggaggggcagtcaggaacgcaggggccaccgcaggccagggcagaaatttatccggatttataaacttttcaagtctacatcacagttggtgctccggagagacagtagatcgcttgaaggatcaagcgacacggcactgccactccggcgggccggatccctatgttctccactcgacgaacctgtgagtcctccttcacgggcacagagaagcagatccctgccacagcccaagcttggcacacagctcccatcatggctgttagcacccgccagtcggccccaacggcgacgcccatttttaagtggtgacgaggacccaaaggcctctacactccgtgtagttgtatttggctccgaccgcattagcggaaaggtggcccgggcctatagtaatcttcgtcgtctggagaataatagacccctgctgacaaggttctttaagctgcagttcttctatgtacccgtaaagagatcacatggaacatcacctggagcgtgtccaccgcccaggtcccagactccatcacccccgacggatagccctcgccatgcttcacccggtgagctcggtactacaccatgggaggagtcaacaaacgacataagccattatcttggaatgctcgatccatggtatgaacgcaacgtactgggcctaatgcatcttccaccagaagtgctgtgccagcagtctttaaaggcagaggcacaggctttggaaggctccccaactcagctcccaattctggccgatatgctgctgtattactgccgattcgcagcgcgacccgtgctcctgcaggtgtaccagacggaactgacgttcatcaccggagaaaagactacggagatctttatccattccctggagctgggacattcagccgctacgagggcaattaaggcctctggtcctgggagtaagcggctgggcatcgacggcgatcgcgaagcagtcccacttaccctgcaaatcatttatagcaaaggggccatttccgggcggagtcgatggtcgaacctcgagaaggtgtgtaccagtgttaacttgaataaggcctgtcgtaagcaagaggagctggactcctccatggaagcgcttactttaaacctgacagaggtagttaagcggcagaattctaagtcgaagaaagggttcaaccaaataagcactagccaaataaaagtcgataaggttcagatcatcggcagcaattcatgccctttcgcagtgtgcctcgatcaggatgagcgaaagatcctgcagtctgtggtgcgttgcgaagtgtccccatgttacaagcctgaaaagtctgatctgtcaagccctccacaaaccccacctgacctgcctgcacaggctgcgcccgatctgtgttcactactctgcctacccatcatgaccttctccggagcccttccttag

SEQ ID NO: 25603 - DNA, 447 bp, synthetic construct
  misc_feature 1..447: note = Description of Artificial Sequence: Synthetic coding sequence
  source 1..447: mol_type = other DNA
atgaagctgctggtgctggccgtgctgctgaccgtggccgccgccgactctggcattagtcctagagcagtgtggcagttcaggaagatgatcaaatgtgtgattcccgggagtgatccattcctcgagtacaataactatggatgttattgcggcctgggggggtctggtaccccagttgacgaactcgataagtgctgccagacacatgataattgctatgaccaagcgaagaagctcgatagctgcaaatttctcttggacaacccttacacgcacacctattcctactcatgctcaggctctgcaattacatgttcatctaagaacaaggagtgcgaagcctttatttgcaattgcgacagaaacgctgccatctgtttctctaaggccccatacaacaaggcacataaaaatcttgacacaaagaaatactgccaaagctag

SEQ ID NO: 25604 - DNA, 435 bp, synthetic construct
  misc_feature 1..435: note = Description of Artificial Sequence: Synthetic coding sequence
  source 1..435: mol_type = other DNA
atgaagaccctgctgctgctggccgtgatcatgatcttcggcctgctccaggcccatggcaatttggtcaatttccaccgtatgatcaagcttactaccggcaaagaggctgctctctcttacggtttttatgggtgccactgtggtgtgggcgggaggggcagtcccaaagatgccaccgatagatgttgcgtcacccacgattgctgttataagagactcgaaaagagagggtgtgggactaagttcctgtcgtataaattttccaacagtgggagccgcatcacttgcgccaaacaggacagctgcagaagccagctgtgtgaatgtgataaggctgccgctacctgttttgcgcggaataaaaccacatacaacaaaaaatatcagtattactctaacaaacactgtcgtggctccacgccccggtgttag

SEQ ID NO: 25605 - DNA, 435 bp, synthetic construct
  misc_feature 1..435: note = Description of Artificial Sequence: Synthetic coding sequence
  source 1..435: mol_type = other DNA
atgaagaccctgctgctgctggccgtgatcatgatcttcggcctgcttcaagcacacggtaatctggtcaatttccaccgaatgattaagctgacgacagggaaggaggcggctctgagttacggcttttatggatgtcattgtggagtcggcggacggggaagtcctaaggacgcaacagatcgttgctgcgtgacacatgactgttgctataaacgcctcgagaaaagggggtgtggaacaaagtttttatcatacaagttctctaactccggatcacggatcacatgcgcaaaacaggactcttgtaggtcacagctgtgtgagtgtgacaaagccgccgctacatgcttcgcaagaaacaagacaacctataataaaaagtaccagtattatagcaacaaacactgcagagggagtactccaagatgttag

SEQ ID NO: 25606 - DNA, 438 bp, synthetic construct
  misc_feature 1..438: note = Description of Artificial Sequence: Synthetic coding sequence
  source 1..438: mol_type = other DNA
atggagctggccctgctgtgcggcctggtggtgatggccggcgtgattcctatacagggaggtattctcaaccttaataaaatggttaagcaagttacagggaaaatgcccatcttgtcctattggccatatggttgccactgcggtctcggtggcagagggcagccaaaggacgcaactgactggtgttgccagacccacgattgctgctatgaccatctcaaaacacaggggtgtagtatctacaaagactactaccggtataacttctcacagggcaatatccattgtagcgacaaggggagctggtgtgaacagcagctctgtgcctgcgataaggaagttgccttctgtctcaagagaaacctggatacctaccagaagcgccttcggttttattggcggccccactgccggggccagactcctggatgttag

SEQ ID NO: 25607 - DNA, 429 bp, synthetic construct
  misc_feature 1..429: note = Description of Artificial Sequence: Synthetic coding sequence
  source 1..429: mol_type = other DNA
atgaagagcccccacgtgctggtgttcctgtgcctgctggtggccttggtgaccggcaatcttgtccagtttggagtcatgattgagaagatgactggcaaatccgccctgcaatacaacgattacgggtgttattgcggcataggtggaagtcactggcccgtagatcaaaccgactggtgttgtcacgcccacgattgttgctacgggagactggaaaagctgggttgtgagccgaagttggagaagtacctgtttagtgtctcggagcgcggcatcttctgtgcgggaagaaccacttgccagaggttgacctgcgagtgcgataagcgagccgctctgtgttttcggcgaaacttgggcacatataaccggaaatatgcccattaccccaataaactgtgtacaggccctaccccaccttgctag

SEQ ID NO: 25608 - DNA, 636 bp, synthetic construct
  misc_feature 1..636: note = Description of Artificial Sequence: Synthetic coding sequence
  source 1..636: mol_type = other DNA
atggccgacggcgccaaggccaaccccaagggcttcaagaagaaggtgctcgatcgatgtttcagcggatggcgcggccctcgattcggtgcgtcatgcccctcaaggactagtaggtccagcttgggcatgaaaaagttcttcactgtggccattcttgcagggagtgtgctctcgaccgcccacggatcacttttgaaccttaaagctatggtggaagccgtaacaggacggtcagccattttgtcttttgtgggatacggttgttattgcgggctagggggccgcggccagccaaaagacgaggtggactggtgctgtcacgcccacgactgctgctaccaagagctgttcgatcaggggtgccacccatatgtagatcattacgaccatactattgagaataataccgagattgtatgtagtgacctaaataaaacagagtgtgataagcaaacctgtatgtgcgataagaatatggtgctttgtctcatgaatcagacctatagggaggaatatcgtggtttcctgaacgtctattgtcagggaccaacccctaattgtagcatttacgagcctccacccgaagaagttacctgtagccatcagtccccagctcctcctgcaccaccttag

SEQ ID NO: 25609 - DNA, 936 bp, synthetic construct
  misc_feature 1..936: note = Description of Artificial Sequence: Synthetic coding sequence
  source 1..936: mol_type = other DNA
atgcccgccccccgggccccccgggccctggccgccgccgcccccgcatccggaaaagcaaagcttactcatcccgggaaagctatccttgcaggcggtctggccggcggcattgaaatctgtattaccttccccaccgagtatgtgaagacacagttacagctagacgagaggtctcaccctccccgctaccgcggcatcggggactgcgtgagacagacagtccgatcccacggggtgttgggactttacaggggactctcaagtctcctctacggctccattcctaaggccgccgtccgcttcggtatgttcgaattcctgtctaatcacatgcgagacgcccaaggtcgactggattcaactaggggtctgctgtgtgggttaggtgccggcgtcgcagaagccgtggtggtggtgtgtcccatggagactattaaggttaaattcattcacgatcagactagccctaacccaaaatatagaggtttcttccacggcgttcgggagatcgtccgggagcagggcctaaagggcacgtatcagggtctgacagcaacagtgctgaagcaggggtccaatcaggctatcagattcttcgtgatgacctccctgcggaactggtatagaggcgataatcctaataaacccatgaaccccttgatcaccggcgtttttggcgcaatcgccggagccgcttcggtcttcggcaacacgccactggatgtgataaaaacccggatgcaggggttggaggcccataagtacagaaacacctgggattgcggcctccagatcctgaagaaagaggggcttaaagcattctataaaggaacggtcccgcgtctgggacgtgtgtgccttgacgtcgctatcgtgttcgtcatttacgatgaggtggtcaagctgttgaataaagtctggaagaccgattag

SEQ ID NO: 25610 - DNA, 2250 bp, synthetic construct
  misc_feature 1..2250: note = Description of Artificial Sequence: Synthetic coding sequence
  source 1..2250: mol_type = other DNA
atgagcttcatcgacccctaccagcacatcatcgtggagcaccagtacagccacaagtttaccgtcgtggttctacgtgctacgaaggttacgaagggggccttcggcgacatgttggacacacccgatccttatgtcgaactttttattagcactactccggactctaggaaacggacacgccactttaataatgacattaacccggtctggaacgaaaccttcgagtttattctggatcccaatcaggaaaacgtgctggagatcaccttgatggacgcaaactatgtaatggatgaaactctcgggaccgcaaccttcaccgtgagctctatgaaggtgggagaaaagaaagaagtccccttcatcttcaaccaggtgacagaaatggtacttgaaatgtctctggaggtgtgctcatgccccgatcttcggttcagtatggctttgtgcgaccaagagaaaacatttaggcagcagagaaaggagcacattagagagtctatgaaaaaacttctcggaccgaagaattccgagggtttacacagcgctcgggatgtgccagtggtggcgatcctgggaagcggtgggggattcagggccatggtgggcttctccggcgtaatgaaagctctgtacgaaagtggaatcttggactgtgccacatacgtggccgggctgagtggcagcacatggtacatgagcaccttatacagccatcctgacttccctgagaaaggtccagaggagataaatgaggaactgatgaagaacgtgtcacataatcccctgctgctgctcaccccacagaaagtgaaaaggtatgtggaatccctgtggaaaaaaaagagctcggggcaacccgtcaccttcactgatatcttcgggatgctgataggcgagacactgatccacaatagaatgaataccactctgtcttccctgaaagagaaggtgaacacagcccaatgtcccttgcccctgtttacttgtctccacgtgaagcccgatgtgtcggaactcatgttcgccgactgggtggagttcagtccgtacgaaatcgggatggccaagtatggcaccttcatggcacccgaccttttcggatccaagtttttcatgggaaccgtggtgaagaagtacgaagaaaaccccctccacttcctgatgggtgtctgggggtcagctttctcgatcctgtttaaccgtgtgttgggagtttccgggagtcagagtagagggtcaaccatggaagaggagcttgagaacatcactacgaagcacatcgtgtcgaacgatagtagcgactccgacgacgaatcccacgaaccgaaagggactgaaaacgaagacgccggatctgattaccagagcgacaaccaggcgtcctggatccacagaatgatcatggccttggtgagcgattccgctctgtttaatacacgcgaagggcgggccggtaaagttcataacttcatgctgggactcaatttgaatacgtcgtatcccctgagccccctcagcgacttcgcaactcaggacagctttgacgatgacgaactggatgcagccgtggcagaccctgatgagtttgagaggatttatgaacctctcgacgtcaagagcaagaagattcacgtggtggattctggcctcacattcaatctgccatatccactgatcctgaggccacagagaggcgtggatctgataataagttttgacttctcagctagacccagcgattcttcccctcccttcaaggagctcttgctggccgagaaatgggccaagatgaacaagctgccatttccaaaaattgacccttatgtgttcgatcgagaaggcctgaaagagtgttacgtgttcaagccaaaaaacccagatatggagaaagactgccctaccataatccactttgtgctcgccaacattaactttagaaagtaccgggccccgggggtcccccgggagactgaggaggaaaaggagatcgccgacttcgatatcttcgatgatcccgaatctccatttagcaccttcaacttccagtaccccaatcaggcgttcaaaaggcttcatgatcttatgcattttaatactctcaataatatcgatgtgattaaagaagcaatggtagaatctatcgagtaccggcggcaaaatccgtcaagatgttcggtgagcctttctaacgttgaggctaggaggttctttaacaaggaattcctctctaagcctaaagcttag

SEQ ID NO: 25611 - DNA, 150 bp, synthetic construct
  misc_feature 1..150: note = Description of Artificial Sequence: Synthetic coding sequence
  source 1..150: mol_type = other DNA
atgagcttcatcgacccctaccagcacatcatcgtggagcaccagtatagtcacaaatttaccgtggtagtgctgagggcgactaaagttaccaaaggcgccttcggggacatgcccaaagtgactaagggggcgttcggagacatgtag

SEQ ID NO: 25612 - DNA, 2070 bp, synthetic construct
  misc_feature 1..2070: note = Description of Artificial Sequence: Synthetic coding sequence
  source 1..2070: mol_type = other DNA
atgagcttcatcgacccctaccagcacatcatcgtggagcaccagtatagccacaaattcaccgtggtggtcctgcgagctactaaagtcaccaaaggggcctttggcgatatgctggatacaccagatccatacgtggagctgttcatctctacgacccccgactcacggaaaagaacccgacattttaacaatgacattaatcctgtctggaacgagacattcgaattcatcctggaccccaaccaggaaaacgtgctggagataactcttatggatgcaaactacgttatggacgaaacgcttggtaccgcaaccttcaccgtgtctagtatgaaggtaggagagaagaaggaggtaccatttatattcaaccaggtgccagtggtggcaattttgggctctggtggaggatttagggcaatggtgggcttcagcggcgtgatgaaggcgctgtatgaatctggtatcctagattgcgccacctacgtcgccggtttatctgggtcaacctggtatatgagtaccctatatagtcatcccgattttccagagaagggccctgaggagattaacgaggagctgatgaaaaacgtttcacataaccccttgttgcttctgacccctcaaaaagtgaagcggtacgtggagtctctgtggaagaaaaagtcatcagggcagcctgtcaccttcactgacatatttggcatgttaattggggaaacacttatccacaacagaatgaataccaccctgagcagcctgaaggagaaagtgaacacggcacagtgcccactcccgctctttacgtgcttgcacgtgaaaccggatgtatccgagttgatgttcgccgactgggtcgaattctcaccatacgagatcggcatggctaagtatggaacattcatggcccccgacctcttcggctccaagttctttatgggcaccgttgttaagaaatacgaggaaaatccacttcattttctcatgggcgtctggggaagtgcattctcaatcttgtttaatcgggtgctgggtgttagtgggtcgcagagtcgtgggagtactatggaggaagagttagaaaacataacaacaaagcatattgtgagcaacgacagctctgactccgacgatgagtcgcacgagcccaaaggcaccgagaacgaggatgccggttcggactatcagtcagacaatcaggcgtcatggatacaccggatgataatggccctcgtttctgatagtgcactctttaacactcgggaaggacgggctggcaaagtgcacaactttatgctgggactgaatctcaacacctcctatcctctttcacccctaagcgactttgccacccaggatagttttgacgatgacgagttagatgctgcggtcgccgatccggatgaatttgagagaatctacgaaccattggacgtgaagtctaagaaaatccacgtggttgattccggccttacgtttaatttgccatatccactgatccttcgcccgcagagaggggtcgacttaatcatttccttcgacttcagcgcccgaccctcagattctagccctcctttcaaggagctgctgctggcggaaaaatgggccaaaatgaataaactgccatttccgaagatcgacccttacgtttttgaccgggaggggttgaaggagtgttatgtattcaagcccaaaaatcctgatatggaaaaagattgccccactatcatccactttgtactggccaatatcaatttccgaaaatacagagctccaggggttcccagggagaccgaggaagagaaggagatcgccgatttcgatatttttgacgaccccgagagtccgttttccacattcaattttcagtatcccaaccaagcctttaagcggctacacgacctcatgcatttcaataccctgaacaacatagatgtgatcaaagaagcaatggtggagtcaatcgaatatcgtagacagaacccttccaggtgttcggtgagcctgagtaatgttgaggctcggcgcttcttcaataaggagtttttgtctaagccaaaggcttag

SEQ ID NO: 25613 - DNA, 2346 bp, synthetic construct
  misc_feature 1..2346: note = Description of Artificial Sequence: Synthetic coding sequence
  source 1..2346: mol_type = other DNA
atggccgtggccgaggtgagccggacctgcctgctgaccgtgcgggtgctgcaggcccacaggctgccatccaaggacctcgtcactcccagcgattgttatgttaccctctggttaccaacagcttgcagtcatcggctgcaaaccaggacagtcaagaattccagtagcccagtgtggaatcaatcatttcacttcaggatccaccggcaactgaaaaacgttatggagctcaaggtgttcgaccaagacctcgttaccggcgacgaccctgtattatccgtgctgtttgacgccggtacccttcgggccggcgagtttcgcagagagagcttctcgctgagtccgcagggtgaaggaagattggaagtggaatttcgtctccagtcactcgccgatcgcggcgaatggctggtgtccaatggagtcttagtggcacgggagcttagttgtttgcatgttcagctggaagaaacaggcgaccagaagagctcagaacacagggtgcagctggtggttcccggctcctgtgaaggaccacaagaagcttctgtgggaactggcactttcagatttcactgtcctgcctgctgggagcaggagctcagtattcggttgcaggacgccccagaagaacaactcaaggcccccctttccgcacttccctccgggcaagtggtcagactggtcttcccaacctcacaagaacccttgatgcgcgtggagctgaagaaggaggctggactgcgcgagcttgccgtgaggctggggtttggcccgtgtgccgaggagcaggcgtttctttcccgcaggaagcaagttgtagcagcagctttacggcaggccttacaattggatggcgacctgcaggaggatgaaattcccgtggtcgcgatcatggccactggaggtgggatcagagcgatgaccagtctgtatggacaactcgcaggacttaaggaactggggctgctcgattgtgtcagctatataacgggtgctagtgggtcaacatgggcactggcgaatctgtacgaagatcctgaatggtcgcagaaggacttggctggacctactgagctgcttaagacccaagtgacaaagaacaaactcggggtgttagctccatctcagctgcaacgttatcgccaagagctcgccgagagggctaggttggggtacccatcttgtttcaccaacctgtgggctttgatcaacgaagccctgttacatgacgaacctcacgatcataaactgagcgatcagcgagaagccctctcccacggtcagaaccccctccccatctactgcgcattaaatacaaaggggcagtcattgaccaccttcgagttcggagaatggtgcgagttttccccctacgaagtcggcttcccaaagtacggggcttttattccatcagagctttttggttctgagttttttatggggcaactaatgaagagactacctgagtcacgtatctgcttccttgaaggaatttggagcaatctctacgccgcgaacttacaagatagtctttattgggcaagcgaaccttcgcaattctgggatcggtgggtgcgcaatcaggcaaacctggataaggaacaagtgcctctgctcaagatcgaggagcctccctcgacagccggcagaattgctgaattttttacagatctcttgacatggaggccgctggcacaggctacccataacttccttcggggattgcatttccataaggattacttccagcacccacactttagtacgtggaaggccactacactcgacggactgccaaatcagctgacgccctccgaacctcacctctgtcttctggacgtgggctacctgatcaatacatcttgtctaccgctcctgcagcccacccgggatgtggatcttatcctttcactggactataacctgcatggtgcgttccagcagctccagctcttgggccgattttgccaggagcagggcattccctttccgcccatttccccatcgcctgaagagcagctgcaacctcgagagtgtcacacttttagcgaccctacttgccctggcgcccctgctgtgcttcattttcccctcgtatccgactcgttccgggagtattcagcccctggtgtgcgccgtacccccgaggaggctgctgcgggtgaagtcaatctcagctccagcgatagtccctaccattatactaaggtgacttacagccaggaggacgtcgacaagcttcttcacttgacccactataatgtctgtaacaatcaggaacagttattggaagcactcaggcaggctgtgcagaggcggcggcagcggaggccccactag

SEQ ID NO: 25614 - DNA, 417 bp, synthetic construct
  misc_feature 1..417: note = Description of Artificial Sequence: Synthetic coding sequence
  source 1..417: mol_type = other DNA
atgaagggcctgctgcccctggcctggttcctggcctgcagcgtgccggccgtccagggcggccttctggacctgaagtccatgattgaaaaggtgactggtaaaaatgccctgaccaactacggattctacggatgttactgcggctggggcggccgggggacacctaaggatgggaccgactggtgctgctgggcacatgaccactgttacggaaggctggaagaaaagggctgtaacatccgtacccaatcttataagtatcggttcgcctggggcgttgttacctgcgaacccggccctttctgccatgtaaatctgtgcgcttgcgacaggaagctggtctactgcttgaagcgtaacctgcggtcctataatcctcagtaccagtatttccccaatattctatgcagctag

SEQ ID NO: 25615 - DNA, 2421 bp, synthetic construct
  misc_feature 1..2421: note = Description of Artificial Sequence: Synthetic coding sequence
  source 1..2421: mol_type = other DNA
atgcagttcttcggccggctggtgaacaccttcagcggcgtgaccaatctgttctctaatccctttcgggtaaaggaagtggccgtagccgattacacatccagcgaccgcgtgagagaggagggtcagctcatccttttccaaaatactccaaaccgcacttgggactgcgttcttgtgaatccgcgaaactcacagtcggggttccgcctgtttcaactcgagttagaagctgacgctctggttaactttcatcagtatagttcccagttgctgccattctacgaatcgtccccccaggttttacataccgaggtgctccagcacctgactgatcttataaggaatcaccctagctggtcagtggcacacctggcagtggagctgggtatccgcgagtgtttccaccatagtagaataatatcgtgtgcgaactgtgccgagaatgaggaggggtgtacccctctgcacttggcctgccgaaagggcgacggggaaattctggtcgagttggtacagtactgccacacacagatggatgtgaccgattacaaaggcgagacagtgttccactatgccgtacagggcgataactcccaggttctgcagctgctaggcagaaacgccgtcgctgggctaaatcaggttaataaccagggtctcacgccgctccatctggcctgtcagctgggcaagcaggaaatggttcgagtcctcctcctctgtaatgcccggtgcaatatcatggggccaaatggttaccctatccatagcgccatgaagttttcacaaaagggatgcgctgagatgatcatctccatggacagtagtcagatacacagcaaagacccaaggtatggcgcctctcccctgcactgggcaaaaaatgccgaaatggccaggatgctactcaagagaggttgcaacgtgaactctacaagctctgcaggaaacactgccttacatgtggctgtcatgcgcaaccgcttcgactgcgctatagtgttgctgacccacggggccaacgccgacgcacgtggggagcatgggaataccccactgcatctggctatgagcaaggacaacgtggaaatgatcaaggcactgatcgtgttcggggccgaggtcgatacccccaatgactttggtgaaactcctacctttctcgcgtctaagatcggacgacttgttacgcgcaaggctattctgacccttctgaggacagtgggagcggagtattgtttccctcctatccacggagtgcccgccgaacagggctccgccgctcctcatcacccattttccctggagcgggcccagcctcctcccatctcgttgaataatctcgaattgcaagacttgatgcacatctcaagagccagaaaacctgctttcatcctgggttccatgcgcgatgaaaaacggactcacgaccatctgctctgtctcgacgggggaggcgtgaaggggctgatcataattcagctcctgatcgctatcgaaaaggcctcaggcgtcgccaccaaggacctattcgactgggtggctggtacctctacgggtgggatcctcgcattggcgatactccacagtaaatcaatggcatacatgaggggtatgtactttcggatgaaagatgaagtctttaggggtagtcggccttacgaatcaggacccctggaagagtttttgaaacgtgagttcggggaacataccaaaatgaccgacgttcggaaacctaaggtgatgctgacgggtaccctgagtgaccgccagccagctgaactacatctcttccgaaattacgatgcacccgaaaccgtcagggaacccaggtttaatcagaatgtgaatctgcgcccacctgcccagccaagcgaccagctcgtgtggcgcgccgcacgcagctccggcgcggctcccacgtacttcaggccaaatggccgtttcttggatgggggattattggcaaataatcccacccttgacgccatgacagagatccatgaatacaaccaagatctcattaggaaaggccaggccaataaggttaagaagctcagcattgttgtgagtctcggaaccggtcggtctcctcaagttccagtcacatgcgtcgatgtattcagaccatccaatccctgggagctggcgaaaactgtctttggagccaaagagttaggcaaaatggtcgtggactgctgcacggacccagatgggcgggcagtggatcgggccagggcatggtgcgaaatggtgggaatacagtactttagacttaacccccagcttgggacggatataatgctggacgaggtttcagacactgtcttagtgaacgcgctgtgggaaacagaagtatacatttacgagcaccgagaagagttccagaagctgattcagctcctcctgtcgccttag

SEQ ID NO: 25616 - DNA, 1284 bp, synthetic construct
  misc_feature 1..1284: note = Description of Artificial Sequence: Synthetic coding sequence
  source 1..1284: mol_type = other DNA
atgcagttcttcggccggctggtgaacaccttcagcggcgtgaccaacctctttagcaacccctttcgggttaaggaggtagccgtcgctgattacacctcctccgacagggtgagggaagagggacaactgattttgttccagaacacgcccaatcggacgtgggactgtgtcctggtaaatccacggaattcccagagcggctttagatgcgcaaattgtgccgaaaacgaggaaggatgtacgccgctgcaccttgcgtgtcgcaagggcgatggcgagattctcgttgagctagttcagtactgccatacacaaatggacgtcactgattacaaaggcgagaccgtttttcattacgccgtgcagggagacaatagtcaggtcctgcagctccttggccggaatgctgtggctggtctgaatcaggtcaacaatcagggattgacccctttgcacctggcttgtcaattaggcaagcaggaaatggtgcgtgtgctattactttgcaatgcccgatgcaatattatgggcccaaatggatacccaatccattctgcgatgaagttttcacagaagggatgtgccgagatgattatctctatggacagttcccagattcatagcaaagacccacgatacggcgcatcccccctgcactgggctaagaacgctgagatggctaggatgcttctgaagcgaggctgtaacgtgaattctacttcgtctgccggaaacacagcgctccatgtggccgtcatgcgcaacaggttcgactgtgccatcgtgctcctaactcatggagctaacgctgacgcgcgtggggagcacggaaatacgccccttcacttggccatgagcaaagacaacgtggaaatgatcaaagccctgatcgtgttcggagcggaagtggatacacccaacgatttcggcgaaacaccaacattccttgcttctaaaatcggcaggctcgttacccggaaggccatcctcaccctcctcagaacagtgggagcggagtattgctttccgcccatccatggggtacctgccgaacagggcagtgccgccccccatcaccctttttccttagagagggcccaacctcccccgatcagtttaaataatctgggctcccacccatctcaggccggctggtgggcctggggcgccgccagcgacggcaccacgggaagccatgcacatctgacaggtcctgaagcttccgttcaccccggattacatgaggggcgggaggcagaccgtcagaatatggagtcgtag

SEQ ID NO: 25617 - DNA, 2259 bp, synthetic construct
  misc_feature 1..2259: note = Description of Artificial Sequence: Synthetic coding sequence
  source 1..2259: mol_type = other DNA
atgcagttcttcggccggctggtgaacaccttcagcggcgtgaccaaccttttttccaaccccttcagagtgaaagaggttgccgtggcggattatacaagtagcgatcgtgtgagagaagagggccagctcatcctttttcagaacacaccgaatcgaacatgggattgcgtactggtaaaccccaggaatagtcagtccggcttccggctgttccagctggaactagaggcggatgcattggttaacttccaccagtatagctctcagctgctccccttctatgaatcttctccacaggtgcttcacactgaggtactgcagcatttaaccgatctcataagaaaccatccctcttggagcgtggcccacctcgccgtggaactgggcattcgcgaatgcttccaccattcacggataatttcctgcgctaattgcgctgaaaacgaagaagggtgcaccccgctacatctggcttgcaggaagggtgacggggagattctcgtggaacttgtacagtattgtcacacccagatggacgtcaccgattacaaaggagagaccgttttccattatgccgtgcagggagataattcacaggtcctgcagctgctcggccggaacgccgtggccgggcttaatcaggtcaataaccagggccttacacctcttcatctcgcatgtcaattaggaaaacaggagatggtaagagtcctgcttctttgtaacgctcggtgtaatattatgggccctaatgggtatcccatacatagcgcgatgaaatttagccagaaaggctgcgctgagatgattatcagcatggatagttcgcagatccactcgaaagacccaaggtacggcgcgagccccctgcactgggctaaaaacgcggaaatggctcgaatgttgttaaaacgcgggtgtaacgtcaatagcaccagctctgccgggaacacggctttacacgtggctgtcatgcgcaacaggttcgactgcgccattgtcttgttaacgcacggagccaatgcagatgcacgcggggagcatgggaacactcctctgcacctcgcaatgagtaaggataatgtggaaatgatcaaagcgcttatagtttttggcgcagaggtagatacacccaatgatttcggcgagacaccgaccttcctggcttccaagataggacgtcagctgcaagacctgatgcatatttcacgagcccgaaagccggctttcattctggggtcaatgcgtgacgaaaagcggacacacgaccatttgctatgtctggatggaggaggggtaaaagggttgattatcatccagctccttatcgccatcgaaaaagcttcaggagtggctacgaaggatctgtttgattgggtcgccggtaccagtaccggcggcatcctcgccctcgctatcttgcatagtaaatccatggcctatatgaggggcatgtacttcaggatgaaggacgaagtcttcagggggtctcgaccttacgaatccggacccttagaagaatttttgaaacgcgagttcggagagcacacaaagatgacggatgtgcggaagccaaaggtaatgttaaccggaactctctcagatcgccagccagcagaacttcatctcttcagaaactatgatgcccctgagacagtccgcgaacctcgttttaatcaaaatgtcaaccttcggccacctgcccagccttccgaccaactcgtgtggcgggcagccagaagtagcggcgcagctcctacctactttcgacccaacgggcggttcctggacggtggattattggcgaataacccgacactggatgccatgaccgagatccacgagtataatcaggatctcatccgcaaagggcaggcgaacaaagtgaaaaaactatctatcgtcgtgtcattggggaccggaagaagccctcaggtacccgtcacttgtgtggatgtctttcgaccctcaaatccgtgggagctcgcgaaaacagtgttcggagccaaagagctgggcaagatggtggttgactgctgtaccgacccggatggacgtgcggtggatcgggcccgtgcatggtgtgaaatggtggggatccagtactttcggttaaacccacagttgggaaccgatatcatgcttgatgaagtctcagatacggtcctggtaaacgccttgtgggagactgaagtatacatatatgaacatcgcgaggagttccagaagttgattcagctgcttctgagtccgtag

SEQ ID NO: 25618 - DNA, 1440 bp, synthetic construct
  misc_feature 1..1440: note = Description of Artificial Sequence: Synthetic coding sequence
  source 1..1440: mol_type = other DNA
atgcagttcttcggccggctggtgaacaccttcagcggcgtgaccaacctgtttagcaatccttttcgagtaaaagaggttgccgtagccgactacacatcctcagatagagtgagggaggagggccagctcatactgtttcaaaacactcccaaccgcacctgggactgcgtgctcgtgaaccctcgaaattctcaaagtggctttcggctgttccaattagaattggaagctgatgcgctggtaaacttccaccagtactcctcccagcttctacctttctatgaaagctctccccaggtgctacatacggaagtgttacaacatcttaccgatctgatcagaaatcacccgtcttggagcgtggcccatctggccgtcgaactgggtatcagggaatgttttcatcactctagaattattagctgtgccaattgcgctgaaaacgaggaggggtgcacccccctacacttggcctgcagaaagggcgacggtgagatcctagtagaactggttcaatactgccacacacagatggacgtcaccgactacaagggagaaacagtattccactatgccgtgcaaggcgacaactcacaggtgctgcaactcctgggtcgcaatgcagtggccgggttgaatcaggtgaacaatcagggattgactcctctccatctcgcctgtcaactcggaaaacaagagatggtgagagtgctcctcttgtgtaatgcccggtgcaacataatgggtcccaacgggtaccccatccacagcgctatgaagttttcccagaaaggttgcgccgaaatgatcatttcaatggactcttctcagattcactctaaagacccacggtacggtgcatcgcccctccactgggctaaaaatgccgaaatggcccggatgctgctgaaacggggttgtaacgtgaacagcaccagtagcgccggaaacacagcattgcatgttgcagtgatgcgcaatagatttgattgtgctattgttttactgacgcacggtgccaatgccgacgcccgtggagagcatggaaacacacctctccatctggccatgtctaaggataacgtggaaatgataaaggcactcattgtgtttggcgccgaggtcgacacgcctaacgatttcggtgaaacccctactttcctcgcttctaaaatcggcagactggtaacaagaaaagcgatcttgacccttctgcgtaccgttggcgcggagtattgctttccacctattcacggcgtgcctgccgaacagggatcagcagcaccccatcatcccttttccctcgaacgcgctcagcctccccccatcagccttaataatctggagctccaggatctcatgcatatctctcgtgctcggaaacccgcctttattctaggcagcatgcgcgatgagaagcgtacagacagaacctag

SEQ ID NO: 25619 - DNA, 2259 bp, synthetic construct
  misc_feature 1..2259: note = Description of Artificial Sequence: Synthetic coding sequence
  source 1..2259: mol_type = other DNA
atgcagttcttcggccggctggtgaacaccttcagcggcgtgaccaatttatttagtaacccctttcgggtgaaggaagtggccgtagccgattataccagtagtgaccgggtgcgggaagagggacaacttattctctttcagaacacgcccaaccgcacgtgggactgcgtcctcgtcaatccaaggaatagtcaatcagggttcagactgtttcagttagagctggaggccgacgcgcttgtgaacttccaccaatatagctcccagctcctgcctttctacgagagcagcccacaggttcttcacaccgaagtgcttcagcacctgactgatctgattcgcaaccacccgtcttggtctgtagcccacttagctgttgaactgggcattcgggaatgtttccaccactccaggatcatctcttgcgcaaactgcgcggagaacgaggagggctgcacacctctgcatctggcgtgtcggaaaggcgatggggagatcctagtcgagctggtgcagtactgccatactcagatggatgttacagattacaagggagaaaccgtgtttcactacgccgtgcagggtgacaatagtcaggtcctgcaactcctcggccgcaatgctgttgcaggcctcaaccaggtaaacaaccagggactcactcccttacacctggcctgtcagctagggaaacaggaaatggtcagggtcctattactttgtaacgccaggtgtaacattatgggcccgaatgggtacccgatccatagtgccatgaagttttcccagaagggctgcgcagaaatgattatcagtatggactccagccagatacactccaaggatccccgctatggagcctcccctctgcactgggcaaaaaacgccgagatggccagaatgctccttaagcggggatgcaatgtcaattccaccagttcggcagggaacacggccctccacgtcgcagtcatgcggaacagatttgactgcgctatcgttctattaacgcacggggctaacgccgatgcgcggggggagcacggaaatacgcccttgcacctggcgatgagtaaggacaatgtggaaatgatcaaagcgttaattgtgttcggcgccgaggttgatacgcctaacgacttcggtgagactccaaccttcctagcctcaaagattggtaggcagttgcaggacttgatgcatatctcacgggctagaaaacctgcttttattctcggaagcatgcgtgacgaaaagcggacccacgaccacttactgtgcctcgacgggggcggcgtcaagggcctgataatcattcagctactgattgccatcgaaaaggccagcggtgttgccaccaaggacctctttgactgggtcgccggaacaagtacaggcgggattctagctctggctatactccattccaagtctatggcgtatatgcggggaatgtactttcgaatgaaagacgaagtgtttagaggcagccggccatatgaaagcggacctcttgaggaatttttgaagcgtgaatttggcgagcacactaagatgacggacgtgagaaaaccaaaagtgatgctgaccggaacactcagcgaccgacagccggccgaattacacctattccgcaattatgacgcccctgaaaccgtgcgcgaaccacgtttcaatcagaacgtgaacttacgcccgcccgcacagccatcggatcaattggtgtggagagcagctcggtccagcggggctgccccaacatatttcagacccaatgggagattcctggatgggggcctgctcgcaaataaccccaccctggacgctatgaccgaaatacatgagtacaatcaagacctaatacggaagggccaagcaaataaagtaaaaaaactgtcgattgtggtgtccctaggcacaggcagaagtccccaagttcctgtgacatgcgtggacgtgttccgaccttccaacccttgggagttggctaagaccgtattcggcgccaaggagctgggtaaaatggtagtggattgttgcaccgaccccgacggccgcgccgtggaccgtgctcgcgcttggtgtgaaatggtgggtatccagtattttcgcctgaatccccagctcgggactgatattatgttggacgaagtctccgacacagtactggttaatgcgctctgggagaccgaagtctatatttacgagcacagagaggagtttcagaagctaatccagttgctactgtcgccctag

SEQ ID NO: 25620 - DNA, 2004 bp, synthetic construct
  misc_feature 1..2004: note = Description of Artificial Sequence: Synthetic coding sequence
  source 1..2004: mol_type = other DNA
atgcagttcttcggccggctggtgaacaccttcagcggcgtgaccaacctgtttagcaacccatttagagtcaaggaggttgcggttgcagactatacttctagtgatcgcgtgagggaggagggccaactgatcctgttccaaaatacaccaaaccgcacctgggactgtgttttggtcaaccctaggaactcccagagcggattccgactttttcagctggaactggaggctgacgcactggtgaattttcaccagtactctagccagctaggtaaacaggaaatggtcagagtgttattactatgcaatgcccggtgtaatattatggggcctaatggctatcccatccattcggccatgaaattcagccaaaaaggttgcgcggaaatgatcatatcaatggactcctcccaaattcactcaaaagacccacgatatggtgcaagtccattgcattgggccaagaacgctgaaatggctagaatgcttttgaaaaggggctgcaacgtgaacagtacttcgtctgccgggaacacagcccttcatgtagccgtgatgaggaatagatttgattgtgccatagtcctactgacgcacggggccaacgcagacgcacgcggtgaacacggtaatacccccctccatttggcaatgtccaaagataatgtcgaaatgataaaggctctcatcgtcttcggggccgaagtggacactccgaacgacttcggtgagacacccactttcctggcctccaagattggccggctggtgactaggaaagctatcttgacgcttctccggaccgtcggcgcagaatactgtttccctcccatccacggtgtgccggccgagcaggggtctgcagccccacaccatcccttcagtctggaaagggcccagccacctcctatttccctgaacaacctggaactgcaggatctgatgcacataagtcgcgcccggaagccggcgtttatacttggcagtatgcgggatgagaagcgcacccatgatcaccttctgtgcctggacggcgggggcgtgaagggtctcattatcattcaactgctgatagctatagaaaaggcatccggcgtggcgaccaaagacctctttgactgggttgcaggaacgtccacaggtggaattctcgctctggcgattctacattcaaaatcaatggcatatatgaggggaatgtactttcggatgaaggatgaagtctttcgaggttctcgcccctacgagagcggaccactagaggagtttctcaagcgtgagttcggggagcacacaaaaatgacagatgtcaggaagcctaaagtaatgctcaccggaacactctcagaccgtcagcctgccgaactccacttgtttcgcaactatgacgccccagaaacagtacgtgagccaagattcaatcagaatgttaatttacgacctcccgcacagccaagcgaccagctggtctggagagcggctagaagttccggcgccgcaccaacttattttcgccccaacgggagattcttagatggcggactgctggctaataacccaaccctggacgcaatgacagaaatccatgaatacaaccaggacctgatcagaaaaggccaagctaacaaagtgaagaagttgtccatcgtagttagcctgggaacgggcaggtctccacaggtgcccgttacttgcgtggacgtgttcagaccatctaatccatgggaactagccaagacagtgttcggggcaaaagaactcgggaaaatggtggtggactgctgcaccgacccagacggacgggccgtggatcgggctcgtgcatggtgcgagatggtaggtatccagtattttcgactaaacccccagttaggcaccgacatcatgctcgacgaggtgagcgacacagtcctagtcaatgccctctgggaaacagaagtctatatttacgaacacagagaggagtttcagaagctgattcagttgctgctctcaccatag

SEQ ID NO: 25621 - DNA, 501 bp, synthetic construct
  misc_feature 1..501: note = Description of Artificial Sequence: Synthetic coding sequence
  source 1..501: mol_type = other DNA
atgcagttcttcggccggctggtgaacaccttcagcggcgtgaccaatctgtttagcaacccttttcgagtgaaggaggtagcagttgccgactacacatcctccgatcgcgtgcgggaggaaggacagctgatcttgttccagaacacccccaacaggacctgggattgtgtcttggtcaatcccagaaatagccagtcgggctttaggtgtgcaaattgcgcagagaatgaggaaggatgcactccacttcatctcgcctgtaggaagggcgatggggaaatcctggtcgaattagtgcagtactgccatacacagatggatgttacagattacaaaggtgaaaccgtttttcattatgcggtacagggggacaactcgcaagtgttgcagctgttaggaaggaacgcagtcgctggactgaaccaagtcaataaccagggtctcacaccactgcacttagcatgccagctcggcaaacaagagatggtcagagtatag

SEQ ID NO: 25622 - DNA, 1299 bp, synthetic construct
  misc_feature 1..1299: note = Description of Artificial Sequence: Synthetic coding sequence
  source 1..1299: mol_type = other DNA
atgcagttcttcggccggctggtgaacaccttcagcggcgtgaccaaccttttctcgaatcccttccgcgtgaaggaagtggctgttgccgattacacctcatcagatagagtgcgcgaggaaggccagctgattctgtttcagaatacgccaaataggacctgggactgcgttctggtgaatccccggaactcccagagcggcttccgattgttccagcttgagttggaggctgatgcactggtaaattttcaccaatactccagccaactccttccattctatgagagctctcctcaggtgcttcacaccgaggtcctgcagcacttaaccgatttgattcgcaaccatcccagctggtccgtagcccacttagccgtcgaactcggcatccgtgagtgtttccatcactccagaatcatccgcgttcgctcagctcatcaggtgcccggcctgtgggagctcattagtacgcaccacgaaatagagttcagccaaccgccccaggctgtgcctatcgcgagaagaaccaggcgtgccgcccacccatgcacctggcctgcagcaagagtaatggggagaagctggtggagttggtgcagcacagctacgctgcgttggatgtcgcctaccactcgggagcggccatcaagcatcatgctgtcccgcgtgacaatcctacgttgctgcaggtgtgccgaaatgataattagcatggatagcagccagatccactccaaagacccccgctatggggcttcgccactgcactgggcgaaaaatgccgaaatggcccggatgctacttaagaggggctgtaacgtcaattctacctcctccgcgggtaacacagcacttcacgtggcagtgatgagaaatagattcgattgcgccatagtcctgcttacacacggcgctaacgctgacgccaggggagaacacggtaatacccctctgcatctagctatgagcaaagacaacgtggaaatgattaaggctttgattgtcttcggggcggaggttgacacccctaacgactttggcgagacgcctaccttcctggcctctaagatcggcaggctagtgacgcgcaaggcaattctgaccttactgcggaccgtaggagccgaatactgctttcctcctatccatggagtgccagctgagcaggggagtgctgccccccaccaccctttttcactcgaacgggcacagcctccaccaatctctctcaacaatttgggatcccaccctagccaggcaggatggtgggcctggggggctgcctcagacggttag

SEQ ID NO: 25623 - DNA, 243 bp, synthetic construct
  misc_feature 1..243: note = Description of Artificial Sequence: Synthetic coding sequence
  source 1..243: mol_type = other DNA
atgcagttcttcggccggctggtgaacaccttcagcggcgtgaccaatctgttctctaatcccttccgtgtgaaggaggttgccgtggctgattatacttcctccgatagagtccgagaggaggggcagctaatactttttcagaacacgcctaatcgaacttgggattgtgtccttgttaatccccgaaattcccaatctggcttcaggctgtttcaactcgaactcgaagccgacgcttag

SEQ ID NO: 25624 - DNA, 498 bp, synthetic construct
  misc_feature 1..498: note = Description of Artificial Sequence: Synthetic coding sequence
  source 1..498: mol_type = other DNA
atgggccccctgcccgtgtgcctgcccatcatgctgctgctgctgttgccctccttgcttctgctccttctccttcctggacctggcagtggcgaagccagtaggatattgcgcgtccaccgacggggcattctggaactggcaggaaccgtaggctgcgtggggcctagaacacctatcgcatacatgaagtatggatgtttctgcggactggggggacatggtcagccgagagatgcaattgattggtgttgtcacggccacgactgttgttacacgagggctgaggaggcgggctgtagtccaaagaccgaaaggtactcatggcagtgtgttaatcagtccgtgctttgcggccctgccgagaataagtgtcaggagctcctgtgcaagtgtgatcaggagatagccaactgccttgctcaaactgagtataatctgaaatacctattctaccctcagttcctctgcgagcccgattctccgaagtgcgattag

SEQ ID NO: 25625 - DNA, 498 bp, synthetic construct
  misc_feature 1..498: note = Description of Artificial Sequence: Synthetic coding sequence
  source 1..498: mol_type = other DNA
atgggccccctgcccgtgtgcctgcccatcatgctgctgctgctgcttccttctctgcttttgttactgcttctgcccgggccagggtccggcgaggcctcccgcatcctacgagtgcataggcgcgggatactcgagttagccggcaccgttggctgtgtgggaccaaggactccgattgcctatatgaagtacggctgcttttgcggtctcggaggtcatggccagccgagagatgctattgattggtgctgtcacgggcacgactgttgctatactagggccgaggaggccggctgctcaccaaaaacggagcgatactcctggcagtgcgtcaatcagagtgtactgtgtggtcccgcggagaataaatgccaggaattgctttgcaaatgtgatcaagagatcgcgaactgtctggcccagactgaatataacctgaagtacctgttttatccccagtttctgtgcgaacccgatagtcctaaatgcgattag

SEQ ID NO: 25626 - DNA, 570 bp, synthetic construct
  misc_feature 1..570: note = Description of Artificial Sequence: Synthetic coding sequence
  source 1..570: mol_type = other DNA
atggccctgctgagccggcccgccctgaccctgctgctgctgctgatggctgcagtggtccggtgtcaggagcaagcgcagaccacggactggcgcgccaccttaaaaacaatccgcaatggagtgcataagatagatacttatctgaatgcagctctggatctcttgggcggtgaagatggcttatgccagtacaagtgttcggacggctctaagccatttccaaggtatggctacaaaccctctcctcccaatgggtgtggctctcccctgttcggcgtccacttgaatattggaatcccctccctcacgaaatgctgtaatcaacacgaccgctgttatgaaacttgtggaaagtcaaagaatgactgtgacgaggagtttcagtactgcttatctaaaatttgtcgcgatgtgcaaaaaacgctcggtttgacccagcacgttcaagcgtgtgaaactactgtagagctgttgttcgactccgtgatccatctcgggtgcaagccgtacctggattcacagagagctgcatgccggtgtcattatgaggaaaaaaccgatctgtag

SEQ ID NO: 25627 - DNA, 213 bp, synthetic construct
  misc_feature 1..213: note = Description of Artificial Sequence: Synthetic coding sequence
  source 1..213: mol_type = other DNA
atggccctgctgagccggcccgccctgaccctgctgctgctgctgatggctgcggttgtccgatgtcaggaacaggcacagacaaccgattggcgggccaccctgaagactatcagaaacggggtacataagatagatacatatctgaacgccgccctcgacctcttgggaggcgaagatggactttgtcagtataaatgctccgatgcctag

SEQ ID NO: 25628 - DNA, 588 bp, synthetic construct
  misc_feature 1..588: note = Description of Artificial Sequence: Synthetic coding sequence
  source 1..588: mol_type = other DNA
atgaagctggccagcggcttcctggtgctgtggctgagcctgggcggaggcctggctcagagcgacacaagtcccgacaccgaggagtcctactccgattggggcttgcgtcacctgagggggagctttgaaagcgtgaatagctactttgacagtttcctggaactgctgggtgggaaaaatggcgtgtgtcagtacagatgtcgctacgggaaggctcccatgccgagacctggttacaagccccaggagcctaacggatgcgggtcttattttctaggccttaaagttcctgagagtatggacctgggcatccctgcaatgacaaagtgttgtaaccagctggatgtttgctacgacacttgcggggctaataagtatagatgtgacgccaagtttcgttggtgtctgcactctatctgttcggatctcaagagatctctgggctttgtatcaaaggtggaggccgcttgtgactctctcgttgacacagttttcaacactgtttggacacttggttgcaggcccttcatgaattcccagagagccgcttgcatctgcgcagaggaagaaaaggaagaactgtag

SEQ ID NO: 25629 - DNA, 3876 bp, synthetic construct
  misc_feature 1..3876: note = Description of Artificial Sequence: Synthetic coding sequence
  source 1..3876: mol_type = other DNA
atggccggcgccgccagcccctgcgccaacggctgcggccccggcgctccaagtgatgctgaggtactccacctctgtagatcacttgaagtcggcactgttatgacgctcttctactctaagaaaagccaaaggccagaaagaaagacattccaggtgaagttggagacacggcaaattacctggtccagaggcgccgacaaaatcgagggggccatcgacattcgtgagataaaagaaatccgccccggaaagacttctcgagacttcgatcgctaccaggaagatcccgcctttagacccgatcagagccactgctttgttattctctacggcatggaattccggctgaagactctgtccctccaggctacttctgaggatgaggtgaatatgtggatcaaggggctgacctggctgatggaggacaccctacaggctcccactccgctgcagattgagagatggttgcggaagcaattctactcagtcgatcggaacagagaggacagaatcagcgctaaagacctgaagaacatgctgtctcaggttaattatcgcgtgcccaacatgcgctttttgcgggagcggctgaccgatctggagcagagaagtggagatataacatacggtcagttcgctcaactgtacagatccttgatgtactcggctcaaaaaaccatggacctgccgtttctggaggcttctactctgagagccggggagcgtcctgaactgtgtagagtgagtcttcctgagtttcaacaatttcttctggactatcagggcgagttgtgggcggtggatcgccttcaggtccaggaatttatgctcagcttcctcagagacccactcagagaaatcgaagagccctatttcttcctggatgagtttgtcactttcttgttcagtaaagagaattccgtgtggaactcccagctggatgccgtctgtccagataccatgaacaatcccctgagtcattattggattagctcatctcacaacacctaccttactggagaccagttttcaagtgaaagcagccttgaggcatacgcacgctgcctccgcatggggtgcagatgcattgaactggattgttgggatgggccggatggaatgcctgttatctatcacggacacaccctgactaccaagataaaattcagcgacgtattgcatactatcaaagagcacgcatttgtagccagcgaatacccagtgatactgtcaatagaggaccactgctccattgcacaacagcgcaatatggctcaatacttcaagaaggtactgggcgacaccctcttaactaagcccgtggagatatctgcggacgggctcccatctcctaaccaactgaaacggaaaatcctgattaagcataaaaagctcgccgagggcagcgcatatgaagaagtgccaaccagcatgatgtatagcgaaaacgatatcagtaattccatcaaaaacggaatattatacttggaggaccccgttaaccacgaatggtacccacattatttcgtgctaacctcatctaaaatctattatagcgaggagacctccagtgatcaggggaacgaggatgaggaggagcctaaagaagtgagctcatctaccgaactccactccaacgagaagtggtttcacggaaagctgggtgccggccgggacggaaggcacatagccgaaaggctcctgaccgagtattgtatcgagacaggggcacctgatggatcctttctggtgagagagagcgaaacttttgtgggcgactacaccttgagtttctggcgcaacgggaaggtccagcactgtaggatccactcacgccaagatgctggaaccccgaagttcttcctgactgataacctggtttttgatagtctctatgatttgatcacacattaccagcaggtgcctctgcgctgtaatgagttcgagatgcggttatcagagccagtgccccaaacaaacgctcatgaatccaaagagtggtaccacgcttccctgacccgggcacaggcagagcacatgctcatgcgggtccctcgcgatggtgctttcctcgtacgcaaaaggaacgagcccaactcctacgcgattagtttccgtgccgaggggaaaatcaaacactgccgggtgcagcaagagggacaaactgtgatgctggggaactccgaatttgacagtctggtggatctgatctcgtactatgaaaagcaccctctttatcggaagatgaaactcaggtatccaatcaacgaggaagccctcgaaaagattggaacggcagagcccgactatggagccctttatgagggcagaaaccctggcttttacgttgaggccaacccgatgccgaccttcaagtgcgcagtaaaggcattgtttgattataaagcccaacgggaagacgagctaacattcataaagtccgcgataatccaaaacgtggaaaaacaggagggaggatggtggcggggggactacgggggcaaaaaacaactctggtttccatcgaattatgtggaagaaatggtcaatccagtagccctcgagcccgaacgcgagcacctggatgaaaactctcctctcggtgatttactcagaggcgtgcttgacgttccagcatgtcagatagccattagacctgagggcaagaataatagactttttgtcttcagtatttctatggcttctgtggcacattggtcccttgatgtggccgctgattctcaggaggagctgcaggactgggtcaaaaaaatcagagaggtggcccaaactgctgacgccaggctcactgagggtaaaatcatggaacgccgcaaaaagatcgccctcgaactgtcggaactggtggtttactgcaggcccgtccctttcgacgaggaaaagatagggactgagagagcatgctacagggatatgtcatccttcccagaaactaaggcagaaaagtacgtaaacaaggcaaaaggaaaaaagttcttacagtacaacagacttcagttatcccgaatttatccaaaggggcagcggttggattcctctaattatgacccacttcctatgtggatctgcggcagccagctggtcgcacttaattttcagaccccggataagccaatgcagatgaatcaagcattatttatgacagggcgacattgtgggtatgtgcttcagccatctacgatgcgtgacgaggcattcgatcccttcgataagtcatctctcaggggcctggagccttgcgccattagtatagaagtactaggtgcaaggcacctgcccaagaacggaaggggcatcgtctgtccattcgtcgagattgaggtggcaggcgcggaatacgactccacaaaacaaaagacggagttcgtggtcgataacggacttaatcccgtctggccagccaagccgttccatttccagatcagcaatcctgaattcgccttcctgaggttcgtagtttatgaagaggacatgttctccgatcagaatttccttgcgcaagctaccttccctgtgaaggggctcaagacgggctaccgcgctgtgcccctaaagaataattattccgaagatcttgagttagcgtcactcctcatcaagattgatattttccctgctaagcaggaaaacggagatctgtctcccttttccggcacaagcctgcgggagcgggggagtgatgcaagtggccaactgttccatggccgcgctcgggagggcagcttcgaaagtaggtatcagcagccatttgaggacttccgcatttcacaagaacatcttgcagaccacttcgattctcgcgagcgtagagccccccggcgaaccagggtgaacggggataatcgcctttag

SEQ ID NO: 25630 - DNA, 3873 bp, synthetic construct
  misc_feature 1..3873: note = Description of Artificial Sequence: Synthetic coding sequence
  source 1..3873: mol_type = other DNA
atggccggcgccgccagcccctgcgccaacggctgcggccccggcgctccgagcgacgcagaagtgctgcacctttgcagaagcctggaagtcggtactgtgatgactctgttctacagtaaaaaatcccagagacccgagagaaagacattccaggtgaagctcgagactcgacaaattacctggtccagaggagcagataagatcgaaggggcgatcgatatacgcgagatcaaggaaatcagacctggaaaaactagccgcgactttgaccggtaccaagaagacccggcctttcgccctgatcagtctcattgtttcgtgattctgtatgggatggagttccggcttaagacactgagtctgcaggccacctccgaagatgaagtgaatatgtggatcaagggcctgacatggctgatggaggatactctgcaggcgcctactccattgcagatcgaacggtggctgaggaagcagttttattcagtggaccgaaatcgtgaagataggatctcagcaaaggacctgaagaatatgctatcccaggtgaactaccgggttcccaatatgcgctttttgagagaaagacttaccgacctcgagcagaggagcggggacatcacttacggacagttcgcccagctgtaccggtcccttatgtacagtgctcagaaaactatggacctgccttttcttgaggcttcaactctacgggccggggaacgcccggaactgtgtagagtgagtcttccagagtttcagcagttcttgttggattatcaaggagaattgtgggccgtcgaccgtctccaagtacaggaattcatgctgagctttctccgagacccactccgcgaaattgaggagccatactttttccttgatgagttcgtcactttcttgttcagcaaagaaaattcggtctggaactcccaactggacgccgtttgccccgacactatgaataatcccctatctcattactggatttcctcctctcacaacacctacttgaccggggaccagtttagttccgagtcaagcctggaggcttacgcccggtgcctaagaatggggtgccgttgcattgagctggattgttgggacggccctgatggcatgcctgtaatatatcacggtcacacgctcacaacaaagatcaaattctcagacgtgttgcacacaattaaagagcacgctttcgtggctagcgagtacccggtcatcctatcgattgaagaccattgcagcatagcccagcagcgtaatatggcgcagtatttcaagaaagttcttggagacaccctcctgacgaagccagtggaaatatccgcagacggactgccctctccaaaccagcttaagcggaaaatcctgattaagcataagaaactcgccgagggttctgcttacgaggaagtcccaactagcatgatgtattcggagaatgatatttcaaactctattaaaaacggcatcttgtatctggaggatcctgtgaatcacgaatggtacccccactatttcgtcctcacaagctcaaaaatctattattccgaagagacctctagtgatcaaggcaacgaggacgaggaggaaccgaaggaggtatcttcctcaaccgaactgcatagtaatgaaaagtggttccacggaaaactaggggcagggcgagatggtcggcatatcgctgagagattattgacagagtactgcattgagactggagccccagatgggtcattcctggtgagagaatccgagacttttgtgggcgattacaccctgagcttttggcggaacggaaaggtgcaacactgcaggatccatagccggcaagacgcaggaacaccgaagttcttccttacggataatctggtgtttgatagtctgtatgatctgattacccattaccagcaggtgccactccgctgtaatgagtttgagatgcgcctgtccgagccggtgccccagaccaacgcccacgagtcgaaagagtggtaccatgcatcactgacccgggcccaagctgagcacatgctgatgagggtgccaagggacggcgccttcctggtccggaagagaaacgaacccaattcgtacgccatctcctttagagccgagggaaagattaagcactgcagggttcagcaggagggacagactgtgatgcttggcaactccgagttcgactctcttgtggatctaattagctattacgagaagcatcccctgtatcgaaagatgaagctccgatatcctatcaacgaggaagcactagagaagatcggcacagctgagcccgattacggcgcgctttacgaaggaagaaaccctggattctatgttgaggcaaatcctatgccaacttttaaatgcgccgtgaaggccttattcgactacaaagcccaacgagaagatgaactaaccttcatcaagtccgcaataatccaaaacgtcgaaaaacaagaggggggatggtggcgcggtgattatggtgggaagaagcagctgtggttcccatccaactatgtggaggaaatggtcaacccagttgctctggagcctgaaagagagcacttggacgaaaactccccacttggggacctgctgcggggagtgctggacgttcccgcctgtcagatagcgattaggcctgaaggtaagaacaacagactcttcgtgttttccatcagcatggcctcagtggcacactggtctctggacgtcgctgccgattcccaggaggaactgcaagactgggtaaagaagattagagaggtagcccagacggcggacgcaaggctcacggagggtaaaatcatggagcgacgcaagaaaatagccctggagttatctgaactggtggtgtattgccgtccagttccttttgatgaggagaaaatcggaactgagcgagcttgttacagggacatgagctctttccctgaaactaaggcagagaagtatgtcaacaaagccaaaggaaagaagttcctgcagtataaccggctacagctaagcagaatctatcctaagggtcagcggttagattcaagtaactacgatcctctgcccatgtggatttgcgggagccagttggtagctttgaactttcagacgcctgataaaccaatgcaaatgaatcaggcactgttcatgacaggacgccactgcggatatgtgctccagccttcaaccatgagggatgaggcattcgatcccttcgacaagagctctctccgaggcctagagccatgcgctatctctatcgaggtcctcggggcccgccacctcccaaagaacggtagagggattgtatgtcccttcgttgaaatcgaagttgctggcgctgagtacgacagtacgaagcagaagaccgagtttgtcgttgacaacggtttgaatcccgtgtggcccgctaagcccttccactttcagatctccaatcccgagttcgcttttctgcggttcgtcgtgtacgaagaggacatgttctccgaccaaaactttctcgcacaggcgactttccctgtcaaaggcctgaagacgggataccgcgcagttcctttaaaaaataactattctgaggacctcgagttggccagtctgctgattaagattgatattttcccagcaaaagagaacggcgatttgagccctttctcaggcacaagcctccgcgaacgggggtccgatgcctccgggcagttgtttcacggaagggctcgtgaggggtcctttgaatccaggtatcaacaaccattcgaagatttccggatcagccaggaacatctggcggaccacttcgactcacgcgagcgcagagccccccggcggacaagggtgaacggggataatagactttag

SEQ ID NO: 25631 - DNA, 3876 bp, synthetic construct
  misc_feature 1..3876: note = Description of Artificial Sequence: Synthetic coding sequence
  source 1..3876: mol_type = other DNA
atggccggcgccgccagcccctgcgccaacggctgcggccccggcgctccgagtgatgccgaggtgctccatctgtgtagatcgctggaggtgggcaccgtgatgacgttattttactcgaagaaatctcaaagacctgagcgtaagaccttccaggtcaaattggaaacccggcagataacctggagtaggggagcggacaaaattgaaggtgcaattgatatccgggagatcaaagagatccgacctggaaagacctctcgtgacttcgacaggtatcaggaggaccccgccttccgcccggaccagtctcactgcttcgtgatcctatatggcatggagtttagactgaagaccctatccttacaggcaaccagtgaggacgaagttaatatgtggatcaagggcctgacgtggctgatggaggataccctgcaagcccctaccccacttcagatcgaaagatggctccggaagcagttctactccgtggaccggaacagggaggaccggatctctgcaaaagatttgaagaatatgctgagtcaggtcaattatagagtccccaatatgagattcctgcgtgagcgcctcacagatctggaacagcggtcaggtgatataacctatggccagtttgcgcaactctaccgctccctcatgtatagcgcccagaagacaatggatcttcccttcctggaggcatctactctccgcgcaggggaaaggcccgaactctgtcgcgtttccctacccgaatttcagcaatttctgctcgactaccagggggaactgtgggctgtggatagactgcaggtccaggagtttatgttgtcctttcttagagatcccctgagggagatagaggagccatactttttcctagacgagtttgtcacctttcttttcagcaaggaaaattccgtctggaatagccagctcgatgccgtctgcccagacactatgaataatcccctcagtcactactggatcagttcctcacacaacacatacctgactggcgatcagttcagttccgagagctccctggaagcttacgcccggtgtctaagaatgggatgcaggtgtatcgagctggactgctgggacgggcccgatgggatgcctgtcatctatcacggccacaccctgactaccaagatcaaattctctgacgtgctgcacacgattaaagaacacgctttcgtcgcaagcgagtatcctgttatcttatctatcgaggaccattgttcaatcgctcaacaacgaaacatggcacaatattttaagaaagtattaggggatactctcctcacaaagccagtcgaaatttctgctgacggactcccttctccaaaccagcttaaacgtaagattcttataaaacacaagaaactggctgagggaagcgcatatgaggaagtgcccacatccatgatgtacagcgaaaatgacattagtaattccattaagaacggaatcctgtacctcgaggacccagttaatcacgagtggtatcctcattatttcgtattgacctcgagcaagatctactattctgaggaaacgagttctgatcagggaaatgaagacgaggaagaacccaaggaggtgagcagtagcactgaattgcatagcaatgagaaatggtttcacggtaaactcggggccggacgtgacggccgacatattgccgagcgccttttaacagaatactgtattgaaaccggagcccctgacggcagcttcttggtcagggagtcagagacattcgttggagactataccttatctttctggcggaacggaaaggtccagcactgtagaatccacagtagacaagacgccggtactcccaagttctttttgaccgacaatcttgtcttcgattccctctacgaccttataactcactaccagcaggtgccgctccgctgtaatgaattcgaaatgaggttgagcgaacctgttcctcagaccaacgcacacgagagcaaagaatggtatcacgcatcactgacccgcgcccaggctgaacacatgctgatgcgggtcccccgggatggtgcttttctggttcgcaagaggaatgagcctaacagctatgccatcagctttagagccgagggaaaaattaaacactgtcgtgtgcagcaggagggccagacagtgatgttaggaaattccgaatttgactcgctggtggatttaatatcttactatgagaaacacccactatacagaaagatgaagctccgatacccaataaacgaagaggctctggagaagataggaactgcagagcccgattacggtgctctctatgaggggcgaaaccccggcttttacgtggaagcaaatcccatgcctaccttcaaatgcgccgttaaggcactttttgactacaaagcacagcgcgaagatgagctgacattcataaaatccgcaatcatccagaacgttgagaaacaggaaggaggttggtggcgaggagactacggggggaagaaacagctgtggttcccttccaattacgtcgaggagatggtcaacccggttgcactggaacccgaaagagaacacttggacgagaactcgccactgggagacctcctgcgcggagtcctggacgtgcccgcctgtcagattgccataagaccggaaggaaagaacaaccggctgttcgtgttcagcattagcatggcctcagtcgcccactggtcgctcgacgtggccgcggattcccaggaggagctgcaggattgggtgaaaaagattcgggaagtggcccagacagccgatgcccgtttgacggaaggaaaaataatggagcggcggaagaaaattgccctggagttaagtgagctggttgtctactgccgtccagttcctttcgatgaggagaagatcgggacagaaagggcatgctaccgcgatatgtctagctttccagaaacgaaggccgaaaagtatgtcaataaggcaaaagggaaaaagttcctgcagtacaataggcttcagctgagccggatataccccaagggacagcggttggattcttcaaactatgacccactgcctatgtggatttgcggatcgcagctggtcgccctcaacttccaaactcccgacaaacctatgcaaatgaaccaggccttgttcatgaccggccgtcattgcgggtatgtgcttcagccgagcacaatgcgagacgaagcctttgacccatttgataagagtagcctgcggggcttggaaccatgcgcaattagtattgaggtgctgggtgccaggcacctgcctaagaacggcagagggatcgtctgtccttttgtcgaaatagaggtcgcgggcgcggaatacgattcgaccaagcagaagacagagtttgtggttgataatggtctgaaccccgtctggccagccaagccatttcacttccagatctccaatccagaatttgcctttctgagattcgtcgtgtacgaggaggacatgttttcagatcaaaatttcctagcccaggctacgttcccagtcaaaggcttgaagaccgggtaccgggccgtgcctctgaagaacaattacagtgaggacctcgaactggccagtcttctcattaaaatagacatctttccggctaagcaggagaacggagacttgagccctttcagcggtaccagtttgcgggaacgagggtctgacgcttccggacagctttttcacgggagagccagggaagggtcctttgagtcaagataccagcagcccttcgaagatttcaggatcagccaggaacacctggccgatcacttcgacagcagagagcggagggcccctcggcgaacccgtgtgaacggggacaaccgactctag

SEQ ID NO: 25632 - DNA, 3798 bp, synthetic construct
  misc_feature 1..3798: note = Description of Artificial Sequence: Synthetic coding sequence
  source 1..3798: mol_type = other DNA
atgagcaccaccgtgaacgtggacagcctggccgagtacgagaagagccagatcaagcgcgctctggaactgggcacggtgatgacagtcttttcctttcggaaatccacaccggaacgccgtacagtacaagtgattatggaaaccaggcaagttgcctggagcaaaactgctgacaagatcgagggcttcctggacataatggaaattaaggaaatcaggcctggcaagaatagcaaagattttgagcgggcaaaggctgttcgtcagaaggaggactgctgctttacaatattatatggaactcagttcgtcctctcgactctctccctggccgccgacagcaaggaggatgcagtgaactggctcagtggtctcaagatcctgcatcaagaggctatgaatgctagcacccccacaataattgagagctggctgcgaaaacaaatttactctgtggatcaaactagacggaactctatcagtctcagagagttaaagacgatcctgcctttgataaactttaaagtgtcaagcgccaagtttctcaaagacaagtttgtggaaattggggcacacaaagatgagctgtctttcgagcagtttcatttgttttataagaaactgatgttcgagcagcagaagtcaatacttgatgagtttaagaaggattcctccgtttttatcctgggtaacacggataggcccgatgcatctgctgtgtacctccatgattttcagcggtttctcatccacgaacagcaggaacactgggcgcaggatctcaataaggtcagggagagaatgaccaagtttatcgatgacaccatgagggagaccgcagagccctttctattcgtggacgagttcctcacttatctttttagtcgggagaatagcatatgggacgaaaaatatgacgcagtggacatgcaagacatgaacaacccactctctcattactggatcagcagtagccataacacctacctcacgggtgaccaacttcgctcggagtcctcgccagaggcttatatccgttgtctgcgtatgggctgtagatgcatcgaattagactgttgggatggaccggatggaaagcctgtgatctatcacggatggactcgaaccactaagattaaattcgacgacgttgttcaggcaataaaggaccacgccttcgtgacgtccagcttccctgtgatattaagcatcgaggagcattgctctgttgaacaacagagacatatggcaaaggctttcaaggaagtgtttggagatctgctgctgactaaacctactgaggcctccgcagatcagctgccctctccaagccagctccgggagaaaattattattaaacacaagaagctgggaccccgcggtgacgtggacgttaacatggaggacaaaaaggatgaacacaaacagcagggtgagctctacatgtgggactccatcgatcagaagtggacgcgccattattgcgctattgccgacgctaagttaagtttctctgatgacatcgaacagacaatggaagaggaagtgcctcaagatataccccccactgagctgcattttggcgagaagtggtttcacaaaaaagtggaaaaaagaacctcagccgagaaactcctccaggagtactgtatggagaccggaggtaaggatggaacttttctggtgcgggaatctgagactttccctaacgactacaccctgagcttttggagaagcggtagagtccagcactgtagaatccgctccacaatggagggtggtaccctgaagtactatctgactgataacctcactttcagctctatttacgctctcatccaacactatcgggagacccacctgaggtgcgcagaattcgagttgcgcttgaccgatccggtgcctaaccccaatccacatgaatcgaagccctggtactacgattccctcagccgcggtgaggcagaagatatgttaatgagaatacccagagacggcgcatttctgattagaaagcgggaagggagtgatagctatgccatcacttttcgcgctagagggaaagttaaacattgtaggatcaaccgcgacggccggcacttcgtcctgggaaccagcgcatattttgagagcctggtggagcttgtgtcctactatgagaagcattccctctatagaaagatgcggctgcggtacccggtcactcctgagcttctagaaaggtataatatggagcgggacattaactcgctgtatgatgttagtcgaatgtatgtagatccctccgagattaacccttccatgccacagaggacagttaaagcactgtatgattataaagctaagaggagcgacgagctcagtttctgccggggagccctgatccataacgtgtccaaagagccaggcgggtggtggaagggtgattacgggacgcggattcagcagtacttcccaagcaattatgtggaggatatcagcacagcagatttcgaagaactcgagaaacagattatcgaggacaaccctctgggcagcctttgccgtggcatcctagacctcaatacatataatgtcgtgaaagcccctcaaggcaagaaccagaaatcattcgtgtttatactcgaacccaagcagcagggtgatccacccgttgagtttgctacagaccgcgtcgaagaattattcgagtggttccagtctatacgggaaatcacctggaaaatcgacacaaaggaaaataatatgaagtactgggagaagaatcaatctatagctattgaactcagcgatctggtggtgtattgtaagcccacctcgaagaccaaagacaatctggagaacccagatttcagggagatacggagcttcgttgaaacgaaagctgactcaattatccgccagaaacccgtggacctgctcaaatacaatcagaagggtctgacccgcgtgtaccctaagggacagagagtggattcatccaattacgaccctttccggctctggctatgcggctcgcagatggttgccctgaacttccagaccgcagataagtatatgcagatgaatcacgccttattctcactgaacggacgcaccggttacgtgttacaaccagaatctatgaggaccgaaaagtacgacccaatgcccccagaaagtcagcggaaaatcctgatgaccctgactgtgaaagtgttgggggcccgacacctgcccaagctgggaaggagcattgcttgtccctttgtggaagtggagatttgcggtgcagagtatgataacaataagtttaagacaacggtggtgaacgataacggcctcagccccatctgggcccctacacaggaaaaggtgacgtttgagatatacgaccccaacttggcattcctgcgctttgtggtctacgaagaagacatgttttccgaccccaactttttggcgcacgctacatatccgatcaaagccgtaaaatctgggttccggagtgtacctttgaagaatggctatagcgaggacatcgaacttgcatcacttttggtgttctgcgagatgcgcccggtcctggaatctgaagaggagctctatagtagctgcaggcaacttaggcgccgccaggaagagctcaacaaccagctttttctgtacgatactcaccagaatctcaggaacgctaatagggatgcgctagtaaaagagttctcagtgaatgagaaccagctgcaactgtatcaagagaagtgtaacaaacgcctgcgcgagaaaagggtgtcaaattctaaattttacagctag

SEQ ID NO: 25633 - DNA, 2916 bp, synthetic construct
  misc_feature 1..2916: note = Description of Artificial Sequence: Synthetic coding sequence
  source 1..2916: mol_type = other DNA
atgagcctgaagaacgagccccgggtgaacaccagcgccctgcagaagatcgccgccgacatgtcaaatattatagagaacctcgatactcgcgagttgcacttcgaaggggaggaggtagactacgatgtgagcccatctgacccaaagattcaggaggtctatattcccttctccgccatttacaacacacaggggttcaaggagcccaatatccagacgtatttgtctggctgtccgattaaggcccaagtcctcgaagtggaaaggtttacatccacaacgcgggtgcccagtatcaacttatatacaattgaactgactcacggggaatttaaatggcaggtaaaaagaaagtttaagcacttccaggagttccatcgcgagctgctcaagtacaaagcgttcatccggattcccatcccaactagaaggcacactttcaggcgtcaaaacgtgcgcgaggagcccagagagatgcctagtctgcctcgctcaagcgagaacatgataagggaggagcaattcctaggacgtagaaaacagttggaggactacctgacaaagattctaaagatgccgatgtacagaaattaccacgccacgaccgagtttctggatatctcacagctctccttcatacatgacttgggaccgaagggcatagaggggatgattatgaagcggagtggcggccatagaatccccggacttaactgctgtggtcagggccgcgcttgctacagatggtcaaagagatggctgattgtgaaggactcgttcctcctttatatgaagcccgactctggcgcaatcgctttcgtattgctggtcgataaagagttcaagattaaagtgggcaaaaaagagaccgagactaaatatggcattcggatagataaccttagccggactctcatacttaagtgcaattcatatcggcacgctcgttggtggggcggcgccatcgaggagtttatccaaaagcatggcacgaatttcctcaaggatcatcggttcggctcgtacgcagctatccaggagaatgccctggccaagtggtacgtgaatgctaaggggtactttgaggatgtcgctaacgccatggaggaagctaacgaagaaatattcatcacagactggtggctgagccccgaaatcttcttgaagagacccgttgttgaggggaacagatggcggttagattgcattctgaaacgcaaggcacagcaaggagtccgcatctttatcatgctgtacaaggaagtcgaactcgccttgggtataaattccgagtacaccaagcggaccctgatgaggctccatcctaacattaaggtgatgaggcaccccgatcatgtttccagtaccgtgtacctgtgggcccaccatgaaaagcttgtcattatcgatcagtcagtggcattcgtcggagggattgaccttgcttatggccgctgggacgacaacgaacaccggctcacggatgtcgggagtgtgaaacgggtaactagtgggccttctttgggatcccttccccccgcggccatggaaagcatggagagtctcagattaaaagataaaaacgagccggtgcagaatctacccattcagaagtccatcgatgacgttgattccaaactgaagggcattggcaagcctcgaaagttcagtaagttctctctgtacaagcaacttcataggcatcatctgcacgatgctgattcaatttcaagcatcgactccaccagcagctattttaaccactatagatctcaccataacttaattcatggcctgaagccgcacttcaagctcttccacccctcttcggaaagcgagcagggattgacacgtccacatgccgatacgggaagcatcaggtcactgcagacgggcgttggcgagctgcacggtgaaacgcgcttctggcacggcaaggactactgcaactttgtatttaaagactgggtccagctagacaaaccattcgctgacttcatcgacaggtattcgacccccaggatgccgtggcatgatattgcgtcagctgtgcatggtaaggcagccagggacgtcgctagacacttcattcagagatggaatttcactaaaatcatgaagagcaagtaccgaagcctctcataccctttcctgctgccaaagagccaaaccacggctcacgagctgcgctaccaggtccctggctccgtccacgccaatgtgcagctgctccgatcggccgccgactggagtgctggaatcaaataccacgaggagtctattcatgcagcctacgtacacgtgatcgagaattccaggcactacatttacatagagaaccaattctttatctcttgtgccgacgataaagtggtctttaacaagataggcgatgcaatcgcccagaggatcttaaaagcacaccgtgaaaaccagaagtatcgcgtttacgttgtcatcccactactccccggattcgagggggatatttccactggcgggggaaatgccttacaggccattatgcattttaattaccggaccatgtgccgcggtgagaactcgattctcgggcagctgaaagcagaactagggaatcagtggattaactatatctctttttgtgggctgcgcacacacgccgagttggagggcaatcttgtaaccgaactcatatacgtccactcgaagttgttaatcgccgacgataatacggttattataggctctgctaacattaacgaccggagtatgctggggaagagagattcggaaatggccgtcattgtgcaggataccgagactgtaccatctgtcatggacggaaaagaatatcaggccggtcggtttgcccgagggcttcggttgcagtgttttagatctaagatgacacccggggtggaagacccctag

SEQ ID NO: 25634 - DNA, 1794 bp, synthetic construct
  misc_feature 1..1794: note = Description of Artificial Sequence: Synthetic coding sequence
  source 1..1794: mol_type = other DNA
atgagcctgaagaacgagccccgggtgaacaccagcgccctgcagaagattgctgctgacatgagtaatatcatcgaaaacctcgataccagagagctgcactttgagggcgaagaagtcgactatgacgtgtcaccgtccgacccaaagatccaggaggtctacattccattcagcgcgatctataacacccaaggattcaaggaacctaatatacagacatacctcagcggttgccccataaaggcgcaggtgctcgaagttgaacggttcacatcgacgaccagggtgcccagcataaatctgtacaccattgagttgactcatggggaattcaaatggcaggtcaagaggaaattcaaacattttcaagaatttcaccgtgagctgttgaagtataaggctttcattagaattcctataccaacacgaaggcacaccttcaggagacaaaatgtgagggaagaaccacgtgaaatgccaagcttaccgcggagctctgaaaatatgattcgcgaggaacagttcctaggaaggcggaagcaactggaagactacctgacgaagattctgaagatgccaatgtataggaactaccatgctactaccgaatttctggatatcagccagctttccttcattcatgacctcgggccgaaggggatcgaagggatgatcatgaagagaagtgggggccataggattccaggtctgaactgctgtggtcaagggagggcctgctaccgatggagcaaacgatggctcatcgtgaaggacagctttctcctgtatatgaagcctgactctggtgcaatcgcttttgtgttacttgttgacaaggaattcaaaatcaaagtggggaagaaggagacagaaaccaaatacggcattagaatcgataacctctctaggacattaatcctgaaatgcaactcatatagacatgccagatggtggggcggggccatcgaggaatttattcaaaaacatggcactaatttcttgaaggaccaccggtttgggtcgtatgccgcaatccaggagaatgccctggccaaatggtatgtgaacgcaaagggatattttgaggacgtggccaacgccatggaggaggctaatgaggagatctttattactgattggtggttgtcccccgagattttcctaaagcgtcctgtagtcgaaggaaatcgatggaggcttgactgcatcctcaaacggaaggcccagcaaggtgtgcggatcttcatcatgctctataaagaggtagaactcgcccttggcattaattcagagtacactaagagaacactcatgcgtctgcaccctaacatcaaggttatgcggcaccctgaccacgtgagctcaacggtctacttgtgggctcaccacgaaaaactggtgatcatagaccaaagcgtcgcattcgtcggtgggatcgacctggcttacggacggtgggacgataacgagcaccgcttgacggatgttggttcagtgaagagagtgacttctggtccgtcactgggctctctccccattcctgggccttcagtggtctaccgccaggtttgggagtcctgcatgggaaaacctgatagtggcatggaacgcacaacggctatcagttcgtccaaaaccgggttcaacctcatcaacctgttgctaatctccctgacaggaacgcccaggcccggatgccctggaatgacactgccccttcagagcaccggaagacgccttgtgatgtggcacgttacttcttcctcagctggaacttcccagaaactgtag

SEQ ID NO: 25635 - DNA, 3225 bp, synthetic construct
  misc_feature 1..3225: note = Description of Artificial Sequence: Synthetic coding sequence
  source 1..3225: mol_type = other DNA
atgagcctgaagaacgagccccgggtgaacaccagcgccctgcagaagatcgccgcggacatgtctaatatcatagagaacttagacacgcgagagcttcatttcgagggcgaagaggttgactacgacgtctccccttctgatccgaagatccaggaggtttatatccctttctcagcaatatataacacgcagggcttcaaggaaccgaatatccagacttatctaagtggatgcccaataaaggcccaggttttagaggttgagcggtttacttctacaacacgcgtgcctagcatcaacctctataccatcgagttaacccacggcgaatttaaatggcaagttaagaggaagttcaaacattttcaggagtttcatagggagctgctgaaatacaaagctttcattaggattccaatcccaactagacgccataccttcaggcggcagaacgtccgggaagaacctagagaaatgccatccctgccccggagcagtgagaatatgatcagggaggaacagttcctcggcagaaggaaacagctggaagactatctgactaaaattctcaaaatgccaatgtataggaactatcacgctaccactgaattcctagacatttctcagttgtcatttatccacgacttagggcctaagggtattgaagggatgatcatgaaacgaagtggcggccataggattccaggacttaattgttgcggccagggacgagcatgctataggtggtcaaagcgttggctaatcgtgaaagattcctttctgctgtacatgaagccagattccggggcgatcgccttcgttttactggtcgacaaagagttcaaaatcaaagtggggaaaaaagaaaccgaaacaaaatacggaatccggatcgacaacttgtctagaacacttatcctcaagtgtaacagctaccgccacgcgcgatggtgggggggggccattgaggaattcatacagaaacacggcacaaacttcttgaaggatcaccggttcgggagctacgctgcgatccaagagaatgcactagctaagtggtacgtgaacgctaagggatacttcgaagatgtggcaaacgccatggaggaggcgaatgaggagatctttattactgattggtggctctcacctgaaatttttctcaagagacccgtggtggagggaaaccgatggcgactcgactgcattctcaagcgtaaagcccagcaaggcgttagaattttcatcatgctgtacaaagaagtggagcttgcactgggtatcaatagtgaatacacaaaaagaacactgatgcgtctgcaccctaatattaaagttatgcggcatccagatcatgtatcgagcactgtgtacctatgggctcaccatgagaagctggtgatcatagaccaaagcgtggccttcgtgggaggcatcgacctcgcgtatggtagatgggatgataacgagcaccgtctcaccgacgtgggatcagtgaaaagggtaacaagtgggccaagcctgggaagcctcccccccgcggccatggagtctatggagtcacttcggttaaaagataaaaatgagccagtacagaatttgcctattcagaagagtatagacgacgtggattctaagctgaaaggaattgggaagcctcggaagtttagcaaattttcactgtataagcagttgcatcgccaccatctgcatgatgcggattccataagctcgatcgactcaacatccagctacttcaatcactacagatctcaccataaccttatccacgggctgaaacctcatttcaagctgtttcatccttcctccgagtctgagcaagggttgactagaccgcacgcagacacgggctccatccgatcccttcagacaggagtgggggagctgcatggagagacccgcttttggcatggtaaggactactgtaatttcgtgtttaaagattgggtacaactcgacaaacctttcgccgactttatcgacaggtacagtactccaagaatgccatggcacgatatcgccagcgcagtgcatggtaaggcagccagagacgtggctcgccattttattcagcgatggaactttacgaagatcatgaagagcaagtaccgctccctgtcatatccatttctcctgcctaaaagccagactaccgctcacgaattaagataccaggttccaggctccgtgcatgccaatgtgcaactactgcgcagcgccgccgactggtctgctgggatcaagtaccacgaagagtccatacacgctgcttacgtacacgtgattgagaacagccgtcactatatctatattgagaaccaattcttcatctcgtgtgccgacgacaaggtggtgtttaataaaataggagatgccatcgcccagcggatcctgaaggcccacagagagaatcaaaagtacagagtgtacgtcgttattcctttgctacccggatttgaaggcgacatcagtacaggcggaggcaatgccttacaagccattatgcacttcaattaccggacaatgtgccgaggggagaactcgatactgggccaactgaaagccgaattgggcaaccagtggatcaactatatttccttctgtggattgaggacacacgccgaactcgagggtaacctggtgacggaactgatttacgtgcactccaagttgttgatcgccgacgacaatacggttatcatcggctcagccaatattaacgacagatcaatgttaggcaagcgagattctgagatggcagtgatcgttcaggataccgagacagtgccgagtgtcatggacggtaaagaatatcaggccgggaggttcgcccgaggcctgaggctccagtgtttccgggtggtcctcgggtacctggatgatccttccgaagatatccaggatccggtgtctgataagttttttaaggaagtctgggtttccacagcagctagaaatgctactatctacgataaggtcttccggtgtctgcctaatgatgaggtacataatctgattcagctcagggactttatcaataagccagtgttggcgaaggaggacccgattagagccgaagaagaactgaaaaaaatccgcggatttttagttcagtttcctttttatttcctcagcgaggagagcctgttacctagtgtgggcactaaagaggcaatcgtgcccatggaggtgtggacatag

SEQ ID NO: 25636 - DNA, 3111 bp, synthetic construct
  misc_feature 1..3111: note = Description of Artificial Sequence: Synthetic coding sequence
  source 1..3111: mol_type = other DNA
atgagcctgaagaacgagccccgggtgaacaccagcgccctgcagaagatcgccgccgacatgtccaatatcatagaaaacctggacacaagggagctgcactttgaaggcgaggaggtggactacgacgtgagcccctctgaccctaaaattcaggaagtctacatccccttctctgccatttataacacacaggggtttaaagaaccgaacattcagacctacctatcaggttgtccaatcaaggctcaggtcttagaggtggagagattcacttcgactactagagtgccttcaatcaatctctatacaatcgagttaacacacggtgagtttaagtggcaagtgaagagaaagtttaagcactttcaggaatttcatcgagaactcctcaaatacaaagctttcattaggatacccattccgacgcggaggcataccttccggcgtcagaatgtccgggaagaaccacgggaaatgccttcattaccccgctcttctgagaacatgatcagggaagagcagttcctcgggcggaggaaacagttggaggactacctgacgaagatcctgaagatgcccatgtatcgtaactatcacgccactacggaattcctggacatctcccagctgagtttcatccatgacctcgggccgaagggaattgagggtatgattatgaaacgcagcggaggccacagaatccctgggctgaattgttgcggacagggtcgggcctgttatcggtggtctaaaagatggctgattgtgaaagatagctttctgctgtacatgaagcctgactctggcgccattgcattcgttctgctcgtcgacaaggaatttaagataaaggtcggcaagaaagaaacagagacaaaatacggcatcaggattgacaacctcagtcgcactttgattctgaagtgcaacagctatcgacacgcaaggtggtggggcggcgcaatagaagaatttatccagaaacacggtacaaattttttaaaggatcatcggttcgggagctatgccgcaattcaggagaatgccctggcgaagtggtatgttaacgctaaaggttactttgaggatgtggccaatgccatggaagaagcgaatgaagaaatcttcattaccgactggtggctgtcccctgaaatcttcctgaagagacccgtcgttgaagggaatcggtggaggcttgattgcatactcaagcggaaggcccaacaaggggtaaggatctttatcatgctctacaaagaggtggaacttgcccttgggatcaacagtgaatacactaagcggaccctgatgcgccttcatccaaatatcaaagtgatgaggcatccagatcatgtctcatcaacagtttatctgtgggcccaccatgaaaaattagtcatcattgaccagagcgtggctttcgtcggcggaatagatttggcatatggtcgatgggacgacaacgagcaccggttaacagatgtaggctcagtgaagcgcgtaaccagcggccccagcctggggtcgctgcctcccgcagccatggagagcatggagtctctgagactaaaggacaaaaacgagccagtccaaaatctgcccattcaaaagagtatcgacgacgtggacagcaaactgaagggcatcggcaagccccgtaagttttctaagttttccctctacaagcaactgcatcgtcatcacctgcacgacgccgatagcatttcctcaattgactcaacttctaatacgggctcgattcggtcactgcagacaggagtgggggaacttcacggcgaaacacgcttctggcacggcaaggactactgcaacttcgtgttcaaggattgggttcagttggacaaacctttcgccgactttatcgatagatattcaaccccgagaatgccttggcacgatatcgccagtgccgtacacggaaaggccgcgagagacgtagctcgccacttcattcagcgctggaatttcaccaagatcatgaaatcaaagtatcgaagcctgtcttatccttttcttctcccaaagtcccagacaaccgctcacgagctccgttatcaggttcctggaagcgtccatgccaatgtccagctgttacggtccgctgctgactggtcagctggtattaaataccacgaggagagcatccacgcagcctatgtgcacgttatagagaacagccggcactatatttatatcgaaaaccagttcttcatttcatgcgccgacgacaaggttgtgttcaataaaataggcgacgccatcgcccagagaattctaaaagcccacagggagaaccagaaataccgtgtgtacgtcgtgattcctctgctgcccggcttcgaaggagacatctcaactggcggcgggaacgcactgcaggctattatgcactttaactaccgcaccatgtgtagaggagaaaactctatcctggggcaactgaaagccgaattaggcaaccagtggataaattatatctctttttgtggcttaaggacccacgcagagctcgagggaaaccttgtaaccgaattaatctatgtgcactcaaagctgttaatcgcagacgacaataccgtgatcatcgggagcgctaatattaatgataggagcatgctgggcaaacgggattctgagatggctgtaatagttcaggacaccgagacggtccctagcgtaatggacggcaaggagtaccaggcgggccgttttgcacgcggcctgcgactgcagtgtttccgcgttgtgctggggtacttggatgatccttccgaggatatacaggaccccgtaagtgacaagttctttaaggaggtatgggtgtccactgcggccaggaatgccacaatttacgataaggtgtttagatgtctgcccaatgatgaagtacacaacctgattcagctcagggattttatcaacaaaccggttctggcgaaagaagacccaatcagggctgaggaagaattaaaaaaaatcaggggattccttgtccagttcccattctactttctttcagaggagtcccttttaccctccgtcggaaccaaggaagctatcgtgccaatggaggtctggacatag

SEQ ID NO: 25637 - DNA, 429 bp, synthetic construct
  misc_feature 1..429: note = Description of Artificial Sequence: Synthetic coding sequence
  source 1..429: mol_type = other DNA
atgagcctgaagaacgagccccgggtgaacaccagcgccctgcagaaaatcgccgcagatatgtccaacattatcgagaacctggatacacgagagctgcattttgagggcgaggaagtagattacgacgtttcgccatcggatcccaaaattcaggaggtctatattccgtttagcgccatctacaatacgcagggattcaaagagccgaacatacagacatacctgtctgggtgtcctattaaggcccaggtgctggaagtcgagcgttttaccagcacaactagagtaccatctatcaatctgtacacaatcgagttaacccatggagagtttaaatggcaggtgaaacgaaagtttaagcactttcaggagttccatcgtgaactcctcaagtacaaagctttcattaggatccctataccctag

SEQ ID NO: 25638 - DNA, 2580 bp, synthetic construct
  misc_feature 1..2580: note = Description of Artificial Sequence: Synthetic coding sequence
  source 1..2580: mol_type = other DNA
atgtacagcggcgccggccccgccctggccccccccgcccccccccctccaattcagggctatgcatttaaacccccgccccgcccagacttcggtacttctgggcgaactataaagctccaggccaactttttcgagatggacattcccaaaatagacatttatcattacgaactcgacattaagcccgaaaaatgcccccgccgcgtgaatcgagagattgttgaacacatggtgcagcattttaagactcaaattttcggagatcgtaagccagtctttgatggccgcaagaatctatacacagccatgcctttgcctatcgggagagataaagtcgaactcgaggtgacattacctggcgagggcaaggatagaatttttaaggtctccattaagtgggtgtcgtgcgttagtctgcaggcgttacacgacgcactgtcagggagactccccagcgtcccctttgagactatccaggctctcgatgtcgtgatgcggcacctgccatcaatgcggtacacccccgtggggcgctccttttttacagctagtgaggggtgttccaaccccctgggagggggacgtgaagtctggtttggttttcaccagtcagtccgccccagtctctggaaaatgatgctgaacattgacgtgagtgctaccgcattctacaaagctcagcccgtcatagagtttgtgtgcgaagtgctcgatttcaagagcatagaggagcagcagaaacccctgactgactcccagagggtgaagttcacaaaggaaatcaaaggattgaaggtggaaatcacacactgcggtcagatgaaaagaaaataccgcgtgtgcaacgtaaccaggcggcctgcctctcaccagacgttccctttacaacaagagtccgggcagacagttgagtgcaccgtggcccagtatttcaaggataggcacaagctcgtcttgagatacccccatctcccttgtttacaagttggccaggaacaaaaacacacatacctcccattggaagtatgcaacatcgtcgccggccagaggtgcatcaagaagctgactgataatcagacttccacgatgattcgtgctaccgctcgatccgccccagaccgccaggaggagatctcaaaactgatgagatctgcatccttcaatacagatccgtatgtcagagagtttggtattatggtgaaggacgaaatgacagatgtgacgggccgtgttcttcagcctccctcaatcctatacggcggtagaaataaggccatagctacccccgtgcagggggtgtgggatatgagaaacaagcagtttcacaccggaattgaaattaaagtgtgggcgatcgcttgcttcgcacctcagagacagtgtacagaagtccacttaaagagcttcaccgaacagctgagaaagatcagcagagatgccggcatgccaattcaaggacagccctgtttttgcaaatatgcccagggagctgatagtgtggaaccaatgttccggcacctgaaaaatacctatgctggacttcagctggtggtcgtgattctgccaggcaagactccagtgtacgctgaggttaagcgtgtgggcgacaccgtcctaggaatggcaactcagtgtgtgcagatgaagaacgtccaaagaaccacaccccagacactttcaaatctttgcttgaaaattaacgtcaaactgggtggagtgaacaatattttgttaccccagggaagacccccggtcttccagcagcccgtcatctttttaggggcagacgttacccatccaccagcaggggacggtaaaaagccctccatagccgccgtagtgggtagcatggatgcccacccaaaccgatactgtgcaacagtaagggttcaacagcaccgccaagaaatcattcaggatttggcagccatggtcagggaacttttaatccagttttacaaaagtactcgctttaagcctactagaatcatcttctatagggacggggtgtcagagggccagtttcaacaggtcttgcatcacgagctgttagccatacgggaggcttgtattaagctcgagaaagactatcagcccggcatcacattcatcgtggttcaaaaacggcatcacacacgactgttttgtactgataagaatgagcgggtcggcaagtctggcaacattccggcagggacaaccgtagacacaaaaatcacgcaccccaccgagttcgatttctatctgtgttcccatgcaggcatacaagggacgagcagaccgtcccactatcatgtactgtgggacgacaatagattcagctcagacgagttgcaaatcctgacctatcagctgtgtcacacatatgtgcgatgcacacgaagcgtttccatccccgccccggcctattatgcccacctggtcgcctttcgggctcggtatcatctggtggacaaggagcatgatagcgcggaaggatcccatacatccgggcagtctaatggccgcgaccaccaggccctagccaaggctgtgcaagttcaccaggatacgctccgcacaatgtacttcgcatag

SEQ ID NO: 25639 - DNA, 1926 bp, synthetic construct
  misc_feature 1..1926: note = Description of Artificial Sequence: Synthetic coding sequence
  source 1..1926: mol_type = other DNA
atgctgagcggcatcgaggccgccgccggcgagtacgaggacagcgaactgcgctgcagggttgctgtggaagagctaagccccggaggccagccaaggcgacggcaggccttgcggacagccgagctgtcattgggccgcaatgaaaggagagaactgatgttgcgactgcaagcgcccgggcccgctggcagacccaggtgcttccccctcagagccgcccgattgttcactaggttcgccgaagccggacggtcaacattgaggctccccgcgcacgacacacccggcgctggcgccgtgcagctgctcctgagcgactgtccacccgatcgacttcgacggtttctccggactctccgcctgaagttggccgccgcaccggggccgggaccagcaagtgcccgcgctcaactgctcgggccccgtcctagagactttgttaccataagtccagtgcagcctgaggagcgcaggttacgggcagctacaagagtgccggacaccacactcgtaaagaggccagtggagccacaagctggggcggagcctagcaccgaagccccccgttggccgttgcccgttaagcgtctcagccttccgtcaacaaagccccagctgtcagaagaacaggccgcagtactcagggcggtcttaaagggtcagagcattttttttaccggctctgccgggactggaaaatcatacctattgaagagaattcttggctctttgcctcccacgggcaccgttgcaaccgcatctacgggagtggccgcctgccacattgggggtacgacactacacgcttttgcaggcatcggatctggacaggctccactcgcccagtgtgttgctctagctcagagacccggagtgaggcagggatggctgaactgccagcgattggtgatagacgagatatccatggtagaggccgacctattcgacaagctggaggccgtggcccgagccgttagacagcaaaacaaaccctttggaggaatccagttgatcatttgtggggatttcctgcagctccctccagtgacaaagggatcgcaaccgccacggttctgcttccagtccaaaagttggaaacgttgcgtcccagtgaccctggagcttaccaaggtgtggcgccaagcggaccaaacttttatttccttactgcaggcagtaagactaggcagatgtagcgatgaggtgaccagacagctgcaggcaaccgcctcccacaaggtgggtcgcgatgggattgtcgctactagattgtgcacgcatcaggatgatgtggctctgacgaatgagaggcgcctacaggaactgcctggcaaggtgcacagattcgaagctatggactcgaaccctgagctcgcaagcaccctcgatgctcagtgccctgtaagccagcttcttcaactcaagctcggggcacaagtgatgctagttaagaatctgtcagtctcccgcggactagtgaacggtgccagaggcgttgtggtgggcttcgaggccgaaggtagaggcctacctcaggtaaggtttctctgtggggtgacggaggtgattcacgccgaccgttggactgtacaagctactggcgggcagctgctgtcccgtcagcaactgcccctccagctggcttgggcaatgtcaattcacaagtcccagggtatgaccctcgattgtgttgagattagcttaggtagggtctttgcctctgggcaggcttatgtggccctaagtagagcccgcagcttgcaaggcctgagagtgttggactttgaccctatggctgtacgctgcgaccctagggtgcttcatttttacgccactctgcgtaggggaaggtctctgagtctcgagagtccggatgacgacgaggccgcaagcgatcaggagaatatggatcccatattgtag

SEQ ID NO: 25640 - DNA, 2124 bp, synthetic construct
  misc_feature 1..2124: note = Description of Artificial Sequence: Synthetic coding sequence
  source 1..2124: mol_type = other DNA
atgctgagcggcatcgaggccgccgccggcgagtacgaggacagcgaactgcgctgtagagtggccgtggaagagctgtctcctgggggtcaaccgcgacggaggcaggctttgaggacagccgagctaagcctgggcagaaacgaaaggcgagagctcatgctgagactccaagccccaggccccgctggacgaccacgctgttttccgttacgcgccgcaaggctgttcacccgtttcgctgaggccggtaggtctactctccggttacccgctcacgatacccccggtgccggcgctgttcaactactgctgtcagactgtcctcctgacaggctccggaggtttctgaggactcttcggctgaaactggctgcagctccaggaccaggccctgcaagcgccagggcacagcttcttggaccacgacccagggattttgtgacaatctcacccgtccaacccgaggagagaaggctgcgggccgctacccgtgtacctgatactacgctcgttaaaaggccggtagaaccacaagctggtgccgagccatccaccgaggctccgaggtggcccctcccagttaaacgattgtctctgcctagcaccaagccacagctgagcgaagaacaagctgccgtcttacgggccgtgttgaagggccaatcaattttctttaccgggagcgccggcacaggcaaatcttacctcctgaaacgcatcctaggctccttgccaccaactggtaccgttgccactgccagcacaggagtcgccgcgtgtcacatcggaggcacgactctgcatgcctttgctgggattggatctgggcaggccccactggcgcagtgtgtcgcgctggcccaacggcccggcgtccgccagggatggctgaattgtcagaggctggtgatagatgaaattagcatggtggaagcggatctgtttgataaactagaggccgttgccagggccgtgcgccaacaaaacaagccattcggagggatacagcttattatttgtggcgactttctgcagctaccgcccgtgacgaaaggtagccagcctccacggttttgctttcagtctaaatcttggaaacgatgcgtcccggtgacattagagctgaccaaggtttggcggcaggccgatcagaccttcatttctttactgcaggcagtgaggctcggacggtgtagtgacgaggtgacacggcagttacaagctactgctagccacaaggtaggacgagacggcatagtcgctacccgactttgcacccaccaggacgacgtggccctgacgaacgagcgcagactgcaggaattgcccgggaaagtgcacaggttcgaagccatggactccaatccggaactggcctctacactagacgcccaatgccccgtgagccaactgctccagctcaagctgggcgcccaggtgatgctcgtgaaaaacctgagcgtgtctcggggcctcgtgaacggcgccaggggtgtggtagtcggtttcgaagctgaaggaagaggactgccacaggttcggttcttgtgcggcgtcaccgaagtgatccacgccgaccggtggaccgtgcaggcgacaggtggacaactgctctcacgtcaacagctacccctacaactcgcttgggccatgagtatacataagtcccagggcatgacccttgactgtgttgaaatttctcttggaagagttttcgcgtccggtcaggcttacgtggcacttagtagagctaggtcgttgcaggggctgagggtgctggattttgatcctatggccgtgcgttgcgaccccagggtcctgcatttctatgccaccctccgccgaggcagaagcctctccctggccgccgaagggcgaggtaatgaagataggtgttccggtagtagcatcagagccctggggggcgattggtgggggctccggctcggcgccgccagtaaacagcggaccgagctgcgatgtgttagtactgctaggccaagcttggcacaaccaagaacaaacactctccagtcgttaaccaaggaacataagcttcaaaacgtacatccttatttcaagctgctgttccagggtatcaattctgtctgggggcactag

SEQ ID NO: 25641 - DNA, 1926 bp, synthetic construct
  misc_feature 1..1926: note = Description of Artificial Sequence: Synthetic coding sequence
  source 1..1926: mol_type = other DNA
atgctgagcggcatcgaggccgccgccggcgagtacgaggacagcgagctccgatgtagggtggctgtggaggagctgtcaccaggtgggcaacctcgtaggaggcaggccctgagaaccgcggaattgtctcttgggagaaatgaaaggcgcgaactgatgctaagattacaggcccccggcccagctggccggcctaggtgtttccctctgcgggcggctaggctgtttacccgttttgccgaggcaggccggtctaccctgcggttacctgcccacgacacacctggtgcaggggctgtacagctccttctgtcagattgcccaccggacaggctccgccgatttcttcgtacccttaggctcaaactagccgccgctcccgggccaggcccggcctcagctcgcgcacagctgctcgggcctagaccccgtgatttcgtgacgatctcccccgtgcagccggaggaacgaagactgcgggctgccacaagggtgcctgacaccaccctggttaagagacctgttgaaccccaggcaggcgccgagccatcaactgaggcacctcgatggcccttgcctgtcaagcgtctgtcactgccaagcactaaacctcaacttagcgaagagcaagctgctgtactgcgggccgtgttgaaggggcagagcatcttcttcactggttccgctggcacgggcaagagctacctcttaaaacgcatcctgggctcacttccccctactggcaccgtggccacggcaagcactggagtagccgcctgtcacataggcggcacgacactccatgcattcgccggtataggttctggccaggctcccctcgctcagtgtgtggcacttgcacagcgtccaggtgtaaggcagggctggctcaactgccaacgattggttatcgatgaaatctccatggtagaagcggatctgttcgataaacttgaagctgtggcccgtgccgtccgccagcaaaacaagccatttggggggatccagctgatcatttgcggcgactttcttcagttaccaccagtcacgaaagggtcccaaccacccaggttttgctttcagtctaaatcatggaagcgctgcgtgccagtcacactggagctgaccaaggtgtggcggcaggcagatcagactttcatatctttgttacaggcagttaggctggggaggtgcagcgacgaggtcaccaggcaacttcaggccactgcgagccataaggttggaagagatggtatcgtcgccacaaggctatgcacacatcaggatgatgtagcactaacaaatgaaaggagactgcaggagctgcccggaaaggtgcaccggtttgaagctatggacagcaatcctgaactagccagcaccctggatgctcagtgcccagtgagtcagctgttacagctgaaattgggtgctcaagtcatgctggttaagaatctctccgtctcacggggactggtgaacggcgctaggggcgttgtagtcgggttcgaggctgagggtagaggactgccccaggtgagattcctgtgtggggtgaccgaagtgatccacgccgataggtggaccgttcaagctacaggagggcagctgctgagcagacagcagttgccgttgcagctggcttgggccatgagcattcataagagtcagggtatgacactcgactgcgtggaaatttcactaggaagagtctttgcctccggacaagcctatgttgcactcagccgcgccaggtctttgcaagggctgcgtgtcctggactttgatcctatggcggtacggtgtgatccaagggtgttacacttctacgctactctccggagaggaagatccctttccctggaaagtcctgatgacgacgaggcagctagcgaccaggagaatatggaccctatactctag

SEQ ID NO: 25642 - DNA, 801 bp, synthetic construct
  misc_feature 1..801: note = Description of Artificial Sequence: Synthetic coding sequence
  source 1..801: mol_type = other DNA
atgctgagcggcatcgaggccgccgccggcgagtacgaggacagcgaactgaggtgccgagtggccgtggaggagctgtcacccgggggccagcctagaaggcggcaggccctccgcaccgccgagctgtctctaggaaggaatgagcggagagagctgatgctcaggcttcaggctccaggacctgctggacgcccaagatgctttcccttgagggctgccaggctgttcacgaggttcgctgaagccggtcggagcacccttaggctgcccgcgcatgatacccctggagccggggctgttcagctgcttttgtcagactgcccgcctgataggctccggcgtttcttgaggacccttaggctgaaattggctgccgctcctggccctggccccgcttccgccagagctcagctgctcggaccccggccaagggatttcgttacaatcagtccagttcaaccggaagagagaagactgagagctgccacacgcgtgcccgatacgacactcgttaagcgccctgtggagcctcaggctggagctgagccatctactgaagcaccaaggtggccgctgcccgtgaaacgactgtccctgccaagcacaaagcctcagctctccgaagagcaggcagctgtgttgcgagccgttcttaagggccagtctatattcttcactgggagcgctggctccgggggaagagaagaggtaggcggccagtggtggggaggtatagaggagcagggtgatctgtctaattttgcacccgtgcaggagcagggcagtcacatctgctag

SEQ ID NO: 25643 - DNA, 987 bp, synthetic construct
  misc_feature 1..987: note = Description of Artificial Sequence: Synthetic coding sequence
  source 1..987: mol_type = other DNA
atgagcatgctggccgagcggcggcggaagcagaagtgggccgtggacccgcagaatacagcctggtcaaacgacgactcaaaatttggacaacggatgcttgagaagatgggctggagtaagggcaagggactcggggctcaggaacagggagcaaccgatcatataaaagtccaagtgaaaaataatcacttaggcctaggagccactatcaacaatgaagacaactggatcgctcaccaggacgatttcaatcaactgctagcagaactgaatacatgtcacggccaagagacaaccgactcctctgataagaaggagaaaaagagtttttccctggaagagaaaagtaagatctcgaagaatagagtccactatatgaaattcacgaaaggaaaggatctcagtagccggtctaaaactgatcttgattgcatcttcggcaagcgacagagcaagaagactcccgagggcgacgccagtccaagtacccctgaggagaatgagactacaacaacaagtgcctttacaatccaggaatactttgcaaagaggatggccgccttgaaaaataagccacaagttccagtgcctggcagcgacatttcagagactcaggttgagaggaaaaggggaaaaaagcggaacaaggaagctacggggaaagatgttgagtcctaccttcaacccaaggcgaagagacacactgaagggaaacccgaacgagctgaagcccaggaaagggtcgccaagaaaaaaagcgctcccgctgaagagcagctccggggcccttgctgggatcaaagctcaaaagcctcagcgcaagatgctggcgaccacgtacaaccaccagaaggaagagattttactctcaaacctaaaaaacgcaggggaaagaagaagctccagaaacctgtcgagatcgcagaagacgccactctggaggaaaccctcgttaaaaagaaaaaaaaaaaggacagcaagtag

SEQ ID NO: 25644 - DNA, 519 bp, synthetic construct
  misc_feature 1..519: note = Description of Artificial Sequence: Synthetic coding sequence
  source 1..519: mol_type = other DNA
atgctggccgagcggcggcggaagcagaagtgggccgtggacccccagaacactgcttggtccaacgacgacagtaagtttggccagagaatgctagaaaagatgggatggagcaaagggaagggcctgggcgctcaggaacagggagctaccgatcacatcaaggtacaagttaaaaataaccacttaggcctgggggctaccattaacaacgaggataattggattgcccaccaagatgacttcaatcagctccttgccgagctgaacacgtgtcatggccaggagacaacagactcctctgataaaaaggagaagaagagtttctccctagaagagaaaagcaagatatccaagaatcgcgttcattacatgaagttcacaaagggcaggtgtcagtcattgcatagccgcggcgaaaggaaccacgacaaccaaagacttcaccatcccggagtcttatgtcaggcagatggcagcacagaggagcaggcgccggggagttcaagtcgcgtttag

SEQ ID NO: 25645 - DNA, 525 bp, synthetic construct
  misc_feature 1..525: note = Description of Artificial Sequence: Synthetic coding sequence
  source 1..525: mol_type = other DNA
atgagcatgctggccgagcggcggcggaagcagaagtgggccgtggaccctcaaaacactgcgtggtcgaatgatgactctaaattcggtcaaaggatgcttgaaaaaatgggctggtccaaaggaaaggggcttggcgcgcaggaacaaggcgctaccgaccatattaaggtccaggttaagaacaaccaccttggactgggtgccactatcaataatgaagacaattggattgcgcaccaggatgattttaaccagctgctggcggaactgaacacttgtcacgggcaagaaactactgatagtagcgataaaaaggaaaagaaatcctttagcctggaagagaagtctaagattagcaagaaccgggtgcactatatgaaattcacaaagggtagatgccagagtctccactcccgcggggagcggaatcacgataatcaacggctgcaccatcccggggtgttgtgtcaggcagatggcagcaccgaggagcaagctcctggttcctctagtagggtgtag

SEQ ID NO: 25646 - DNA, 972 bp, synthetic construct
  misc_feature 1..972: note = Description of Artificial Sequence: Synthetic coding sequence
  source 1..972: mol_type = other DNA
atgcccgtgcacagccggggcgacaagaaggagaccaaccaccacgacgagatggaagtggattacgctgaaaatgaagggagctctagtgaggacgaggacacagagtctagctcagtttccgaggacggggactcaagtgaaatggatgatgaagattgcgagaggagaagaatggagtgtctcgacgagatgtccaatctggaaaagcaattcacagatcttaaagatcagttgtacaaagaaaggcttagtcaggtggatgcaaagcttcaagaggtcattgccgggaaagcccctgagtatttagaacccctggccaccctccaggagaatatgcagatacgcaccaaggtggctgggatctatcgggaactctgccttgagtcagtgaagaacaaatacgaatgcgaaatccaggcctcgcgccagcactgcgagagcgagaagttattgttatatgacaccgtgcagtcagaactggaggagaagattagacggttagaggaggatcgccatagcattgatatcacatctgagctgtggaatgatgaattgcagagcaggaaaaaacgtaaagatccgtttagtcccgataaaaagaaaccagtagtcgtttcgggaccctacatcgtttatatgctgcaggaccttgacatactggaggactggacaaccattaggaaagccatggccacgctggggccccatcgggtcaaaaccgagccgccagtgaagctggaaaaacatctccattcagcacggtccgaagaggggcgactttactatgacggagaatggtacatcagaggacagacaatctgcatcgacaagaaagacgagtgtccaaccagtgccgtgattactacaattaaccacgatgaagtttggtttaaaagacctgatggcagcaaaagcaagctctacatctcccagctgcagaaagggaagtattcaataaaacactcttag

SEQ ID NO: 25647 - DNA, 666 bp, synthetic construct
  misc_feature 1..666: note = Description of Artificial Sequence: Synthetic coding sequence
  source 1..666: mol_type = other DNA
atgcccgtgatgcggctgttcccctgcttcctgcagctgctggccggactggctttaccggccgtccccccccagcagtgggctctcagcgcaggaaacggcagctccgaagtggaagtagttccttttcaggaggtgtggggcaggtcttactgtcgagccctggaaagactcgtggatgttgtgtctgagtacccgtcagaggtggagcacatgttttcccctagttgcgtatccctgcttcgatgcacaggctgctgtggcgatgagaatctgcactgtgtgcccgtggagactgctaacgtgacaatgcaactattgaaaatacgaagcggtgatagaccaagctatgtcgagcttactttctcccagcacgtccggtgcgagtgcaggcattctcctggccggcagagtccagatatgcccggggacttcagagctgatgctccctcgttcctaccgccccgtcgatctctgcccatgctttttagaatggagtgggggtgtgctctgaccggcagccaaagtgcagtgtggccgtcctcccctgtcccagaggagattccccggatgcaccccgggagaaacggaaagaagcagcagagaaaaccattacgggagaagatgaaacctgaacggtgcggagatgccgtccctagacgatag

SEQ ID NO: 25648 - DNA, 450 bp, synthetic construct
  misc_feature 1..450: note = Description of Artificial Sequence: Synthetic coding sequence
  source 1..450: mol_type = other DNA
atgcccgtgatgcggctgttcccctgcttcctgcagctgctggccgggctggctctacctgccgtgccgccccagcaatgggcgctctccgccgggaacggttcttccgaagtggaggtggtgcccttccaggaggtttggggtcgcagttactgtcgggcactcgagcgacttgtggatgttgtatccgaatacccctccgaggtcgaacacatgttctccccgtcatgtgtttctctgctgcggtgtacggggtgctgtggagacgaaaatctccattgtgtgccggttgaaaccgccaatgtaaccatgcagctgctaaaaataagaagcggggacaggccctcatatgtcgagcttacttttagccagcatgtgaggtgtgagtgcagacccttacgggagaaaatgaagccagagaggtgcggggacgcagttcctagaagatag

SEQ ID NO: 25649 - DNA, 513 bp, synthetic construct
  misc_feature 1..513: note = Description of Artificial Sequence: Synthetic coding sequence
  source 1..513: mol_type = other DNA
atgcccgtgatgcggctgttcccctgcttcctgcagctgctggccgggctggccctgccggccgtccctcctcagcagtgggccttaagcgcgggaaatggctccagcgaggtcgaggttgtcccatttcaggaggtatggggcaggtcctattgcagagctttggagcggttggtagatgtggtttcggaatacccatccgaagttgaacacatgtttagtccgtcctgtgtatcgctgctgcgatgcactggatgctgcggagatgagaacttgcactgtgtccccgtcgaaacggcaaacgtgaccatgcagctccttaagatccgcagtggtgatagacccagttatgtcgaacttactttcagccagcacgtgaggtgtgaatgtaggcccctcagagagaagatgaaacccgagcgcaggcggccaaagggccggggcaaaagacggagagaaaagcaaagaccaaccgattgccatctgtgcggtgacgcagtcccacggaggtag

SEQ ID NO: 25650 - DNA, 477 bp, synthetic construct
  misc_feature 1..477: note = Description of Artificial Sequence: Synthetic coding sequence
  source 1..477: mol_type = other DNA
atggccctggaggtgctgatgctgctggccgtgctgatctggaccggggcggaaaaccttcatgtgaaaattagctgctccctggattggctaatggtctctgttatcccagttgccgagtctagaaatctgtatatctttgccgacgaactgcacctggggatggggtgtcccgcaaaccgaattcacacctatgtatacgagtttatttaccttgtcagagattgtgggattcggactagggtagtctctgaggaaaccttgctcttccagacagagctgtacttcacaccccgcaatatcgaccacgacccccaggagatacatctggaatgttccacttcacgcaagtccgtgtggcttacacctgtgagcacggagaatgagattaagctcgacccgagcccctttatcgcggattttcagacaacagcagaagagctcggcttgctcagcagctcccccaaccttctatag

SEQ ID NO: 25651 - DNA, 1188 bp, synthetic construct
  misc_feature 1..1188: note = Description of Artificial Sequence: Synthetic coding sequence
  source 1..1188: mol_type = other DNA
atgcgggccctgctggcccggctgctgctgtgcgtgctggtggtgtcggactccaagggcagcaacgagctacaccaagtaccgtataagtccaaaacctgctacgaaggcaatggacacttttaccgtggcaaagcttcgactgacaccatgggcagaccatgtctcccatggaacagcgcaaccgtgcttcagcagacttatcatgcccataggagtgacgcactccagctgggactggggaagcataattattgcaggaaccccgataatcggcgtcgaccttggtgttacgttcaagttggactgaagctgttagtccaagagtgcatggtacacgactgcgctgacggcaagaaacccagtagtccaccggaggagttgaagttccaatgcggacagaagaccctcaggccccgattcaagataataggcggcgaatttacaacaatcgaaaatcagccctggttcgctgccatctatcggcgccacagaggaggctccgttacttatgtatgcggggggtcactgatctcaccttgttgggttatctcagccacacattgcttcatcgactatcctaagaaggaggactacattgtctacctgggtcgttctcgcctgaacagcaacacccagggggagatgaagttcgaggtggagaacctgatcctgcataaggactactctgctgatacattggcccaccataacgatattgccctcctcaaaattaggtctaaagagggaaggtgtgcccaaccaagtcgaaccatccagacaatctgtttaccatcaatgtataatgatcctcaattcggcacttcctgcgaaatcactggctttggaaaagagaactcgaccgactatctctatccagagcagttgaagatgactgtggtgaaacttatatcccaccgggaatgccagcagccacactattacggatctgaggtgactacaaaaatgctgtgtgctgctgacccgcagtggaaaacagattcatgccagggggactctggtggaccactcgtgtgcagcttgcaggggagaatgaccctgaccggcattgtgagttggggccgcggatgtgcccttaaagacaaaccgggagtttatactagggtgagtcatttccttccctggattagatcccataccaaagaggagaatggcctcgccctctag

SEQ ID NO: 25652 - DNA, 1188 bp, synthetic construct
  misc_feature 1..1188: note = Description of Artificial Sequence: Synthetic coding sequence
  source 1..1188: mol_type = other DNA
atgcgggccctgctggcccggctgctgctgtgcgtgctggtggtgtcagacagcaagggatctaatgagcttcatcaggtcccctataagagcaagacctgttatgaaggtaatggccatttctatcgcgggaaggcctctactgataccatgggacgcccctgcctgccgtggaactcggccactgtgctacagcagacataccatgcacaccggagtgatgcgctgcagctggggttaggtaaacataactactgtaggaatccagataacaggagaaggccatggtgttatgtgcaagtggggctgaagctcctggtccaggagtgcatggtgcacgattgcgccgatggaaagaagccttcttctcctcctgaggagcttaagtttcagtgtgggcaaaaaacactgcggcctcgttttaagatcattggtggggagtttacaaccatcgaaaaccaaccctggtttgcggccatttataggcgtcaccgggggggatcagtgacatatgtctgcggtggctctctcatcagcccatgctgggtaatctctgctacacattgtttcattgactacccaaaaaaggaagattacattgtataccttggtcgcagtagactgaattcaaacactcaaggagagatgaagttcgaggtggagaatctgatactacacaaagactacagtgccgacaccctggctcaccataacgacatcgcactcctgaaaattagaagtaaagagggacggtgtgcacagcctagcagaacgatccagacgatctgtctgccttccatgtataacgacccacagttcggcactagttgtgaaatcacagggttcggaaaagagaactcaacggactacctttatcctgagcagctcaaaatgacagtcgtgaagctaatttcgcaccgtgagtgtcagcagccccactattatggttccgaagtgaccacgaaaatgctctgtgcggccgatccacagtggaaaacagactcctgtcagggcgacagcggagggcctttggtgtgtagtctgcagggccgaatgactctgacaggcatcgttagctggggcaggggctgcgcgctgaaagataagccaggcgtgtacactcgcgtttcccatttcctgccatggataaggagtcacacaaaggaggagaatggactggcactgtag

SEQ ID NO: 25653 - DNA, 1296 bp, synthetic construct
  misc_feature 1..1296: note = Description of Artificial Sequence: Synthetic coding sequence
  source 1..1296: mol_type = other DNA
atgcgggccctgctggcccggctgctgctgtgcgtgctggtggtgagcgactctaagggttccaatgagctgcaccaggtgcctagcaattgtgactgtctcaatggcgggacatgtgtaagtaacaagtatttctccaatatccattggtgcaattgcccgaaaaagttcgggggccaacactgtgaaatcgataaatccaagacgtgttacgagggcaacggacacttttataggggcaaggccagtacagataccatggggagaccttgcctgccatggaatagtgcaaccgtcttacagcagacataccatgcccaccgatctgacgcgcttcagctaggactcggaaagcataattactgccgcaatcccgataaccggagacgaccatggtgctacgtacaggtaggactaaaactcctcgtacaggagtgtatggtgcatgattgcgccgacggtaagaagcctagcagtcctccagaagaactcaagtttcagtgcggccagaagaccctgcggccgcggtttaagatcatcgggggagagttcactaccatcgaaaatcagccctggtttgccgccatctatcgacgccatagagggggctctgttacctacgtctgcggcgggtccctgatctccccctgctgggtgatcagcgccactcactgtttcattgactatccaaagaaggaggattacattgtctaccttggaagatccagactgaactccaatactcaaggtgagatgaagttcgaggtggaaaacctcatcctgcataaagattacagcgcggacacactggcacatcacaacgacatagcactcctgaagattcggtccaaggaaggccgctgcgcccagccaagcagaacaattcaaacgatttgcctgccgtccatgtacaatgacccacagttcgggacctcttgtgagattaccggatttgggaaagagaactcaaccgattacctttaccccgagcagcttaaaatgaccgtggttaaattaattagtcaccgtgagtgccaacagccacactattacggcagcgaagtgacaaccaagatgttgtgtgccgcagatcctcaatggaagactgacagctgtcagggcgatagcggaggccccttggtctgctctcttcagggcaggatgacactgactggcatagtgagctgggggcgaggatgcgctttgaaggacaagcccggggtttacacccgagtgtctcactttctcccttggattcgaagtcacactaaggaggagaatgggctggctctgtag

SEQ ID NO: 25654 - DNA, 1245 bp, synthetic construct
  misc_feature 1..1245: note = Description of Artificial Sequence: Synthetic coding sequence
  source 1..1245: mol_type = other DNA
atggtgttccacctgcggacccggtacgagcaggccaactgcgactgtctgaatggagggacatgcgtgtctaacaagtatttttcaaacatccactggtgcaattgccccaagaaatttgggggccagcactgtgagattgataagtctaaaacctgttatgaaggaaatgggcacttctatcgaggcaaggcctcgaccgatactatggggcggccgtgcttgccctggaacagcgccacggttctgcagcagacctatcacgcccaccgaagtgacgctctccagttgggactggggaaacacaattattgccggaatcctgataaccgaagaagaccttggtgctatgtgcaggttggacttaaactcctggtccaggagtgcatggtacacgactgcgctgatggaaagaaaccgagctccccgcctgaggaactgaaatttcagtgtggacaaaaaaccctgaggccacgctttaaaattatcgggggtgagttcacgaccattgagaaccagccgtggtttgccgctatttaccgccggcatagaggagggtccgtgacctatgtttgtgggggtagtctgatttccccgtgttgggttattagtgccactcactgcttcattgattaccccaagaaagaggattatatcgtgtacctgggccgatcccgccttaactccaacacacaaggggaaatgaagttcgaggtcgaaaacttgatcctacacaaagactactctgccgataccttagctcaccacaacgatattgcgcttcttaaaatccggtccaaagaaggtcggtgtgcccagccttctcgcactatccaaactatttgcctccccagtatgtacaacgatccccagttcgggacgagctgcgagattacgggtttcggaaaagaaaatagcaccgattatctgtacccagaacagttaaaaatgaccgtggttaagctcatttcgcacagagagtgtcagcagccccactattatgggagcgaggtcactactaagatgctgtgtgcagccgatccacagtggaaaacagattcatgccagggcgattccggaggaccacttgtctgtagcttgcaaggtcgaatgactctcacaggtatcgtcagttggggccggggttgcgcccttaaagataaacccggggtatacacccgtgtgtcacacttcctgccttggatccgctctcatacaaaagaagagaacgggctggctttatag

SEQ ID NO: 25655 - DNA, 3984 bp, synthetic construct
  misc_feature 1..3984: note = Description of Artificial Sequence: Synthetic coding sequence
  source 1..3984: mol_type = other DNA
atggaggcccccctgcagaccggcatggtgctgggcgtgatgatcggcgctggagtggctgtcgtagtgacggcagtcctgatattactggtagtgaggaggctgcgcgtacctaagactccggctccagacgggcctcgctatcggtttaggaagagagataaggtgttattttatggccgtaaaattatgagaaaagttagccagagtacaagctcactcgttgacactagtgttagcgccacgtccagacctcggatgcgaaagaagttgaaaatgttgaatatcgctaaaaaaatcctgaggattcagaaagaaacgcctaccttacagagaaaggagcccccccccgctgtcctcgaagcggacctgactgagggtgacctggctaacagtcatttgccatctgaagtcctgtacatgctcaagaacgtcagagtcctgggccactttgaaaaacctctttttcttgagctgtgtaggcacatggtgtttcaaagactcggtcagggcgattacgtttttcgtcctgggcagcccgacgcctctatatatgtggtgcaggacggattgctagagttgtgcctgccaggacccgacggtaaggaatgtgttgtaaaggaagtggttcccggtgattcggtcaattcattactatcaatcctcgacgtgatcacaggacaccagcatccccagcgaaccgtgagtgccagggcagcccgtgactccactgttctgcgtctgcctgttgaagcattcagcgccgtgttcacaaaatatcccgagtctcttgtcagggtcgtgcagatcataatggtgagactccagcgagtcaccttcctcgctcttcataactatctcggactcacaaacgagctgttctcgcacgagattcagcctctcaggctatttccgagccccggattgcctacccgaacctcaccagtgcggggcagcaagaggatggtctctacatccgctactgacgagccacgcgagaccccagggaggccgcccgacccgacaggagccccactacctgggccaactggggatccagtaaaacccacaagtctcgagaccccgtccgccccgttgctttcacggtgtgtgtctatgcctggcgacatttcaggactgcagggtggcccgcgtagtgatttcgatatggcgtacgagaggggccgaatcagcgtgagtctccaggaagaagctagcggtggctccctggctgcacccgcccggaccccgacacaggagccgcgggagcagcccgcgggggcatgtgaatactcatattgcgaagatgaatcggccactggtgggtgtccgtttggtccttatcaaggaaggcagacctctagcatctttgaggcagcgaaacaggaactcgcgaagttgatgcgcatagaggacccaagcctgttgaacagccgggttctcctgcatcatgcaaaagccggcacaatcattgcccggcagggtgaccaggacgtatcattacattttgtattgtggggctgtttacacgtctaccaacgcatgatagataaagcagaggatgtgtgtcttttcgtagcccagcctggcgagctggtgggacagttagctgtgctgaccggggagcctctgatctttactctcagagcccagcgcgactgcacatttctcagaatttccaagtctgacttttatgaaatcatgcgagctcagccgtcggtcgttctttctgctgcccacactgtagccgctagaatgagtccttttgtgaggcagatggactttgccatcgactggacagctgtcgaggcaggtagagccctgtacagacagggggacaggagcgactgtacttacattgttctcaacggcaggctcagatccgtaattcagagagggtccggcaaaaaagagttagtcggggagtacggtcgaggcgatttgatcggagtggtggaggctttgaccaggcagcctagagccaccactgtgcatgctgtgcgtgacacggaactggcaaaactacccgaaggtacactcggtcacattaagagaagataccctcaggtcgtaacacgactgatccatctcctcagccagaagatcctgggaaacctccaacagctccagggccccttccctgctggtagcgggctgggcgttcccccccactctgagttgacaaatccagcttccaatctggccaccgtcgccatacttcccgtgtgcgcagaggtgccaatggttgcattcactctggagttgcagcatgccctgcaggcgattggccccaccctcctgctcaacagcgacattattagggcccggctcggagcatccgcacttgacagcattcaggagttccggttgagtggctggcttgcccagcaagaagatgcccaccgcatcgtcctctaccagacagacgcctcattaacaccctggaccgtcaggtgcttacggcaagccgactgcatcctcatagtgggacttggcgaccaagaacccacactgggtcagctggagcagatgctcgagaacaccgcagtgcgcgcactaaagcagctggtgctgcttcaccgggaggaaggggcaggcccgacgcggaccgtggaatggcttaatatgcgttcatggtgcagcgggcatctgcacctgcgatgtccccggcgcctatttagtagacgatcacccgccaagctccatgagttatacgagaaagtcttttcgaggcgcgcagaccgccactcggacttctccaggcttgcgcgtgtccttactggaaacacaatcgcactcgtacttggcgggggaggggctcgaggttgttctcacattggcgtcctgaaagcgttggaggaagccggggtacctgtggacttggttggcggtactagtattggaagtttcattggggccttatacgccgaggaacgttcggcctcacgcacaaagcagagggccagagaatgggcgaaatcgatgacatccgttcttgagcccgtgctggatctgacctaccctgtcacgagcatgttcacaggatcagctttcaacagatccattcaccgggtgttccaagacaaacaaatcgaagatctatggctcccatacttcaatgtgactaccgacattacggcttcggctatgcgcgtccataaggatgggagcttatggaggtacgtccgggcaagcatgactctctccggctacctacccccgttgtgcgaccccaaagatggccatctgcttatggacgggggatatatcaacaatcttcccgcagatattgcgcggtctatgggggcaaagaccgtgatcgcgatagatgtgggatctcaagacgaaactgatctctccacctacggcgatagcctatcgggctggtggctgctttggaagcggctaaacccctgggccgataaggtcaaggtgcccgacatggcagagatccagtctcgactcgcctatgtctcatgtgtgcggcagcttgaggtggtgaagtcgagcagctactgtgaatacctcaggcctccgattgattgtttcaagaccatggatttcggtaaatttgaccagatctatgacgtggggtatcaatatggaaaggccgtgttcgggggttggagtcgtggaaacgtgattgagaagatgctgaccgataggcgcagcaccgatctcaatgaatcaagaagggcagatgtgcttgcttttccctcctctggttttaccgacctggctgagattgtctctcgcattgagcctcccacttcatacgtttctgatggatgtgcagatggcgaggaaagcgactgtctgacagagtatgaagaggatgctggcccggattgtagcagggacgagggaggcagtcctgaaggagcatccccctccacagcaagcgagatggaggaagagaagagcatcctgaggcagagacgatgtttaccccaggagcccccgggcagcgccactgacgcgtag

SEQ ID NO: 25656 - DNA, 846 bp, synthetic construct
  misc_feature 1..846: note = Description of Artificial Sequence: Synthetic coding sequence
  source 1..846: mol_type = other DNA
atgggccacccccccctgctgcccctgctgctgctgctgcacacctgcgtaccggcaagttggggtttgcgctgtatgcagtgtaaaactaatggagactgtagagtcgaagagtgcgcacttgggcaagacctgtgtaggactactattgtgcggctgtgggaggagggggaagaacttgaactggtcgaaaagtcatgcacacattcggagaagactaataggacactgagctaccgaaccgggctgaaaatcacttcactgacagaagtggtgtgcggccttgatttgtgcaatcagggtaattcaggtcgggccgttacatacagcagatcaaggtacctcgagtgtatctcttgtggtagcagtgatatgagctgtgaacgtggcagacatcagagcctgcaatgtcggagccccgaggagcagtgcctcgatgtggtgacccactggattcaggagggcgaggaaggccggcccaaagacgaccgacacttgcgagggtgcggctatttacctgggtgtccaggatcaaatggatttcacaacaacgacacctttcattttctgaagtgctgtaacacgaccaaatgtaatgagggtccgatccttgagctggaaaacctgccccagaacggcaggcagtgttacagctgtaagggtaactcgacccacggctgttcctctgaggagactttcctgattgattgccggggccccatgaatcagtgcttagtggccaccgggacccacgagcgctcactttggggttcctggctcccctgcaagagtaccacagctctgcgccccccctgttgtgaggaggcacaggccacacacgtctag

SEQ ID NO: 25657 - DNA, 1008 bp, synthetic construct
  misc_feature 1..1008: note = Description of Artificial Sequence: Synthetic coding sequence
  source 1..1008: mol_type = other DNA
atgggccacccccccctgctgcccctgctgctgctgctgcacacctgtgtgccagcatcatggggcttacgatgcatgcagtgtaagacaaacggcgactgccgcgtcgaagaatgcgccctgggtcaggacctctgtcggacgaccatcgtacggttgtgggaagagggggaagagttagaacttgtcgagaagtcatgtacacacagcgagaaaaccaaccggaccctgagctaccgcaccgggcttaagatcacgtctttaacagaagtcgtctgcggactcgatctgtgtaaccaaggaaactctggacgcgctgtgacttactccaggagtaggtacctcgagtgtatttcatgcgggtcttcagatatgagttgcgaacgcggccgtcaccagagcctgcagtgtcgctcacccgaggagcaatgccttgatgttgttacccattggatacaagagggtgaagagggaaggccgaaggacgaccgacacttgagaggctgcggctatttgcccggatgtcctggctccaacggcttccacaataatgacactttccatttcttgaagtgctgcaacaccaccaagtgtaatgaagggccgattctggagctggagaatctccctcaaaatggccgccagtgttatagctgcaagggcaatagcactcatggctgctcgtcagaagagacttttctcattgactgccgggggccgatgaaccaatgtctggtcgctaccggtacccacgagcctaagaaccagagctacatggtgcgggggtgcgcgacagccagcatgtgccaacatgcacacctgggagacgctttctcaatgaatcatattgacgtttcctgctgtaccaagagcggatgcaatcaccctgacctcgacgtgcagtatcgcagcggcgccgcaccccagcctgggcctgcccacctttcacttacaataaccctgctgatgacagctcgactctggggcgggaccctgctgtggacctag

SEQ ID NO: 25658 - DNA, 1038 bp, synthetic construct
  misc_feature 1..1038: note = Description of Artificial Sequence: Synthetic coding sequence
  source 1..1038: mol_type = other DNA
atgagcctgttcggcctgctgctgctgaccagcgccctggccggccagagacagggcacccaggccgaaagtaatttatccagtaaattccagttctccagtaacaaagagcagaatggcgtccaagacccgcaacacgaacggatcatcacagtcagtaccaacggaagtattcacagtccgcgatttccgcatacctacccacgcaataccgtgctggtgtggagactggtggccgtagaggagaacgtgtggatccagctgacattcgatgagcggtttgggttggaggatccagaagacgatatttgtaaatatgattttgtggaggtggaagagcccagcgacgggactattctcggccggtggtgcggatctggcaccgtcccaggaaagcagatcagtaagggaaaccaaatcagaataagatttgttagtgacgagtattttcctagtgagccaggattttgtattcactataatatcgttatgccccagtttaccgaggctgtctcccctagtgtcctacccccctctgcattgcctctcgacttgcttaataatgcaataacagctttttccaccctcgaggatctgatcaggtacttggaacctgaacggtggcagctggatctcgaggatctctacaggcctacctggcagctgttagggaaggctttcgtgtttggacggaaatcaagggtggtcgatcttaacctgcttactgaggaggtccgcctttactcctgtacacccagaaatttttccgtgagtatccgtgaggaattaaagaggaccgatacaatcttctggcccggatgcctcctggttaagagatgcggcggcaactgtgcctgctgtttacacaattgtaacgagtgccaatgcgttccatctaaggtgacgaaaaagtaccacgaggtgctgcagctgcgacctaagaccggtgtgcggggacttcacaagtctttgacggacgtcgccctagaacatcacgaagaatgcgattgcgtgtgccgcggaagcaccggtggatag

SEQ ID NO: 25659 - DNA, 549 bp, synthetic construct
  misc_feature 1..549: note = Description of Artificial Sequence: Synthetic coding sequence
  source 1..549: mol_type = other DNA
atgccccagttcaccgaggccgtgagccccagcgtgctgcccccctctgccctgccgctggaccttcttaataatgccataaccgcatttagcacgcttgaggacctgatccgatatctggaacccgagcgctggcagctcgacctggaagacttatatcgccccacctggcagctcttgggaaaagccttcgtgtttgggaggaaatcccgggtggtagatcttaaccttctgaccgaggaggtccggctgtacagctgtactcccagaaacttctccgtatcaattagagaggaactaaagaggactgacacaatattttggccgggatgcctgttggtgaagcgttgtggagggaactgcgcctgctgcctgcacaattgcaatgagtgtcagtgcgtgccctctaaggtgactaaaaagtatcatgaggtcctacagctgaggccgaaaaccggggttagaggccttcacaagtccctgaccgacgtggctctggagcaccacgaggaatgtgattgtgtttgtagaggttctaccggcgggtag

SEQ ID NO: 25660 - DNA, 573 bp, synthetic construct
  misc_feature 1..573: note = Description of Artificial Sequence: Synthetic coding sequence
  source 1..573: mol_type = other DNA
atgatgcagtacacctggctgctgaccaagcagttcaccgaggccgtgagtccaagcgtcctccctcccagcgcacttcccctggatctgctgaacaacgctattacagctttctccacactggaggacctgattagatacttagagcccgaaagatggcagctggacctcgaggatttatatcgcccgacgtggcaactgctgggcaaggcatttgtctttggccggaagtcacgcgtggtggacttaaatctgttgaccgaggaggtgaggctttacagttgcactccccgcaatttttcagtgtctatccgggaggagctgaaacgcacagacactattttttggccaggctgtctcctggtcaaacgttgtgggggcaattgcgcgtgttgcttacacaactgtaatgaatgtcagtgcgttccatccaaagtcaccaaaaagtatcatgaggtcctccagctccgacctaaaaccggagtgcgcgggttacacaagagcctgacagacgtggccctcgaacaccacgaagagtgtgattgtgtctgccgcggcagcaccggaggttag

SEQ ID NO: 25661 - DNA, 504 bp, synthetic construct
  misc_feature 1..504: note = Description of Artificial Sequence: Synthetic coding sequence
  source 1..504: mol_type = other DNA
atgagcctgttcggcctgctgctgctgaccagcgccctggccggccagcgtcagggcactcaagccgagtccaatctttctagtaaatttcaattcagctcaaacaaggagcagaacggagtgcaagatccccagcacgagcgaattattactgtgtccaccaacgggtccattcattctccgagattcccccacacatatcctcggaacactgtgctggtttggcggctcgtggcagtggaagaaaatgtgtggatccagttgaccttcgatgaacgctttggcctcgaggacccggaagatgacatatgcaagtacgatttcgttgaggtagaggagccatctgatggaacaattctcggacgatggtgtgggagtggcacggtcccagggaaacagatttccaagggaaaccagattagaattaggttcgtgtcggacgaatattttcctagtgagccttctaatcggggagggaagataattcagcttcacaccagttag

SEQ ID NO: 25662 - DNA, 2217 bp, synthetic construct
  misc_feature 1..2217: note = Description of Artificial Sequence: Synthetic coding sequence
  source 1..2217: mol_type = other DNA
atgcagccccggtgggcccagggcgccaccatgtggctgggcgtgctgctaaccttgctcctgtgctcaagtctggaagggcaggagaattcgttcactattaacagcgtggatatgaagagcctccctgactggacggtccaaaacggcaagaacctgactctccagtgcttcgctgacgtgtcaacgaccagccacgtcaaaccccagcatcagatgctattttataaggatgacgtactgttttacaatatctctagcatgaagtcaaccgagtcatacttcatccctgaggtccgcatttacgattcagggacatacaagtgcacagttatcgtgaataacaaagagaagaccacagcagaatatcaggtcctggtggagggtgtgccttctcctcgggttacgctggacaaaaaggaggctattcaaggaggaatcgtgcgagtcaattgtagtgtcccagaggaaaaggctccaattcattttactattgaaaaactggagttaaatgaaaaaatggttaagcttaaacgggaaaaaaacagccgagaccaaaactttgtgatcctggaattcccagtggaggagcaggaccgcgtgctctcatttcgatgccaagccagaatcatatctggcattcacatgcagacaagcgaaagtaccaagtcagagttggtcactgtgaccgaatctttctccacccccaaattccatatctcccctaccggaatgatcatggaaggggctcagttacatatcaagtgtacaatccaggtcacccacctggcccaagagttcccagaaattataatccaaaaagataaagctattgtcgctcacaaccgtcacggtaacaaagcagtctacagtgtgatggccatggtcgaacattcggggaattacacttgcaaggtggaatcgagcaggataagcaaggtatcttcaatcgtggtgaatattacagaacttttctctaaaccagaactcgaatcgagttttacgcacctagatcaaggcgagcgcttaaatctgtcttgtagtatacctggcgccccccccgctaacttcactatccagaaggaggatacaatcgtttcccagacacaggactttaccaaaatagccagtaaatctgactccggtacgtacatttgtacggcaggtatcgataaagtcgtaaaaaagtcaaacaccgtacagatagtggtgtgcgagatgttatcacagcccagaatatcctatgatgctcaattcgaagtgatcaagggacagacaatcgaagtgagatgcgagagcatttctggaacactgcctataagctaccagctcctgaagacatctaaggtgctggaaaacagcaccaaaaattccaatgacccagccgttttcaaagataacccgactgaagatgtcgaataccagtgcgtcgcggacaattgtcactcgcacgcaaagatgttgtctgaggtcctgcgcgtaaaagtaattgctcctgtggatgaagtccagatttctatcctttccagcaaagttgttgagagcggggaggacattgtgctccaatgcgcagtgaatgaagggagtggccctataacatacaagttctacagggagaaggaggggaagccattttaccaaatgacttccaacgcaacccaggcattctggactaaacagaaggccagcaaagaacaggagggggagtattattgtaccgctttcaatagagcaaaccacgcaagcagcgtgccgcgatctaaaattctgactgtgcgcgtaattctcgctccatggaagaaaggcctgattgctgtcgtgatcataggagtcataattgcactgctgatcatcgccgctaagtgttactttctgcgcaaagcgaaggctaaacagatgccagtggagatgtccagacctgccgttccattgctgaactcaaacaatgaaaaaatgagcgatcccaacatggaggccaattctcattatggccacaatgacgacgttagaaaccatgctatgaaacctattaatgataataaagagccactcaattccgacgtccagtacactgaggtgcaggtgtcatccgctgagtcccataaagatcttggtaagaaggacacagaaacagtgtactctgaggtccgaaaggccgtcccggatgctgtggaatctcgctattcccgtacagagggatccctagatggcacctag

SEQ ID NO: 25663 - DNA, 636 bp, synthetic construct
  misc_feature 1..636: note = Description of Artificial Sequence: Synthetic coding sequence
  source 1..636: mol_type = other DNA
atgcggaccctggcctgcctgctgctgctgggctgcggctacctggcacatgtcttggccgaggaggccgaaattcctcgcgaggtaatcgagcggttagctagaagccagatccactcgatccgtgacctccagagactgctcgaaatcgactccgtgggttctgaagactcactcgatactagccttcgggcccacggtgttcacgcaacaaagcatgtccctgaaaaaagacccctacccatccgcagaaagcggtccatagaggaggctgtaccagccgtgtgcaagaccagaaccgtgatatacgagatccccagatcccaggtggaccccacttccgcgaatttcctcatttggccaccttgcgtcgaagttaagaggtgcactggttgttgcaatacgagttctgtgaaatgccaacccagtagagttcatcatcggagtgtcaaggttgccaaagtcgagtatgtgagaaaaaaacctaagctcaaagaagtacaggtacggcttgaagagcaccttgaatgtgcctgtgctactacttcactcaaccccgattaccgagaagaagacaccggcaggcctcgagaatcaggaaaaaaaaggaaaaggaagcgactgaagccaacatag

SEQ ID NO: 25664 - DNA, 591 bp, synthetic construct
  misc_feature 1..591: note = Description of Artificial Sequence: Synthetic coding sequence
  source 1..591: mol_type = other DNA
atgcggaccctggcctgcctgctgctgctgggctgcggctacctggcccatgtgctggcagaagaggccgaaattccgcgtgaagtcatagaacggctggcgcggtcccaaattcattccatccgggaccttcagcgactgcttgaaattgattccgtgggcagtgaggactcccttgacacttctttgcgcgcgcacggggtgcacgctaccaagcacgtaccagagaaacggcccctccctattcggcggaaacgcagcatcgaagaggcagtgcccgccgtgtgcaagaccaggacagttatctacgaaataccccgaagccaggtggacccaacatcagcaaacttcctgatctggccaccatgtgttgaggtcaaacgttgcacgggctgttgcaacacgtcctccgtaaaatgtcagccctctcgtgtgcaccatagaagcgtgaaggtcgccaaagttgaatacgtgcgaaaaaaaccgaagctgaaagaagtccaggtcaggctcgaagaacacctggaatgcgcttgcgccactacgtcacttaatcctgattacagagaggaggataccgatgttcggtag

SEQ ID NO: 25665 - DNA, 162 bp, synthetic construct
  misc_feature 1..162: note = Description of Artificial Sequence: Synthetic coding sequence
  source 1..162: mol_type = other DNA
atgcggaccctggcctgcctgctgctgctgggctgcggctacctggcacacgtgttagctgaagaagcagagatccctcgtgaggttatcgagcgcctagccagaagtcagatacattcgatcagggacctgcaacgcctgctcgagatcgattcagtttag

SEQ ID NO: 25666 - DNA, 3270 bp, synthetic construct
  misc_feature 1..3270: note = Description of Artificial Sequence: Synthetic coding sequence
  source 1..3270: mol_type = other DNA
atgggcaccagccaccccgccttcctggtgctgggctgcctgctgaccggtctgtccctcatcttatgccagctgtctttacccagcattctgcctaacgagaacgaaaaggtggtacaattgaactcgtctttctcattacgatgtttcggggagtcagaagtgtcgtggcagtaccccatgtccgaggaggagtcatcagacgttgagatcagaaacgaggaaaacaactcaggcctgtttgtgaccgttcttgaggtgagctctgcctctgctgcacacactggactgtatacgtgttattacaaccatacacaaacagaagagaatgagcttgagggcagacatatctatatttatgtgcccgatccagatgtggcttttgtcccactgggaatgaccgactatctcgtcattgtcgaggacgatgatagcgctataatcccctgccggacgactgaccctgagaccccagtgactctccacaactcggagggcgtcgtgccagcctcctatgattctcggcaggggtttaatggtaccttcacagtgggaccatatatctgtgaagcaaccgtgaagggtaagaaattccagacaatcccttttaatgtctacgctcttaaggccacttctgagttggatctcgagatggaagcactcaaaacagtctataaatccggtgagactatcgtggttacatgtgcagtgttcaacaatgaagtagtggacctgcagtggacttatcccggggaagtgaagggcaagggaatcaccatgctcgaggaaatcaaagtaccatcgataaagcttgtttatacactgactgtgccagaagcaacagtcaaggatagtggtgattacgaatgcgcagctagacaagcaacgagagaagtgaaagaaatgaaaaaggtcacaatctcggtccacgaaaagggctttatcgagatcaagccaaccttctcccagctggaagcggtgaatctgcatgaggtaaagcattttgtcgtagaagtacgggcttatccacctccccgcatatcttggcttaagaacaatctgacgctgattgaaaacttgacagaaatcaccacagatgttgagaaaatccaagaaatcagatataggtctaagctgaaattaatacgggcaaaggaggaagacagcggtcactataccatagtggctcagaatgaagatgccgtgaaaagctacaccttcgagctgcttacccaggtaccgagttccattctggatctggtagatgaccatcatggcagcaccgggggccagactgtaagatgcaccgccgagggaacacctctccctgatattgagtggatgatctgtaaagatatcaagaagtgcaacaatgagacaagttggactattttggcaaacaacgtgtccaacatcatcacagaaattcactcacgagatcgttcaacagtggagggccgtgtgactttcgctaaggtcgaagagactattgcagtccggtgtctggccaagaatttattaggcgcggaaaacagagagctgaagctcgtggctcccaccctgagatctgaactcaccgtcgccgccgctgtgctggtcttgctagtgatcgtgatcatatcactgatagttctcgtcgtcatctggaagcagaagcctcgatatgagatccgctggcgagtcatcgaaagcataagccccgacggccatgagtatatctatgtggatcccatgcagttaccctatgatagtaggtgggagttccctcgtgatgggttggtcctcgggagagttctgggcagcggcgcctttgggaaagtggtggagggaaccgcatatggcttatccaggagccaacccgtgatgaaagttgcagttaaaatgctgaaacccactgcccggagcagtgaaaagcaggcgttgatgagcgagctcaagattatgacacacttggggccacacttgaacatagtaaatctgctgggtgcctgcactaagtccggacccatttacatcatcactgagtactgcttttatggggatttagtcaactacctgcacaaaaatagagactcttttctaagccaccacccagagaaaccgaagaaagaattagacattttcggtctgaacccggcagatgaatccacaagatcttacgtgatccttagttttgagaataatggcgattatatggatatgaagcaggcggatactactcagtatgtgcccatgctggagcgaaaagaggttagcaaatactcagatatccagaggtctctgtatgacagacccgcctcctataagaagaagagcatgctcgatagcgaggtaaagaacttgctctccgacgacaactctgagggcctaactttgttggacctgctgtcattcacatatcaggtggcgcggggaatggaattccttgcgtccaaaaactgcgtgcatcgagatctggctgcccgaaacgtcctcctagctcaaggcaagatcgtgaaaatttgcgacttcggtctggcccgggacatcatgcacgattctaactatgtttccaaaggaagcacattcttacccgtgaaatggatggcgcccgagtcaatcttcgacaatctttacactactcttagcgacgtttggagctatggcatcttgctctgggaaatctttagcttgggcggcacaccctacccaggaatgatggtcgatagcacattttacaacaagattaaaagcggctacaggatggccaagcctgaccatgctacgagcgaggtttacgaaatcatggtcaagtgctggaatagcgaaccagagaagcgaccctccttctatcatttgtcagaaatagttgagaacctgcttcccggtcaatacaagaagtcctatgagaagatccacctggatttcctgaagtcagatcaccctgctgtggccagaatgagagtggatagcgacaacgcttacatcggggtgacctataagaatgaagaagataaactaaaagattgggagggcggattggatgaacagcggttgagcgcggattccggatatattattcctctccctgacatcgatcctgtcccagaagaagaggatctcggaaaaagaaatagacatagcagccagacaagcgaagagtcagcaatcgaaacagggtctagctcaagcacatttatcaaaagagaggacgaaacaatcgaagatatcgatatgatggatgacattggaattgattccagcgacctcgtcgaggacagtttcttgtag

SEQ ID NO: 25667 - DNA, 480 bp, synthetic construct
  misc_feature 1..480: note = Description of Artificial Sequence: Synthetic coding sequence
  source 1..480: mol_type = other DNA
atgggcaccagccaccccgccttcctggtgctgggctgcctgctgactggtctttccttgatcctgtgccagctgtccctgccttcaatactcccaaacgagaacgagaaagtagtacagctcaattcctccttctcactccgctgtttcggcgagtcagaagtctcatggcagtatccgatgtccgaagaggagagttctgatgttgagattagaaacgaggagaacaacagtggactgtttgtgaccgttctggaggtgagtagcgcatccgctgctcataccggcttgtatacatgttattataaccacactcagactgaagaaaatgagcttgaagggaggcacatttacatttacgtgcctgatccagatgttgcatttgtaccacttggcatgacagactatcttgtcatcgtggaggatgatgactctgcaattatcccttgtagaaccactgacccagaaacaccagtgtag

SEQ ID NO: 25668 - DNA, 477 bp, synthetic construct
  misc_feature 1..477: note = Description of Artificial Sequence: Synthetic coding sequence
  source 1..477: mol_type = other DNA
atgggcaccagccaccccgccttcctggtgctgggctgcctgctgacgggcctctcactgattctgtgccagctttcgcttcctagtatccttccaaacgagaatgagaaggtggtgcagctgaacagctcctttagtcttcgatgtttcggggagtcagaggtttcctggcagtaccctatgagtgaggaggaaagtagcgacgtggagatccgcaatgaggagaataacagtggcctctttgttactgtcctggaggtctcttccgcctctgcagctcacacaggactgtacacatgctactataaccacacccagaccgaagagaatgaattagaaggcagacatatatatatctacgtccccgacccagacgtcgcctttgttccgctcggaatgacagactaccttgtgatagtggaagatgacgattccgctatcataccttgtaggacgacagatcctgagacaccctag

SEQ ID NO: 25669 - DNA, 657 bp, synthetic construct
  misc_feature 1..657: note = Description of Artificial Sequence: Synthetic coding sequence
  source 1..657: mol_type = other DNA
atgggcaccagccaccccgccttcctggtgctgggctgcctgctgacaggcctcagcctgatcctgtgtcagttatccctcccgtcaattttgcctaacgaaaacgagaaggttgtccagttgaattcatccttttcacttaggtgctttggagagtctgaagtgtcttggcagtacccgatgagcgaagaggagagttctgacgtggaaattcgcaacgaggaaaacaattcaggcctgttcgtaaccgtcctcgaggtgtcctctgcttcagcggctcatactggcctctatacatgttattataaccacacacagaccgaggaaaacgaacttgaaggcagacacatctacatctacgtcccagatcccgatgttgcctttgttccactaggcatgacagattacctggtgattgtagaagacgatgattctgcgatcataccctgtcgcaccaccgaccctgaaacacccgtgacactccataattcagagggtgttgttccagctagctatgattcccggcaggggtttaacggaacctttactgtcggcccatatatttgcgaagccaccgtcaaaggaaaaaagttccagaccatcccctttaatgtctacgcgcttaaaggtacttgtatcatctccttcctgctttag

SEQ ID NO: 25670 - DNA, 465 bp, synthetic construct
  misc_feature 1..465: note = Description of Artificial Sequence: Synthetic coding sequence
  source 1..465: mol_type = other DNA
atgggcaccagccaccccgccttcctggtgctgggctgcctgctgacaggcctctccctaatcctgtgccaactatcactcccgagcatcctccccaatgagaatgaaaaggttgtacaactgaatagttcgttctccctacgatgtttcggggagagtgaggtctcatggcagtatccaatgtccgaagaggagtcatctgatgtcgagatcagaaatgaggaaaacaattctggactattcgtcaccgtacttgaagtcagcagcgccagtgccgcacatacaggattgtatacgtgctactacaatcatacccagactgaagaaaacgagctcgagggacgccacatctatatttatgtacctgatcccgacgtcgcatttgtgccgttaggtatgactgattacctggtgatagtagaggatgacgactctgcaatcatcccatgcagaaccacagattag

SEQ ID NO: 25671 - DNA, 3321 bp, synthetic construct
  misc_feature 1..3321: note = Description of Artificial Sequence: Synthetic coding sequence
  source 1..3321: mol_type = other DNA
atgcggctgcccggcgccatgcccgccctggccctgaagggcgagctgctcctgctttcactcttacttcttctcgagcctcagatcagccagggactggttgttactccacccggaccagaactggttctgaatgtgtcttcaacatttgtcctgacctgtagtggctcagcacccgttgtgtgggagcggatgtcccaggagcccccccaggagatggccaaggcacaggatggcacattcagtagcgtactgacactaacaaacttaactgggttggacaccggagaatatttctgtactcacaacgattcaagagggctagaaactgacgaacggaagcgcctgtatatcttcgtcccggatcccacggttggatttttaccaaacgacgctgaagagctgttcatctttttgactgagattaccgaaatcactattccttgcagggttaccgatccacaactggttgtgaccctgcacgaaaagaagggcgacgtggccttgccagttccatacgaccatcagcggggatttagcggtatctttgaagataggagttacatttgtaagacaacaattggcgatagagaagtggactccgacgcatattacgtgtatcgcctgcaggtatcctcaattaacgtgtccgtcaacgcagttcagacggtggtccgccagggcgaaaacataaccctcatgtgtatcgtcattggaaacgaggtggtgaacttcgaatggacatacccaagaaaggaatctgggcggctggtggagccagtgactgactttctgctggacatgccttaccacatcaggagcatcctccacatccccagcgcagagctggaggacagcggaacttatacctgcaatgtaaccgaaagcgtgaatgatcatcaggatgagaaggctattaacattactgtcgtcgaatcggggtatgttagattactcggcgaggtcggcacgctccaatttgcagagctacatcgaagcagaactttgcaggtcgtgttcgaagcatacccacctcctaccgtgctgtggtttaaggacaaccggactctaggcgactcaagtgccggagagattgccctatccactcggaacgtgtctgagacacggtatgtgtcagagcttaccctcgtcagagtcaaagttgcggaggctggccattatacaatgcgggccttccacgaggacgcggaggtacagctctcctttcagctgcagataaacgtgcctgtacgggtcttggagctgtctgaatctcacccagacagtggtgaacagaccgttagatgtcgtggccggggtatgccccaacccaatatcatctggagtgcctgtagagacctgaagcgctgtccaagggagctcccacctaccctcctgggcaactcttcggaagaagagtctcaactcgaaacgaacgtgacctattgggaggaggaacaggagtttgaagtcgtaagcactttgcggctccagcacgtggatcgaccgttgtccgtccggtgcactcttcggaacgcggttggccaagatacccaagaggtgatcgttgtcccacattccctcccgtttaaggtggtagtcatctcagccattttggcgttggttgtcctgactattatctctctgatcatcctgataatgctgtggcagaagaagccccgatatgagattagatggaaggtgattgagagtgtaagttctgacggacacgagtacatctatgtggaccccatgcagttgccatacgatagcacctgggagctgcccagagatcaactggtgcttggaaggactctcggtagtggggctttcgggcaggtggtggaagctactgcgcacggtctgagccattcccaggcgaccatgaaggttgccgtaaaaatgctgaaaagcaccgcgcgcagcagcgaaaagcaggctctcatgagcgagttaaaaattatgtcccatctcggtcctcatcttaacgtcgtgaacttgctgggagcttgcaccaagggaggtcccatttacatcataacagaatactgccgatacggtgatctcgtggactatctccatcgcaacaagcacacatttctacagcaccattctgataagcgaagacccccatccgccgaactctacagtaatgctctccccgtgggtctgccactgccttcacacgtaagcctcaccggcgagagcgatggtggttacatggacatgtctaaagatgagtccgtggattacgttcccatgctggacatgaagggcgacgtaaaatatgccgatatcgagagtagcaactacatggcaccatacgataattatgtcccctcggcgccagaaaggacatgcagggctactcttatcaatgaatctcccgtgctgtcatatatggatctggttggcttctcctaccaggtagccaacggcatggagtttcttgccagcaaaaactgcgtccacagagacctagccgcaagaaacgtactgatttgtgaggggaagctcgttaagatttgtgattttggcctggcacgtgacattatgcgcgactctaactatatctccaaaggctccacattcctaccacttaaatggatggcaccggagtctatcttcaacagcctgtacaccacactttccgatgtgtggagctttggaattctgctttgggaaatcttcaccttggggggcaccccatatcccgaattgcccatgaatgaacagttttacaacgccatcaagcgtggatacaggatggctcaaccggctcatgcttcggatgaaatctacgagatcatgcaaaaatgttgggaagaaaaatttgaaatccgcccaccattctctcagctcgtcctgcttctggagcgactgttgggggaaggctacaagaagaagtaccagcaggtcgatgaagaattcctgcggtccgatcatcctgccatcctcaggtcacaagctcggttgcctggctttcacggacttcgctcacctctggacaccagctctgtgctttataccgctgtgcaaccaaatgagggagacaacgattacatcatcccacttccagatcccaagcccgaagtcgccgatgagggtccactggaggggtctcctagcctagcctcttccacccttaacgaggtgaatacaagtagtactatttcatgcgattcccccctggagccccaagatgaacccgaacccgaaccgcagctcgagctgcaggtggagcctgagccggagctggaacaactccctgactctggctgtcccgctcctagggcagaagccgaagactccttcctttag

SEQ ID NO: 25672 - DNA, 525 bp, synthetic construct
  misc_feature 1..525: note = Description of Artificial Sequence: Synthetic coding sequence
  source 1..525: mol_type = other DNA
atgcggctgcccggcgccatgcccgccctggccctgaagggcgagttgcttttgctgtccttgctgctgctattggaacctcagatttcccagggcttggtggttacccccccgggtcccgaactggtcctcaacgtcagttctacttttgtactgacctgctctggaagtgctcctgtggtgtgggagcgcatgtcacaggagcctccacaagaaatggcgaaagctcaggatgggacgttcagtagtgtgctgaccctgaccaatctgacgggcctggatacaggcgagtacttctgtacgcacaacgacagcagaggactcgaaacagacgagcgcaagcgtctctacatctttgtaccagaccccactgtgggtttcctgcctaacgatgccgaggaactgttcatctttctgactgaaattacagaaataacgattccttgccgggtcactgaccctcagctggtggttacactccatgagaagaaaggggatgtggcacttcctgtgccatatgattag

SEQ ID NO: 25673 - DNA, 2331 bp, synthetic construct
  misc_feature 1..2331: note = Description of Artificial Sequence: Synthetic coding sequence
  source 1..2331: mol_type = other DNA
gccgccagcgagcccgacaccgccggcagcgtgcggggcctgcccaccgcacactgccctgtggtggacaaccgcactttgggagacagctcagctggcgagatagccctcagcacccggaacgtgtcagagactcgctatgtgtccgagctcaccttggttcgtgtcaaggttgccgaggctggacattatacaatgcgggcgttccacgaagatgctgaggttcaactttccttccagctgcagatcaatgttccggttcgcgttttggagctgtctgaatctcatcccgattctggtgagcagacagtccgatgccgcgggcgcggtatgccacagccgaacataatatggagcgcctgccgtgatcttaagcggtgcccccgtgaactcccccctactcttctgggcaattcctcagaagaagagtctcagctggaaaccaatgttacgtattgggaagaggagcaggaattcgaggtggtgagcacccttagattgcagcatgtcgaccgcccgctatctgttcgttgcacccttcgaaacgccgttggccaggacacacaggaggtgatcgtggtgcctcactctcttccattcaaggttgtagtgatctccgctattctggccctggtcgtgctcacaatcatttccctgattattctgatcatgttgtggcagaaaaaaccccgctacgaaataaggtggaaggtaatcgagtcagtgagcagtgacggacacgaatatatctacgttgaccctatgcagctgccttacgattcaacctgggagttgccacgcgatcaactagttctagggaggacgctgggcagcggagcatttggccaggtggtggaagctacagcacatggcctgagtcatagccaggctaccatgaaggtggcagtcaaaatgctcaagtctactgctaggtcttccgagaagcaggcactcatgtctgaactcaagattatgtctcacttgggtccccatttgaatgttgtcaacctgttgggggcatgcacgaaaggtgggccaatctacattattactgagtactgccgatatggtgacttagtggattatcttcaccgaaataagcatacattcctgcagcatcactctgacaaacggcggccgccttcagccgagctatattccaacgccttacccgtggggctgccccttccctcccacgtgtcactgacgggggagagtgatggtggatacatggatatgtcaaaggacgagagtgtcgactacgtacccatgctggacatgaaaggggacgtgaagtacgcagacattgagtcaagtaactatatggccccctatgataattatgtcccttctgcacccgaacgcacttgccgcgccacactgatcaatgaatctcccgtgctctcatacatggatctcgtgggcttctcataccaagtcgccaatggcatggaattccttgcttcaaagaactgtgtccatcgggatctcgccgcccggaatgttctcatctgcgaaggcaagttagtcaagatctgtgactttggactggctcgcgatatcatgagagatagcaactacatctcaaaaggtagtacattcctcccgctgaagtggatggcccccgaatccatcttcaattccctgtatacgaccctgtcagacgtttggagctttggcatattgctgtgggagattttcaccttaggaggaactccttaccctgagctccctatgaacgagcagttttacaatgctataaaacgaggctaccgcatggcacagccggcccatgctagcgatgaaatctacgaaatcatgcagaagtgctgggaggaaaagtttgagatccgtccgcccttcagtcagctggtgctcctactcgagcgcttgttgggtgaagggtataagaagaagtaccagcaggtggacgaggagttccttaggtctgaccatccggccatcctgcggagccaggctagattgcctggttttcatggcctccgtagtccccttgatacttcatcagttctgtacactgcggtacagccgaatgagggcgataacgattatatcatccctctgccagacccaaagcctgaagtcgcagacgaaggcccgttggagggatctccatccttggcctcctctacgctgaacgaagtcaatacctcctcgaccatttcctgtgatagtccgcttgaaccacaagacgaaccagagccagaaccccagctcgagctccaggtggaaccagagccggagctagagcaactgccggattcagggtgcccggctccacgagcagaggcggaggattcttttttatag

SEQ ID NO: 25674 - DNA, 891 bp, synthetic construct
  misc_feature 1..891: note = Description of Artificial Sequence: Synthetic coding sequence
  source 1..891: mol_type = other DNA
atgggcctgagccacagcaagacccacctgcgggtgatcaaggtggcccctttgcagaataaagaagtggaaactccttccgcgggcagagtcgattttgccttcaatcagaatctggaggaaaagactagttactcactagccagacttcaagatcagaataaggctcttgagggccagctgccacctttgcaggaaaattggtacggccgatatagcactgccagtcgagatatgtatttcgacatccccctagaacaccgagaaaccagtatcatcaagcgccatcctccgcagcgacttcagaagctggagcctatagatcttccgagggtcattactagcggccgcctgcttagccagagagaggctcgcactatgcacaaggcaaagcaggtccttgagaagaagatgcagacacccatgtatactagtgaaaaccgacagtacttacataaaatgcaggtcctggagatgatccgcaaacgtcaagaagcacagatggagctaaagaagagtttacacggcgaagccaggattaacaagcaaagcccccgagaccacaaagcgaagaagacgctgcagtctactccgcgaaacgacgatcatgacctgttaactatgctacccgatgagattctaaaccgcggacccgggaacagtaaaaacaccgagttcctgaaacaccaagctgtgaacaattattgcccctggaagatcggtaagatggagacttggctgcatgaacaagaggcacaaggtcagctgctctgggattcctcgtcaagcgatagcgacgaacaaggaaaggacgaaaagaagccacgagcgctcgtacgtactcggaccgagcgtattcccttattcgacgaattctttgaccaggaatag

SEQ ID NO: 25675 - DNA, 1734 bp, synthetic construct
  misc_feature 1..1734: note = Description of Artificial Sequence: Synthetic coding sequence
  source 1..1734: mol_type = other DNA
atgcccgagggcgcccagggcctgagcctgagcaagcccagcccctcactcggctgcggacggagaggagaagtgtgtgattgcgggaccgtttgcgagacacggacagctcctgctgctccgactatggccagtccgcggggtagcggatccagtacgagcctttccaccgtcgggagcgagggcgatcccgcacctggtcctacccccgcttgttctgcatcacgacctgaacctctgccggggccccctattagactgcatctctcacccgtaggcattcccggcagcgctcgcccaagccgcctggaaagggtagccagagaaatagttgagaccgagagggcatatgtgcgcgatctccgatcaatagtcgaggattacctgggacccctgctggacggtggggtgctaggtcttagtgtcgagcaagttggaactttgtttgccaacatcgaggacatttatgaatttagttcagaacttttggaagatctggaaaattcttcgagcgcgggcggaatcgctgaatgttttgtccagaggagtgaggatttcgacatttacaccctctactgtatgaattacccatctagcctcgccctgctgcgcgagctttccctgtctccaccagccgctctgtggctgcaggagcgacaggcgcagttgcggcactcactgcccctccaatcgtttcttttgaagcccgtccagagaatactcaagtaccatttactgctgcaagaactgggcaagcactgggcagaaggcccaggaaccggaggccgagagatggtcgaagaagctatcgtatcaatgacggctgtggcctggtacattaatgatatgaaacgcaagcaggagcacgccgcacgccttcaggaagtgcagcggcgtctaggcgggtggacgggccccgaactgtctgccttcggcgaactcgtgctcgagggagccttccggggcggggggggaggcggcccacgtttgagggggggtgaacgtctgctgtttcttttttcccgcatgttgctggtggccaagaggcgtggcctggaatacacatataaggggcatattttttgctgtaatctcagtgtgtcggagagccctagggatcctctcggcttcaaggtgtccgacttgacaattcctaaacaccgtcacctcctgcaggcaaagaaccaggaggagaagagactctggatccactgcctgcagcgcctcttcttcgagaatcaccctgcatcgattccagctaaggctaagcaagttctgctggaaaattctctgcattgcgctccgaagtctaaaccggtgctcgagccactgaccccccccctaggctcccctagaccacgcgacgctcggtcatttactcccggtcgccgcaacacggctccctctccaggtcccagtgttatccgcaggggccgccggcagtcagagcctgtgaaagatccctacgttatgtttccgcaaaacgccaaacctggttttaagcacgccggaagtgaaggtgaactgtacccccctgagtcccagcctcctgtgtccgggtcagcccctccggaggacttagaagacgcggggccccctactttagatccaagcggcacaagcatcaccgaggagatccttgaattgctgaaccagcggggcctccgcgaccccggggagagcatgggactacatagggcccagggcgcccctgatgcaccctttcacatgtag

SEQ ID NO: 25676 - DNA, 4161 bp, synthetic construct
  misc_feature 1..4161: note = Description of Artificial Sequence: Synthetic coding sequence
  source 1..4161: mol_type = other DNA
atgcccgagggcgcccagggcctgagcctgagcaagcccagcccctcacttggatgtggcaggcggggcgaagtgtgcgattgtgggactgtgtgcgaaaccagaacagctcctgcggctcccaccatggccagcccgcggggttctggttcttcgacatctctgagtaccgttgggagcgaaggcgatccagcacccggtccaacacccgcatgttccgccagtcggcccgagcctctccccgggccccccattcggctccacttgagccctgtgggcatccccggatccgcaaggccctctcgattggaacgggtagctagagagattgtcgagacagaacgggcatatgtgagggacttgcggagtattgtggaggactatttaggaccacttctcgacggcggcgttctgggacttagtgtggagcaggtcggcacactgtttgcaaacatcgaagacatctatgaattctcctccgaactgctggaggacctggaaaattcttcctccgcagggggcattgctgaatgttttgttcagaggtctgaagattttgacatctacaccttatactgtatgaactaccccagcagtcttgccctgctgcgcgaactctctctcagccctccggcagctctttggctgcaggagagacaagctcaactacggcatagtctgcctttgcagtcattcctgctgaagccagtgcagagaatcctaaaataccacctcctactccaggagctcgggaagcactgggcagaaggccctgggactggcggacgcgagatggtggaggaagccatagtaagtatgaccgcagtggcttggtatattaacgatatgaagagaaagcaggaacatgccgctcgacttcaggaggtccaacggcgcctaggcggatggacagggccggaactgtcggcttttggagaactggtgctcgagggagcgttccgaggaggaggaggtggtggacctagattgcgaggaggagaacgcctgctgtttctgttcagcaggatgctgttggtcgcaaagcgcagagggctggagtacacctacaaaggccacatcttctgctgcaatttgagcgtttccgaaagtcctcgcgaccctctgggcttcaaagtctctgatcttacaatccccaagcatcgccacttattgcaggctaaaaaccaggaggaaaagcgcctgtggattcactgtttgcagcggctattcttcgagaatcaccccgctagcattccggcaaaggccaagcaagtcctgttggaaaactctctccattgtgcccctaagagcaaaccagttctggaacccctgacccccccgctcggctcacctcgccctagggacgctaggagctttacccctggacgacgtaacactgcgccttcacctggacccagcgtgatacgaagggggcgccgccagtcagagccagtgaaggacccctacgtgatgtttccccagaacgcgaagcccggattcaaacacgccgggtctgagggcgagctgtatcctccagaatcacaacctcccgtgtccggcagcgctccccctgaagaccttgaggatgccggaccgcccacccttgacccgagcgggacatcgatcacggaggagatcctcgagttgctcaaccagagaggcctgagagatccgggccccagtacacatgatatccctaagttccccggcgactcccaagtgccgggcgatagtgagactctcacctttcaggctctgcccagcagagattccagcgaggaagaagaggaggaagaggaggggttagagatggacgaaaggggcccaagtccactgcacgtgctcgagggcctcgaatcctctatagctgctgagatgccatcgatcccctgtttgacgaagatcccggatgtgcctaatctaccggagatcccctcccggtgcgaaattccagagggatcccgcctaccaagcctcagtgacatttcagacgtcttcgagatgccttgcctacccgctatcccctccgtccccaacacccccagcctgagctcaacacctaccctctcttgcgactcgtggctccaggggcctctccaagagccagccgaggcacccgctacacgacgggagcttttttctggatcaaaccccggcaagcttggagaaccccccagtggagggaaggccggtcctgaggaggacgaagagggcgtctctttcacagacttccagccacaagacgttactcagcatcagggtttcccagatgagcttgcctttaggagctgtagtgagattcgctccgcctggcaggctctcgagcaaggtcaactagcacgccctgggtttccagagcctctgctgatcctggaggattctgacttgggcggtgatagtggttcgggtaaggccggggcgccctcaagcgagaggaccgcaagtagggtgagagagttggctcggctctattctgaacggatacaacagatgcagcgggctgaaaccagagcttctgccaacgcccccaggcggaggccccgcgttctggcccagccgcaaccttcaccctgcctgccacaggaacaggctgaacccggcctgctgccggctttcggacacgtgttggtttgcgagctggctttccctctgacgtgcgcgcaggaatctgttccattgggtccagctgtctgggtgcaggctgccataccgctgtccaagcaaggaggatcccccgacggacaggggctgcacgtatctaacttaccaaaacaagatctaccagggatccacgtgagcgcagctacactattgccagaacaggggggctctaggcatgtgcaggcccctgctgccaccccgctgccaaaacaggaaggacctttgcacctgcaagtgcctgccttaactacttttagcgaccagggccacccagaaatccaggtgcccgccaccacccccttaccagagcatcggtcacatatggtgatacctgcaccaagcacggctttttgccccgaacaaggacactgcgctgatatacacgttccgactacccccgcactcccgaaagagatttgtagcgactttactgtgagtgtgaccacacctgttcccaaacaagaaggtcatttagactcagagagccctacaaatatccccctcaccaagcaagggggaagccgggacgtccaagggcccgaccccgtctgctctcagcccatccagcctttgagttggcacggttcatcactggacccccagggaccaggggatacactgccgcctttaccatgtcacttgccagacctgcagattcccggaacttcaccattgcctgcccatggaagtcatctggatcaccgcattcctgctaacgcccctctgagcctctcccaggagttgcctgatacgcaggtgccagcgacaactcctctacccctacctcaggtgttgaccgacatatgggtacaggccttgcctacatctcctaagcagggctctcttcccgatatccagggtcccgcagccgctccccccctgcctgagcccagcctaactgacactcaggtgcagaagctgactccatctctcgaacagaaaagtctcattgatgcccacgttcccgccgcaacccccctgcctgagcgcggtggctctctcgatatacagggcctgagccccacccccgtgcagactacgatggttctgtccaagccggggggttcactggcatcgcatgttgcacgcctcgagtcaagcgatctgactccccctcactccccccccccctccagcagacaactgctcgggcccaacgccgccgccctttcaagatatttggctgccagctacatctctcaatccctcgccaggagacaggggcccggaggtggggctcccgctgcgtcacgtggatcctggtcctccgcccctacgtccagggcttcctctccccccccacagccacagcctcctccaccccctgcccggcggctatcctatgccactaccgtgaacatccatgtagggggcggcggccgtctgcgccctgccaaggctcaggtgaggctcaatcaccccgccctgttggcgagcactcaggagtctatgggcctgcatcgtgcccagggagccccagacgcgccgtttcatatgtag

SEQ ID NO: 25677 - DNA, 1734 bp, synthetic construct
  misc_feature 1..1734: note = Description of Artificial Sequence: Synthetic coding sequence
  source 1..1734: mol_type = other DNA
atgcccgagggcgcccagggcctgagcctgagcaagcccagccccagtcttggctgcggccggcgtggagaggtgtgcgattgtggcacggtatgtgagacaaggacagctcctgccgcacctactatggcttctccccggggatctgggagcagcacatctctgagtaccgttggatccgagggagaccctgcacccggccctacccctgcctgctcagcttcccgccctgagcctttacccgggcctcccatccgcctccatttgtccccagttggaattcccggctccgccagaccatcaagactggagagagtagctagggagatcgttgaaaccgaaagggcctacgtgcgggatctgcggagtatcgtcgaggactatcttgggccactactggacggaggcgtccttggtctgtctgtagagcaggtgggtactctgtttgcaaacatagaagatatctacgaattctcctccgagctgctggaggacttggagaattctagctcagccggcggaatagcagagtgctttgtgcagcggagcgaggatttcgacatttataccctgtactgcatgaattacccgagctccttggccctcctgcgggaacttagcctttctccccctgcagccttatggctccaagagagacaggcccaactacgacattcactccctctccaatccttcctgctcaaacccgtgcagagaatcctaaaatatcacctgcttctgcaggagctcgggaagcattgggccgaaggcccaggtaccgggggacgagaaatggtggaggaagctatagttagcatgaccgccgtagcctggtacatcaatgatatgaagcggaaacaggaacacgccgctcggctgcaggaagtgcagaggaggctgggaggctggaccgggcccgaactatccgcattcggcgagcttgtactggagggagctttcagagggggcggggggggtggtcctagattacgaggtggggagaggctactgtttctgttttctcggatgctgttggtggcgaaacggagaggattagaatacacttacaagggtcacattttctgctgtaacctgagcgtctcagaaagcccacgagacccacttggttttaaggtgtccgacctcacaattcctaagcatcggcatcttctgcaggccaaaaaccaagaagagaagcgcctctggattcattgcctacaaaggctcttctttgagaaccaccctgcaagtatacccgcaaaggctaagcaggtcctgctcgaaaattctctgcattgtgctcccaaatctaaacccgtactggagcctctcacgcctccactaggttcaccgaggccaagagacgcaagatcattcacacctggtagaaggaacactgcaccgagtcccggaccgtcagtcattcgcaggggacgcagacagtctgagccggtgaaagacccatacgtgatgtttccgcagaatgccaagcccggcttcaaacatgcaggctctgaaggcgagctgtacccaccggaatctcagcctcctgttagtggttccgcaccgccagaagacctcgaggacgccggtcctcctacactagacccctccggcacaagcattactgaagaaatcctcgaattactaaatcagaggggattgcgggatcccggtgagtcaatgggactccatagagcgcagggcgcccctgatgccccattccatatgtag

SEQ ID NO: 25678 - DNA, 4074 bp, synthetic construct
  misc_feature 1..4074: note = Description of Artificial Sequence: Synthetic coding sequence
  source 1..4074: mol_type = other DNA
atgcccgagggcgcccagggcctgagcctgagcaagcccagccccagcttaggttgtgggcgtaggggagaagtgtgtgactgcgggactgtgtgcgagacccggactgccccagccgcacctaccatggccagtccgcgggggtcaggctcgtctactagtcttagcacagtgggaagtgagggggatccggcccccggaccaactccagcttgctctgcatctcggccagaacctctacctggtccacctatccgtttgcacctatctccagtgggtatccctggctcagcgagaccctctcgtctggaacgagtggccagggaaattgtggagacggaaagagcttatgtgagagatctcagatccattgttgaagactacctaggaccactcctggatggcggcgtactcggattgtcagttgaacaggtgggcaccctattcgctaacatcgaagacatctacgaattcagcagtgagctgttagaagacctggagaactcatcgtctgccgggggcatcgccgagtgcttcgtgcagaggagtgaagacttcgatatatacactctgtattgcatgaattatccatcatcattggcgctgctcagggagttgagcctgtccccacccgccgctctatggctgcaggaaagacaggcccagctgagacactctctgcctctccagagctttctgcttaagcccgtgcagcgaattctcaaataccacctgcttctacaggagctgggcaagcactgggctgagggcccaggcaccggcggcagggaaatggtggaagaggccattgtttccatgacggccgtggcctggtacatcaatgatatgaaacgaaagcaggagcacgcggcgagactgcaggaggtacaacggcgtctcggaggctggacaggaccagaattgagcgctttcggtgagttggtgctcgagggagcattccgaggcggaggcggtgggggccctcgactcagggggggcgagcggctgctatttctcttcagtaggatgctcctggtggctaagcgacggggtctggagtacacctataagggtcatattttctgctgcaatctctccgtcagcgagtccccgagagatcccctcggtttcaaggtaagtgacctcaccatccccaagcatcgccatctgctccaggccaagaaccaggaagagaagcgactctggattcactgccttcagcggctgttcttcgagaaccaccctgcgagcattcctgcgaaggccaaacaggtattgttggagaactccctgcattgcgcccctaaatcaaagccagtgctggagccgctgacacctcctctcggctcccctaggcccagagacgccagatcttttaccccgggaagacggaacacagcaaaacccggcttcaagcatgcaggttcagagggggagctgtacccaccagaaagccagccacccgtttctgggagtgccccccctgaagatctcgaggatgcaggccctccgaccctcgacccaagcgggactagcatcacagaggaaatcctggaactcctcaatcagagaggcctgcgcgatcccgggccaagcactcacgacatccctaagtttcccggcgatagccaagtgcccggtgactccgagacactgaccttccaggctttaccaagccgagactcctccgaagaggaagaggaggaagaagagggtctggaaatggacgagaggggcccgtcccccctgcatgttctcgaagggttggagtcaagtatcgctgcagaaatgccgtcaatcccctgcttaacaaagatcccagacgtgcctaatctcccagaaatcccatctcgctgtgaaatacctgagggctcacgcctgccctctctgagcgatatcagtgatgtcttcgagatgccatgtcttcccgcaattcctagcgtgcccaacacaccctccctgtcttcgactcctaccctcagctgtgatagctggctgcagggccctctccaagagcccgccgaagcaccagccacgcgacgggaactgttttccggcagtaatcctggaaagctgggagagcccccttcaggggggaaagctggccccgaggaggatgaggagggcgtatcctttacggatttccaaccgcaggatgtcacgcagcaccaaggctttccggacgaacttgctttccgctcttgtagcgagattagaagcgcatggcaagccctggagcaggggcagcttgcgaggcctggattccctgagccccttctcattctagaagactctgatctgggaggtgactctggcagcggaaaagcaggggccccatcaagtgaacgcaccgcgtcgagagtgcgagaactggctcgcctgtattccgagcggattcagcagatgcagcgcgctgagacccgcgcgtctgctaacgccccaagacggaggcccagagtgctggcccaaccacagccttctccttgtttaccacaggagcaggccgaaccgggcctgctgcctgcattcggacatgttctcgtgtgcgaattagcttttccactcacttgtgcacaagaatccgtgccacttggacctgccgtctgggtgcaagcggctatcccactcagcaagcagggtgggtctcccgacgggcagggcttgcacgtaagcaatctgcctaaacaggacctccctggcattcacgtgtctgctgccacacttctgcccgagcagggcggctcaagacacgtgcaggccccagcagcaacacccctgcccaagcaagaagggccgctacacttacaggtgcccgcactgaccactttctctgatcagggccatcctgagatccaggtgccagcaactactccgctgccagaacaccgttcacatatggtgattcctgcgcctagcaccgccttctgccccgagcagggacattgcgctgacatacatgttcctacaacaccggccctccccaaagaaatctgctcggattttacagtctcagtgacaacccccgtgcccaagcaagagggacacctcgattcagagtcgccaacgaatattcccctcaccaagcaaggggggtcccgggacgtacaggggcccgacccagtttgttcacagccgatacagccactctcttggcacgggtcttctctggacccgcaagggcctggcgataccctgcctcctctgccatgtcacctgccggacttgcagatcccaggcacttcgcctctccccgcccacggctctcatttagatcaccgtattccggccaacgcgccattgtctttgagccaggagcttcctgacacacaagtgcctgcaacaacccctctcccactcccccaagtgctgaccgacatctgggtgcaggccctgccaacatcacccaaacagggcagtctccctgatatccagggccccgccgctgcaccaccattaccagaaccgagcctaactgatacccaggtacaaaagctcacacccagccttgaacaaaagagtcttattgacgcccatgtgccagctgcaacaccgctcccagaaaggggagggtctctggacattcagggtctctctccgactcccgttcaaaccacgatggtcttaagtaaacccggtggctccctcgcttcccacgtggcgcgcctggagtctagcgacctgacacctcctcactctccccctccaagcagtcgccagctgctggggcctaacgcagccgctttatccagatacctcgccgcctcatacattagtcaaagcctggcacggagacagggtccaggagggggtgcccctgcagcttcaaggggcagctggtccagcgccccaacctccagggccagcagtccccctccccaaccccagccaccccctccacctgctagaagactttcgtatgcaacgaccgtgaacattcatgtaggggggggaggtaggctccggcccgccaaagcgcaggtcagactgaatcacccagcattgcttgcatccacacaagagtccatgggtctgcaccgtgcccagggggcgccagatgctccattccacatgtag

SEQ ID NO: 25679 - DNA, 597 bp, synthetic construct
  misc_feature 1..597: note = Description of Artificial Sequence: Synthetic coding sequence
  source 1..597: mol_type = other DNA
atgcccgagggcgcccagggcctgagcctgagcaagcccagcccctctctcgggtgcggccggcggggcgaggtttgcgactgcggcacagtctgcgaaacccggaccgccgccccagctgcccctacgatggcctcgccgcggggcagtggaagctctaccagcttgagcacagtcggctctgaaggcgaccctgcccccggaccaaccccagcatgtagtgcatcccggcctgagcctctcccgggcccccctattcgcctgcatctatcacccgtgggcatcccagggtctgctcgcccttcacggctggaacgggttgcccgcgagatcgtcgagaccgaacgtgcctacgtccgggacctgaggtccatcgtggaggactacctgggcccacttctggatgggggtgttctgggccttagcgtggagcaggttggaaccctgtttgccaatattgaggacatctatgagtttagctccgagctgctggaggaccttgagaactcctcttctgccgggggcatcgctgagtgttttgtgcagcgctccgaggacttcgatatttacactctctattgcatgaattacccgtag

SEQ ID NO: 25680 - DNA, 3714 bp, synthetic construct
  misc_feature 1..3714: note = Description of Artificial Sequence: Synthetic coding sequence
  source 1..3714: mol_type = other DNA
atgcccgagggcgcccagggcctgagcctgagcaagcccagccccagcctgggctgcgggcgtcgcggggaagtctgcgactgtggcactgtctgcgagacccggaccggctctgcccgcccctccagactagagcgcgttgcccgggagatcgtggaaaccgagagggcatacgtgagggacctgagatctatcgtcgaggactacctcggcccactgctggacggaggagtattgggcctgagcgttgaacaggtgggcaccctgttcgcgaacatagaggatatttatgagttctcctccgagctcttggaggacctggagaacagttcgtcagccggaggcatcgcagaatgcttcgtacagcgatcagaagactttgacatctacacactgtattgcatgaactaccctagctccctcgccctgcttcgcgaactctccctctcaccacctgccgctctgtggcttcaagaacgccaggcacaactgcgccattctctccctttgcagagctttctgctgaagcccgtacaaaggattctgaagtaccacctgctgctgcaggagcttggtaaacactgggccgaggggccaggcactggtggccgggaaatggtcgaggaagccattgtgagtatgaccgccgtggcatggtacatcaacgacatgaaacgtaagcaggagcatgcagcacgactgcaggaagtccagcgtaggctggggggatggactgggcctgagttaagtgcgtttggcgagctcgtcctggagggagctttccggggcggcgggggaggaggacccaggctgcgtgggggagagagacttttgttcctattttcacgtatgctgttagtggcaaagcggcgcggactcgaatacacctacaaggggcacattttctgttgtaacctcagcgtatcagaatcccccagggaccccctggggttcaaggttagcgacctgaccatacccaagcacagacacttactgcaggctaagaatcaagaggagaagcgtctctggatccattgcctgcagcggctgttttttgagaaccatcctgcctctattcccgcgaaagcaaaacaagtgttgctggagaacagcttgcattgtgctcctaagagtaagcctgttttagagccactcacacctcccctcggctctccacgtccacgcgatgctcgaagcttcacaccaggaaggcgaaatactgctccatctcccggtccttccgtcatccgtagaggtagacgccagtccgaaccagtaaaggacccttacgtgatgtttccacagaacgctaagccgggttttaaacatgcgggcagtgaaggcgagctctatccaccagagagccagccccccgtgagcggctccgcccctccagaagacctcgaggacgccgggccccctaccctcgacccgtctggcactagtataactgaggaaatcctcgagctgctcaatcagaggggcctcagggatcctggcccaagcacccacgacatacccaaatttccaggcgactctcaggtcccgggagatagcgaaacgctgacatttcaggcgctcccgagtagggattctagcgaagaggaggaggaggaggaggagggcctcgagatggacgaacggggaccatcacccctgcacgtcctagaagggctggagagtagcattgctgctgagatgccgtccataccatgcctgaccaagattccggatgtccccaatctcccagaaatacctagtcgctgcgagatccctgaaggttcccgcctgccatcactgagcgacattagcgacgtctttgaaatgccatgcctgccggccatcccaagcgtgcctaataccccatccctgtcatccacaccaactctctcatgtgattcttggttgcaggggccgcttcaggagccggctgaggcccccgctacccggagagagctcttttctggctctaaccccggcaagctgggggaacctcccagtggagggaaagcgggccccgaagaggatgaggaaggcgtctcttttacggactttcagccccaagatgtcactcaacatcagggctttcctgacgaattggcatttcgctcttgctctgagatccggtcggcctggcaagctttagagcagggacaactagctagaccaggctttccagagcctcttttgatcctggaggactccgacctgggtggcgatagcggaagtggcaaggcaggcgccccgtcaagtgaacgtacagcttctagagtgagggaactggctagactgtactccgagaggattcagcaaatgcagcgcgctgagacaagagccagcgcgaatgctccacggaggcgccccagggttctggcccagcctcagccatccccttgtctgcctcaggaacaagctgagcctgggcttctgccagcgttcgggcacgtgctggtttgtgaactggccttccctctgacctgtgcccaggaatctgtgcctcttgggccagctgtgtgggtgcaagcagctatcccccttagcaagcaaggtgggtcgcccgatggccagggactacatgtttccaatctccccaagcaagatcttcctggtatccatgtctcagcggccaccctcctgccagagcagggcggtagccgccacgtgcaggccccggcagctacccctctcccaaagcaggaggggcctctgcacctccaggtccccgcccttaccacattctcagaccagggccatccggagatccaggtacccgcaaccacaccccttcctgagcatcggtcccacatggtgattcccgccccctccactgcattctgccccgaacaggggcactgtgctgacatccacgttcctactactccagctctgccaaaggagatatgcagtgatttcacagtttccgtcacgacccctgtcccaaaacaggaaggccaccttgatagcgaatccccaactaacatccctctcacgaagcagggaggaagtcgggacgttcagggacccgatcctgtgtgctctcagccaattcaacccctgtcgtggcatgggtccagtttggacccacaagggcctggagacaccttaccaccgctgccttgccatctcccagacttgcagatacctggaacatccccactgcccgcccatggctcccatttagatcatagaatcccagccaacgcccctctctctctgagccaggagctccccgacactcaagtgcccgcgactaccccgttgcccctcccacaggtgctgaccgatatctgggtgcaggcactgcctacctcgccgaagcagggcagtctccccgatattcagggaccagccgcagcgccccccctccccgaacccagtcttaccgacacacaggtccagaagctaaccccaagtctggaacagaagtcactgattgatgcacatgtccctgctgccactcccctaccagagcgcggcggaagcctggacatccaggggctaagtcccacgcccgtgcagacaaccatggtcttgagcaaaccaggcggttctctcgcttcccacgttgcgcgcaatctgtgggcttttaccggcccgcgtgggctcctcatgccacccagcacatgtgagcccggtcacgaggcaagcctgaaacaaggctttcagccagacgcaatcgacccacagaaccttacatggaagtcaaggcactag

SEQ ID NO: 25681 - DNA, 1128 bp, synthetic construct
  misc_feature 1..1128: note = Description of Artificial Sequence: Synthetic coding sequence
  source 1..1128: mol_type = other DNA
atgatgaagaagaacaacagcgccaagcggggcccccaggacggcaatcaacaaccagctccccccgaaaaagttgggtgggtccgcaagttctgcggcaagggcatttttcgtgagatctggaaaaacaggtatgtcgtgctgaagggagatcagctgtatatctccgagaaagaggttaaagacgagaaaaatattcaagaagtgttcgacctatccgattacgaaaaatgcgaggagttgagaaaatccaagtcccgatcaaagaagaaccatagcaagttcactctagcccactccaaacagcctggcaataccgccccaaatctcatcttcctggcagtcagtcctgaggagaaggaatcctggatcaacgcacttaactctgccattactcgggctaagaatagaattctggacgaagccagcacctcaacaagtgacggcatgctaacactggatttaattcaggaagaagatccaagtcctgaagagcccacatcttgtgcggaatccttccgagtggatcttgataagagcgtcgctcagttggccggatcaagaaggcgagcagactccgacaggatccagcccagcgccgatagggcttcttctctgtccaggccatgggaaaagaccgacaaaggggcaacctacacacctcaggcaccgaagaaattgacaccgactgagaagggacggtgcgctagtttggaagagatcctctcccagagggatgctgccagcgctcggacccttcaattacgtgcggaggagcctcccacaccagcgctccctaatcctggccagctgagccgcattcaagacctggtggctaggaagttagaggaaacccaggaattgttggccgaggtgcagggtctgggcgacggcaagcgaaaagctaaagaccccccccgaagcccgccggacagcgaatcagagcagctgctgctggaaactgaacggctgcttggggaggcaagtagtaattggagtcaggcaaagcgtgtacttcaagaagttagagaactccgcgatctgtacagacagatggacctgcaaacaccagattcacatctcagacagacaacaccacattcgcagtacagaaaatccttgatgtag

SEQ ID NO: 25682 - DNA, 1230 bp, synthetic construct
  misc_feature 1..1230: note = Description of Artificial Sequence: Synthetic coding sequence
  source 1..1230: mol_type = other DNA
atgatgaagaagaacaacagcgccaagcggggcccccaggacggcaaccagcagccagcacccccagaaaaggtgggctgggtccgaaaattctgcggcaagggtatcttccgggagatatggaaaaatcgctacgtggttctcaagggcgaccagctgtatataagcgagaaagaggttaaggacgaaaaaaacattcaggaggtcttcgatctttccgattacgaaaagtgcgaagagttaaggaaatccaaatcccggtcaaagaagaaccatagcaaatttaccctggcccacagcaaacagcccggcaacacagcccccaacctgatctttctcgccgtgtctcccgaggaaaaggagtcctggatcaatgcattgaattcggctattacccgtgcaaagaatcgaatcttggatgaagtcacagtggaggaggattcctaccttgctcaccccactcgggaccgggcaaaaattcagcactccaggagacctcccactagagggcacctcatggccgtggctagcacctctacatctgatggaatgttgactctcgatctcattcaggaagaagatccatcgcctgaggaacctacctcttgtgccgagagcttccgcgttgacctggataaatctgtggcacagctcgcaggctcccgaagaagagcagactccgatagaatccagcctagcgctgatcgggccagttccctctcccgcccgtgggagaaaaccgacaagggagcgacatacacgccccaggcccccaaaaaactcacccctacggaaaagggtcgctgcgcctctctagaagagattctatcacagagggacgcagcatcagcccgtactctgcagctccgagccgaagaaccccccaccccagcactgcctaaccctggacagctcagcagaatccaggacctggtagcccgaaaactggaagaaacccaagagctgcttgccgaggtgcaaggtctgggggatggcaaacgcaaggctaaagacccaccaaggtccccacccgattcagaaagtgagcaattgctcctggaaacagagcgtctgttaggggaggcgtccagcaactggtctcaagccaagcgcgtcctccaagaggttcgggagcttcgggacctgtacaggcagatggatctccaaacgcctgattcgcatctccgacagacaactccccacagtcagtacaggaaaagccttatgtag

SEQ ID NO: 25683 - DNA, 681 bp, synthetic construct
  misc_feature 1..681: note = Description of Artificial Sequence: Synthetic coding sequence
  source 1..681: mol_type = other DNA
atgctgaccctggacctgatccaggaggaggaccccagccccgaggagcctacatcctgcgcagagagttttagggtcgacctggacaagagcgttgctcagctggccggcagtagaagacgcgctgatagtgatcgcattcagccatccgctgatcgggcttcaagcctctctcggccatgggagaaaaccgataaaggcgcgacttacacgccacaggcacccaagaaactgacccccaccgaaaagggccgttgcgctagcctcgaagagatattgagtcaacgcgatgccgctagtgccagaacacttcagctgcgggccgaagaaccccctacaccggccttgcccaaccctggtcagttgtcaaggatccaggatttggttgccaggaagctggaggagacgcaggagctgctggctgaggttcaagggttgggtgatggcaaaaggaaggctaaagatccccctaggtctcctcctgattccgagtccgagcagctcctgctcgaaacggaaagactcctaggggaggcctctagtaactggagccaggcaaaaagagtactccaggaggttagggagttgagagacctgtatagacagatggaccttcagacccctgactcccatcttcggcaaactacgccacactcacagtatagaaagagtctgatgtag

SEQ ID NO: 25684 - DNA, 675 bp, synthetic construct
  misc_feature 1..675: note = Description of Artificial Sequence: Synthetic coding sequence
  source 1..675: mol_type = other DNA
atgcccagcaccctgcccagccccgagccccggaccgtgagctggatgtccacgagtcttcaagtgactgtcgaagaagactcctatttagctcaccctacaagagaccgcgccaagatccagcactcacgccgccctccaacccgggggcatctaatggcagtggcttccaccagtacttccgatggaatgcttactctcgacctgatccaagaggaagaccccagtccagaagagcccaccagttgcgctgagagtttccgggtcgacctggacaaatctgttgctcaactcgctggctccaggaggcgcgctgattcagatagaatccagcccagcgctgatcgtgcatctagccttagtagaccttgggagaagacggacaaaggagctacctacaccccccaagcaccaaagaaactgacacctaccgaaaaaggccggtgcgcctcactggaggaaatacttagccagcgtgacgccgcttctgccaggacactgcagttacgggccgaagagcccccgacgcctgccctgcccaatcctgggcagctgtcccgaattcaggacttggtcgcccgcaaactggaggaaacacaggagctgctagccgaggtgcaggggctcggcgatggaaaaagaaaagctaaggaccccccaagaagccctccatag

SEQ ID NO: 25685 - DNA, 384 bp, synthetic construct
  misc_feature 1..384: note = Description of Artificial Sequence: Synthetic coding sequence
  source 1..384: mol_type = other DNA
atgaccgccgccgccaccgccaccgtgctgaaggagggcgtgctggaaaagagatcaggtggcttactgcagctctggaagcgtaagcgctgcgttctcacagagagaggacttcagctgttcgaggccaaaggtacgggcggacgcccaaaggagctcagtttcgccagaattaaagcagtggagtgtgtggaaagtactggaagacatatttatttcactttggtcacagaagggggaggagaaatcgacttccggtgtccactggaggaccctggctggaacgctcagatcacgctgggtctggtcaagttcaaaaaccagcaagctatccagacagtgagggcgcgccagtctctcggcactgggaccttggtctcctag

SEQ ID NO: 25686 - DNA, 384 bp, synthetic construct
  misc_feature 1..384: note = Description of Artificial Sequence: Synthetic coding sequence
  source 1..384: mol_type = other DNA
atgaccgccgccgccaccgccaccgtgctgaaggagggcgtgctggagaaacgcagcggggggttgctccagctgtggaaaagaaagcgttgtgtgctgactgaacgtggattacagctcttcgaggcgaagggcacaggtggtaggccaaaggaactgagctttgcacggatcaaggctgttgagtgtgtcgagagcacaggcaggcatatctacttcacacttgtgacggaaggagggggcgagatcgacttccgatgcccactcgaagatcctggttggaacgcacagatcactctgggtctcgttaaatttaaaaaccagcaggctattcagactgtgcgggcccggcagtcactcggcaccggaaccctggtgagctag

SEQ ID NO: 25687 - DNA, 1710 bp, synthetic construct
  misc_feature 1..1710: note = Description of Artificial Sequence: Synthetic coding sequence
  source 1..1710: mol_type = other DNA
atgagcttcggcatcctgaagcccgacctgcggatcgtgttcgtgcacaacaaggcagtgatttggcagaaaagccgtgtctctgatcacaagatggcgcttatgagcgtgttgggaactgcagtgatgaacaatatggagtccttccagtatcactctgaagaatcacagatttacctttccggttttctcccaaagtgcgacgcagaccactcatttacctcacttagtacccctgaaaggtcctttatcttcattaatagtagaccggttcatcagaaagacattctgaagcttattcggcaccattataacctgaagtgtcttaaagagtccacaaggctgtatccagtgttcttcctcaagattgatgtgcccaccgctgatgtggacgtgaatctcacacccgataaatcccaggtgctgctgcaaaataaggagtctgtcctgattgccttagaaaacttgatgacaacatgttacggaccgttgccctcgacaaacagctacgaaaataataagaccgatgtctcggccgccgatattgtgctgagtaaaaccgcagaaaccgacgtgctgtttaataaggttgagagtagcggcaaaaactactcaaacgttgatacctctgttataccttttcagaacgacatgcataatgacgaaagtggtaaaaacacagatgactgccttaaccatcagatctctattggagacttcgggtacgggcactgctcctcagagattagcaacatagataagaacacgaagaatgcatttcaggacatatccatgtccaacgtttcatgggagaactcccagactgaatactccaagacatgctttattagctccgtcaagcacacgcagtccgagaatggaaataaggatcacatcgatgaatccggcgagaatgaagaggaagccggactcgagaatagttcagaaatcagtgcagatgaatggtcgcgtggaaacatcttgaagaattccgtcggtgagaacattgagccagtgaaaattctggtgcccgaaaagtcactgccctgtaaagtcagcaataacaactaccctatccccgagcagatgaacctgaacgaggatagctgcaataagaaatctaacgtaatagataataaatcgggtaaagtgaccgcctatgaccttctgtccaatagggtgatcaaaaagccaatgtccgcaagtgcactgttcgtgcaggaccatagaccacagtttctgatcgaaaaccctaaaacatccctggaagatgccactttgcagatcgaggagctgtggaagacactcagtgaggaggagaaactcaagtacgaggaaaaggctacaaaagatctggagcgatacaattctcaaatgaaaagggctatcgagcaagagagtcaaatgtcactgaaggacggaaggaaaaagatcaagcccacctcagcttggaacctcgcccaaaaacacaagcttaaaacctccttaagcaatcagcctaagctagacgagctgctgcagtctcagatcgaaaagaggaggagccagaatattaagatggtgcagattccgttctccatgaagaatctgaagatcaatttcaaaaagcaaaataaagttgatctagaggagaaggatgaaccttgcttgatccataaccttcgcttcccagatgcctggctgatgacctctaagaccgaaagcttctag

SEQ ID NO: 25688 - DNA, 2271 bp, synthetic construct
  misc_feature 1..2271: note = Description of Artificial Sequence: Synthetic coding sequence
  source 1..2271: mol_type = other DNA
atgagcttcggcatcctgaagcccgacctgcggatcgtgttcgtgcacaacaaagcagtgatttggcaaaagtcacgagtgtccgaccataaaatggctctgatgagtgtcttaggaacggccgtgatgaataacatggagtcttttcaatatcatagcgaagaaagccagatctacctcagcgggtttttgcctaagtgcgacgccgaccacagcttcaccagcctgagcacgcctgaacgtagcttcatatttatcaattcaagacccgtgcaccagaaggatatccttaagctgattcgccaccattacaatctgaagtgcctgaaggaaagcactagactttaccctgtcttctttcttaaaatcgacgtcccaacagctgatgtagatgtgaacttgacaccggataaaagtcaagtgctactccagaacaaagagagtgtgcttatcgctctagaaaatctgatgacaacgtgctatggccccctcccaagtacaaatagctacgaaaacaataagaccgacgtatctgcagcggacatagtgctgagtaagaccgccgaaactgacgtgctgtttaataaggtggaatcatctggcaaaaactattcaaacgtcgatacaagtgtgattcctttccagaatgacatgcataacgatgagagcgggaagaacactgatgattgcttgaatcaccagataagtattggcgattttggctacggtcattgcagctctgaaatctcaaacattgataagaataccaagaacgcatttcaagatatcagtatgtcaaacgtgtcgtgggaaaacagccagaccgaatattccaagacatgtttcatcagtagcgtcaagcatacccagtccgagaatggtaacaaagaccacatcgatgaaagtggagagaacgaggaagaagctggcctggagaactcctctgagatcagcgccgacgaatggtctcggggtaacatcctgaaaaatagcgttggcgaaaacatcgaacccgtaaagattttggtaccggaaaaatccttgccttgtaaagtgagtaacaacaactaccctattcctgaacagatgaatcttaatgaggattcctgtaacaagaagtcaaacgtgatagataacaaatccggaaaggtaacggcctatgatctgctctccaatcgcgttataaaaaagcccatgtcagcgtccgctctgtttgtgcaggaccatcgtcctcaatttctgattgagaacccgaagacttctttagaggatgccactcttcagatagaagagttgtggaagactttgagtgaggaggagaaactgaaatatgaggagaaggccacaaaggatcttgaaaggtataacagccagatgaagagagcaatcgaacaggaaagtcagatgagccttaaggacggacggaagaagattaagccaacgagcgcatggaacttggcccaaaagcacaaactgaagacaagcctgagtaatcagccaaaactcgacgaattgctgcagagtcagattgaaaagcgaaggtctcagaatattaaaatggtgcagatccccttttctatgaaaaatttaaaaattaactttaagaagcagaataaagtggacctcgaagagaaggatgagccgtgtctgatacacaacctgagattccctgatgcgtggctgatgacatcgaagaccgaagtgatgcttctgaatccttatcgtgttgaggaagctctcttgttcaaaaggctgctcgagaatcacaagctccccgctgaaccactggagaagcccattatgctgaccgagtcccttttcaacggctcccattatctggatgtactttacaagatgacggccgacgaccagcgatatagtggtagtacgtacttgtcagatccacggttaaccgctaatggattcaagattaaattaattcctggggtgtccataacggaaaattaccttgagatcgaaggcatggcgaactgtcttcccttttacggggtggctgacttgaaggagatcctgaatgccatcctgaatagaaacgcgaaagaggtgtatgagtgtcgtcctcgtaaggtcataagctatctggagggcgaggctgtgaggctcagcaggcaactccccatgtacctctccaaggaagatatccaggatatcatttatagaatgaagcaccaatttggcaacgagattaaggaatgcgtgcatggcaggcctttcttccatcatttgacatacctgcccgagactacatag

SEQ ID NO: 25689 - DNA, 222 bp, synthetic construct
  misc_feature 1..222: note = Description of Artificial Sequence: Synthetic coding sequence
  source 1..222: mol_type = other DNA
atgaagcagctgcccgccgccaccgtgcggctgctgagcagcagccagattataaccagcgtcgtcagcgtcgtaaaagaactgatagagaatagtctcgacgcaggtgcgaccagtgtagacgtgaagctcgaaaactacggttttgacaaaattgaagtgcgggacaatggagaggggatcaaagctgtggacgcgcccgtgatggcaatgaaatattag

SEQ ID NO: 25690 - DNA, 585 bp, synthetic construct
  misc_feature 1..585: note = Description of Artificial Sequence: Synthetic coding sequence
  source 1..585: mol_type = other DNA
atgaagcagctgcccgccgccaccgtgcggctgctgagcagcagccagataattacttccgttgtgtctgtcgtcaaggagctcattgagaattccctagatgcaggcgcgacatcagttgacgtaaagcttgaaaattacggctttgacaagatcgaagttcgcgacaacggcgaggggatcaaggccgtggacgccccagtgatggctatgaaatactacacctcaaaaatcaattcccacgaggacctggaaaacctcacaacctatggctttcgaggagaggcactgggctcaatttgttgcatcgctgaagtgctgatcactaccagaactgcagccgataatttcagcacacagtacgtactggatggttctgggcacattctgtcccaaaaaccttctcacctaggacagggaacaacagttactgctctccggttatttaaaaatctgcccgtgagaaaacagttttattccacagcaaaaaaatgcaaagatgaaatcaagaagatccaggatctgctgatgagctttgggatcctgaagcctgatctgcgcatcgtgttcgtacataataaatag

SEQ ID NO: 25691 - DNA, 2271 bp, synthetic construct
  misc_feature 1..2271: note = Description of Artificial Sequence: Synthetic coding sequence
  source 1..2271: mol_type = other DNA
atgagcttcggcatcctgaagcccgacctgcggatcgtgttcgtgcataataaggccgtgatctggcagaaaagcagagtgtccgatcacaagatggccctgatgtctgttctgggcacggccgtcatgaacaatatggagagctttcagtaccactctgaggagagccagatatatctgtctggtttcttgcctaagtgtgatgccgatcacagctttacctccttatcgactcctgagaggtcttttatattcataaattccaggccagtgcaccagaaggacattcttaagcttatccgtcaccactataatctgaagtgtctgaaagagtccacacgtctgtaccccgttttcttcctgaagatcgatgtgccgactgcagatgtagatgtgaatctgacccccgacaaatctcaggtgttgttacaaaataaagagagtgtgctcatcgctttggagaacttgatgacaacctgctacgggcctctgccatcaaccaactcgtatgagaataacaagaccgacgtgagcgccgctgatatagtcctgagtaagaccgctgagacagacgtcctgttcaacaaagtagagtcgagcggcaagaattactcaaatgtggatacgtcagttatcccgtttcagaacgacatgcacaatgatgaatctggaaagaatactgatgattgcctgaaccatcagattagcataggagactttggatacggtcattgttcatctgaaatcagcaatatcgacaagaataccaagaacgcctttcaagatatttccatgtctaatgtcagctgggagaactcacaaaccgagtattccaaaacatgtttcatttcatctgtaaagcacacccagtccgaaaatggaaataaagatcacattgacgaatccggagagaatgaggaagaggccggactggagaatagctcggaaatatccgccgacgaatggtcccgaggtaatatcctcaaaaacagcgtgggtgagaatattgaacccgtgaagatcctggtccccgaaaagtcactcccatgtaaagtttctaataataactacccaatccccgagcagatgaacctgaacgaagattcctgcaacaaaaagagtaatgttatcgataataaaagcggaaaagttaccgcttacgatctcctgtccaatagagtaataaagaagcctatgtccgcctccgccctttttgtgcaggatcatcgcccgcagttcctgattgaaaaccccaagacttcccttgaggacgccactctgcaaattgaagaactttggaaaacactgtcagaggaggagaagcttaagtatgaggaaaaggctactaaggacctcgaaagatataattcccagatgaagcgggcaatagagcaggagagccagatgtctttaaaagacggccgaaagaagattaagcctacaagcgcgtggaatcttgcccagaaacataagctgaagacttcgctgagtaatcaacctaagctggacgagctcctgcagtcacagattgagaaaagacggagccagaacatcaaaatggtccaaatcccattcagcatgaaaaacctgaagattaacttcaagaaacagaacaaggtggacctcgaagagaaggatgagccttgtctgatccacaacctgcgcttcccagatgcgtggttgatgacatctaagacagaagtaatgctcctgaatccttatcgggtcgaggaagcactactgttcaaaaggctgttggagaaccataagcttcccgccgagccccttgaaaaaccaatcatgttgacggaatctttgtttaatggaagtcactacctagatgtcctttacaaaatgactgctgatgaccagagatatagtggcagtacatatctttccgacccccgcctaaccgctaatgggtttaaaattaaactgatccctggcgttagtatcacagagaattatttggaaattgagggaatggccaactgcttaccattttacggagttgcagatctaaaagaaattctaaacgcaattcttaatcgcaatgctaaggaggtttacgagtgccgtcctcgtaaagtcatttcctacctggagggagaggccgtgcggctctctagacagttacctatgtacctttctaaggaagacatccaagacattatttaccgaatgaagcaccagttcggcaacgagataaaagagtgtgtacacggacgccccttctttcaccacctcacttacctgcccgagacaacttag

SEQ ID NO: 25692 - DNA, 2799 bp, synthetic construct
  misc_feature 1..2799: note = Description of Artificial Sequence: Synthetic coding sequence
  source 1..2799: mol_type = other DNA
atgaagcagctgcccgccgccaccgtgcggctgctgagcagcagccaaattataacatcagttgtttcagttgttaaggagctgatagagaatagtctcgacgctggtgcgaccagtgttgatgtaaaactcgagaactacggctttgacaaaattgaagtacgggataatggcgaaggcatcaaagctgtcgatgcgcccgttatggcaatgaagtattatacttccaagatcaactcccatgaagatctggaaaatctcacgacctacggttttcggggcgaggccctgggctccatctgttgtattgcagaggtgctcatcactacaagaacagctgcagataatttttcaactcaatacgtccttgatggatccggccatatcctgtcccaaaagccatcgcacttagggcaaggtaccactgtgaccgccctgcgactctttaagaatttgcctgtgagaaaacaattctactctacggctaagaagtgcaaggacgaaattaagaagatccaggacttgttaatgagcttcggcatcctgaagccggacctgcgcatagtgtttgtgcacaataaagccgtgatctggcagaagagccgcgtcagtgaccataagatggccctcatgtccgttctggggacggccgtaatgaataatatggaaagtttccagtaccattcggaggagtctcagatctatctgtcagggttccttccaaaatgcgacgccgaccatagttttaccagcctgagcacaccagagagaagtttcatcttcattaattcccgtccggtacaccaaaaggacatcttgaagctgattaggcatcattataatctcaaatgccttaaggagagcacccggctgtatcctgtctttttcttaaagattgatgtccccacggctgatgttgatgtcaaccttactcctgacaagagccaggtacttcttcagaacaaagaaagtgtattgattgctctggagaatcttatgactacatgttatggcccattgcctagtaccaattcatatgaaaataataagactgacgttagcgcagcggatattgttctttccaaaaccgccgagaccgatgtgctgtttaacaaggtggaatcctctggaaagaactactctaatgtggacacgtctgtaatcccattccagaacgacatgcacaacgacgagagcggcaaaaataccgatgactgtctgaaccaccagatcagtatcggagactttggctatggacactgctcctctgaaattagcaacattgataagaacacgaaaaatgcttttcaggacatatccatgagcaacgtctcttgggagaactcccaaaccgaatattctaaaacatgttttatttcctcagttaagcacactcagtcggaaaacggtaacaaggatcatatagatgaatccggagaaaatgaagaagaggcaggcctggagaattccagtgaaatttcggccgacgagtggtcacgcggcaatattttgaaaaacagtgtcggagaaaacatagagcccgtgaaaatacttgttcccgagaagagcctgccctgtaaggtctctaataataattacccaatccccgagcagatgaacttaaatgaggacagctgtaacaagaagtcaaatgtcatcgacaacaagtccgggaaggtgaccgcatacgacctcttgtccaaccgtgtcattaagaagcctatgtctgcctcagcgctgttcgtccaggaccaccgcccacaattcctaattgaaaatccaaaaacaagcctcgaagacgctacattgcagatagaagaactgtggaaaacgctttccgaggaggagaagctgaaatatgaggagaaagcaactaaggatctggagagatataacagccagatgaaacgggctattgagcaggaaagtcagatgagcttgaaagatggcaggaagaagattaagccgacatccgcttggaatctggcgcaaaagcacaagttgaagacctccttatccaatcagcctaagctggatgagctgctgcagagccagatcgaaaagcgccgttcacagaacatcaagatggttcagattccgttttcaatgaaaaatttgaagattaatttcaaaaagcaaaacaaggtggacctggaagagaaagacgaaccttgcctgatccataacctgcgtttcccagatgcctggcttatgactagtaaaaccgaagtcatgctgctgaatccctatagggtggaagaggctttgctgtttaaacgcctgctcgaaaatcacaagcttcccgccgagccattagagaagcctattatgctgaccgaatcattgtttaacggcagccactatcttgacgtgttatacaagatgaccgctgacgaccaacggtactctgggtccacctatttgtcagaccccagactgaccgctaatggattcaagatcaagctgataccaggcgtctccatcactgaaaactatctggagatcgagggaatggccaattgtctgcccttctatggcgtggctgacctgaaggagattctcaacgccatcttgaaccgaaacgccaaagaggtatacgagtgcaggccaaggaaagtcatctcatatttggagggcgaagctgtacggctcagtcgccagctcccaatgtacctttccaaagaagacatccaggacattatttaccgaatgaaacatcagttcggaaacgaaatcaaagagtgtgtccatgggagacccttcttccatcatctgacctacctgcccgagaccacgtag

SEQ ID NO: 25693 - DNA, 135 bp, synthetic construct
  misc_feature 1..135: note = Description of Artificial Sequence: Synthetic coding sequence
  source 1..135: mol_type = other DNA
atgaagcagctgcccgccgccaccgtgcggctgctgagcagcagccaaatcattacctcagttgtatctgtggtgaaggagctcatcgagaattccctagatgccggtgccacctccgttgatgtgaagctatag

SEQ ID NO: 25694 - DNA, 2313 bp, synthetic construct
  misc_feature 1..2313: note = Description of Artificial Sequence: Synthetic coding sequence
  source 1..2313: mol_type = other DNA
atgaagcagctgcccgccgccaccgtgcggctgctgagcagcagccagatcatcacctccgttgtgagcgtggtgaaggagttgatcgagaattctctcgacgcaggagccacatccgttgacgtgaagcttgaaaattacggattcgacaaaattgaagtgcgcgataacggagagggcatcaaggccgttgacgcccctgttatggctatgaagtactatacttccaagatcaattctcacgaagacctggagaacctgaccacctacgggtttcgcggcgaggccctggggagcatctgttgcattgccgaggtgttgataactacccgtacagcggccgataatttctcaacgcagtatgtgcttgacggatcagggcacatcctatcccaaaaaccgtcccacctcgggcagggcaccactgtgactgcccttcgcctatttaaaaatctgcctgttcgaaagcaattctacagtacagccaaaaagtgcaaagacgaaataaaaaagatacaggatcttctcatgagcttcggtattctcaaaccagacctgagaatcgtattcgtgcataacaaggcggtgatctggcagaagtccagagtgtcagatcataagatggctctaatgtcagtgctgggcacagccgtgatgaacaacatggagtccttccagtaccactccgaggagagccagatctacctgtctgggtttctaccaaagtgcgacgccgaccactcatttacctctctgtctactccagaacggtctttcatctttattaattctcgcccagtgcatcagaaggatattctcaagttaatccggcaccactataacctgaagtgtttgaaggaaagcacgcggctctatccagtgttctttttgaaaattgacgtgcctacagccgacgtagatgtcaacctcaccccagataagtcacaggtactcctgcagaataaggagtcagtgctaatcgctcttgagaacctcatgactacctgttacggcccgctgccgagcacgaattcttatgagaataataagaccgacgtctccgccgcggacatagttttgtccaagacagctgaaaccgacgtgcttttcaacaaagtggaaagtagtggtaaaaattacagtaatgtcgatacttcagtgattcctttccaaaatgacatgcacaacgacgaatctgggaaaaacactgacgactgtttgaaccaccagataagcatcggcgacttcggatatggacactgcagctccgaaattagcaatattgacaagaataccaagaatgcttttcaggacatatcaatgtccaacgtgtcctgggagaactcccagacggagtattcgaagacctgtttcatttctagcgtcaagcatactcaaagtgaaaacgggaataaagaccatattgatgagtctggggagaacgaagaagaagccggcctagagaattcctccgaaatatcggctgacgaatggagccgcggaaacattttgaagaactcagtcggggaaaacatcgagccagttaagatcttggtcccggaaaagagcctcccttgtaaggtgagtaataataactatccaattcctgagcagatgaacctcaacgaagatagctgtaataaaaagtcaaatgtgatcgacaataagagcgggaaagtgactgcatatgaccttcttagtaatagggtgattaaaaaacctatgagcgcctccgctctgtttgtccaggaccatcggccacaatttctcattgaaaaccctaagacctctctggaggatgccacccttcagatagaggagctgtggaaaacgctctcagaggaggagaaactgaatttgtttaacggtagccactatctggacgtgctctataagatgacagcggatgatcaacgatactctggatcgacctatcttagcgatccccggttaacagcgaacgggttcaagatcaagctgattccaggcgttagcattacagagaactaccttgaaatcgagggcatggcgaattgtctgcctttttatggcgttgccgatctgaaggagattctgaacgctattctcaatcggaatgcaaaggaggtatacgaatgccgtcctcgaaaggtgatttcctatctggaaggggaggccgtgcggctgtcccggcagctgcctatgtacctctccaaggaggacatccaggacatcatctataggatgaaacatcagttcggaaatgaaataaaggagtgcgtgcacggaaggccattcttccatcacctgacctacttgccagaaacaacctag

SEQ ID NO: 25695 - DNA, 2682 bp, synthetic construct
  misc_feature 1..2682: note = Description of Artificial Sequence: Synthetic coding sequence
  source 1..2682: mol_type = other DNA
atgaagcagctgcccgccgccaccgtgcggctgctgagcagcagccaaataatcactagtgtcgtgtcagtggtgaaagagctcattgaaaactctcttgacgccggggccacaagcgtggatgtgaagctagaaaattacggtttcgataagattgaagtgcgcgacaatggagagggaatcaaagcggtagatgcccctgtgatggctatgaaatattacacaagcaaaattaacagccatgaggatctcgagaacctgactacctatgggttccgcggagaggcgctgggatcgatttgctgtattgcagaggtactgatcaccacaaggacggccgcagacaacttttctacgcagtacgtattggatgggtcggggcacatcctcagccagaagccatctcatctggggcaaggtaccaccgtcactgccctgagactgttcaagaacctaccggtcagaaagcaattctacagcacagcgaaaaagtgtaaggatgagatcaaaaagattcaagatctcctgatgtcatttgggatcttgaaacctgacctaagaattgtgttcgttcataataaaatctacctcagtgggtttctccctaaatgtgacgccgaccactcttttacatccttgtctactcctgagcgttcttttatattcatcaatagccgccctgtgcatcagaaagatatcttgaagcttatccgtcatcattataacctgaagtgtctcaaggagagcacacggctgtacccagttttctttttaaaaattgatgtccctaccgcggatgtggacgtcaatcttacacctgataaatcgcaggtgctcctgcagaataaagagtctgtgttgattgctctggagaacctgatgactacatgctacggacctctgccatcaacaaacagctacgaaaacaacaagacagatgtatccgctgctgacatagtgctgagcaaaacagccgaaacagacgttctttttaacaaggtcgagtcatctggaaaaaactattcaaatgtcgacacgtcagttattcctttccagaatgatatgcataacgacgagtccggtaaaaacaccgatgactgtctgaaccaccagatatccataggcgattttggctacgggcattgctccagcgagatttctaacattgataaaaacacaaaaaatgcctttcaggatatctccatgagcaacgtaagttgggaaaattcacagacggagtattcaaagacctgcttcatctcaagcgtgaagcacacccagagtgaaaacggtaataaagatcatattgatgagagcggcgaaaacgaagaagaagctgggttggagaacagttctgaaatcagtgccgatgaatggtctcggggtaacatattgaaaaattctgtgggcgaaaatattgagcccgttaaaatcctagttcccgagaaatcgctgccctgcaaggtgtctaataacaactatcctatacccgagcaaatgaatttgaacgaagatagttgtaataagaaatcaaacgtgatcgataataagagtgggaaggtcacggcgtacgatttactgagcaatagggtcattaagaagcccatgagtgcctcagccttgtttgtgcaagaccacagaccacagttcctgatcgagaatcctaagacatccttagaagacgctacccttcagatcgaggaactttggaaaacactatccgaggaggaaaaactcaaatacgaagaaaaagcgaccaaagatctggagcgttacaacagtcagatgaaacgggccattgaacaggagtcacagatgagcctgaaggatggacggaaaaaaataaagccaaccagcgcttggaacctggcccagaagcataagctcaaaacctctctctctaaccaacctaaactagatgaactgcttcagtcacaaatagaaaagcgacgctctcaaaacattaaaatggtccagatccccttctccatgaagaacctgaagattaactttaagaaacaaaataaggtggacttggaagaaaaggatgagccttgcctgatccacaacctccgcttccctgacgcctggctgatgacctcaaaaaccgaggtgatgctactgaacccatatcgcgttgaggaggccctgcttttcaaacggcttctcgaaaaccacaagctccccgctgagcctctcgaaaagcctatcatgcttaccgaaagcctttttaatggctctcactaccttgatgtgctttacaagatgactgctgacgaccaacgttactctggatccacatacctctctgaccctaggctgactgctaacggtttcaagatcaaactgatccctggagtgtcaataacagaaaactatctggaaatagagggtatggcaaattgtttgcccttctatggagtagcagatctgaaagaaatcctgaacgccattttgaaccgcaacgcaaaggaggtctatgagtgccgcccacgaaaagtcatctcgtatctagagggagaggccgtgaggttaagccgccagctgcccatgtatctcagtaaagaggatattcaagatatcatctatcgtatgaaacatcagtttggcaatgagatcaaagaatgtgttcatgggagaccttttttccaccacttgacctacctgccagagacaacatag

SEQ ID NO: 25696 - DNA, 2589 bp, synthetic construct
  misc_feature 1..2589: note = Description of Artificial Sequence: Synthetic coding sequence
  source 1..2589: mol_type = other DNA
atggagcgggccgagagcagcagcaccgagcccgccaaggccatcaaaccgatcgacagaaagtccgttcaccagatttgctccggccaggtcgtcttaagcttgtcgaccgcagttaaggaattggtagaaaactccctcgatgcgggcgccactaatatcgaccttaagttgaaagactacggggttgatctgatcgaggtgtcagataatggttgtggagtggaggaggagaacttcgaggggttgactctcaagcaccatactagtaaaattcaggagttcgctgacttgacgcaggttgagaccttcgggttccggggggaggctctttcatcactgtgtgctctgtccgatgtgacgatcagcacgtgtcatgcgtctgcgaaagtgggcacaagactgatgtttgatcataacggcaaaatcattcagaaaactccataccctaggcctaggggaacaactgtgagcgtccagcagctctttagcaccctcccagtgcggcataaagagtttcaaaggaacattaagaaagagtacgcaaagatggtccaggtattgcatgcatactgtatcatcagtgctgggataagggtgagctgcaccaatcaactcggccagggcaaacggcagccagtcgtatgtaccggagggtctcctagcattaaggaaaatatcgggtcagtttttgggcagaagcagctccagtcactaattccatttgtccagctgcctcccagtgattcagtgtgcgaggagtacggcctctcttgctccgatgctcttcacaacctattctacatttctgggtttatatctcaatgtactcatggtgtgggccggtcctccaccgataggcagttctttttcataaaccgcagaccttgtgatccagcaaaggtgtgtcgcctggtcaacgaggtctaccacatgtacaatagacatcaatacccgtttgttgtgctgaacatctccgtggactcagaatgcgtggacattaacgtaacccccgataagcggcagattttgctgcaggaagaaaaactccttctcgcggtgctgaagaccagcctgatcggcatgttcgactctgacgtgaacaagctgaatgtctcacagcaaccacttttggacgtagaggggaatcttatcaagatgcacgctgccgatttagaaaagcccatggtggaaaaacaggaccagagcccatccctacggaccggagaggaaaagaaggacgttagcatcagtcgcctcagggaggccttcagcctccgccacacaacggagaataaaccccactcccctaaaactccggagccccgtagatctccactgggccagaaacgtgggatgctctcatcctctacctctggtgcaattagcgataagggtgttctgagacctcaaaaagaggccgtaagcagctcccacggaccatccgaccccaccgatagggcagaagtggaaaaggactccggccatggcagcaccagtgtagactccgaaggtttctccattcccgacactggtagtcactgtagtagcgagtacgccgccagtagccctggggacagaggatcacaagaacatgtggacagtcaagagaaagcgcccaaaaccgacgactccttttctgatgtcgattgtcactctaatcaggaagatacggggtgtaaatttcgggttctaccccagcctaccaatctcgccactcctaacacaaaacgcttcaaaaaggaggaaatactaagtagctctgacatctgccagaaactggtcaatacgcaggatatgtccgcctcacaggtagatgtggctgtgaagattaacaagaaagtcgtgcctttagatttttctatgtcatcacttgccaagcggatcaaacaactacatcacgaagctcagcagtccgagggcgaacagaattatcgaaaattccgcgcaaaaatctgccccggcgagaaccaggccgctgaggacgaactccgtaaggaaatttccaaaacgatgttcgcagaaatggaaatcatcggccagtttaacttaggctttataatcactaagctgaacgaggacattttcattgtggaccagcacgccaccgatgagaaatacaatttcgaaatgctgcagcagcatactgtcctgcagggacaacgcctgattgcccctcagacgcttaatcttacggctgttaacgaggccgtgcttatcgaaaatctggagattttcagaaagaacggctttgatttcgtcattgatgagaatgctccagtgaccgagagagcaaaattgatatctttgcccaccagcaagaattggacattcggacctcaggacgttgacgaacttattttcatgctgtcagattctccaggggtcatgtgtagaccttctcgggtgaaacagatgttcgcctcccgagcctgtagaaagtcagttatgatcggtactgcgttgaacacatcagagatgaagaaattaatcacacacatgggcgagatggatcatccctggaactgccctcacggaaggcccacaatgcgacatattgcaaaccttggcgtgatcagccagaactag

SEQ ID NO: 25697 - DNA, 1386 bp, synthetic construct
  misc_feature 1..1386: note = Description of Artificial Sequence: Synthetic coding sequence
  source 1..1386: mol_type = other DNA
atggagcgggccgagagcagcagcaccgagcccgccaaggccatcaaacctattgacaggaagtccgtgcatcagatttgctcaggccaggttgttttgtctctctctactgcggttaaggaacttgtggagaactccctggatgcaggcgccaccaacatagacctaaaactgaaagattacggggttgatctgatagaggtgtccgacaacggatgtggcgtcgaagaagagaattttgaagggctcaccttgaagcaccacacttcgaagatacaggagttcgcagacttgacgcaggtggagacgtttggatttcgcggggaagccctgtcgagcttatgtgcgctgtcagacgtgaccatttcaacatgtcacgcgtctgccaaggttggaacacggcttatgttcgatcataatgggaagatcatccaaaaaaccccctacccaagaccacgtggtacaaccgtaagcgtccagcagctcttctccaccctccctgttcggcacaaggaattccagagaaatattaaaaaagagtatgcgaaaatggttcaggtactgcatgcctactgcatcatcagtgccggtatccgggtgtcgtgcaccaatcagctgggccaaggcaaacgccaaccagtggtttgtacgggcggctcccccagcattaaagagaatatcggctccgtctttgggcaaaaacagctacagagccttattccctttgttcagctgcctccctccgattccgtttgcgaggagtacgggctgtcctgctccgatgccctgcataatctcttttataagaccatgtttgcagagatggagataattggccagtttaatctgggcttcattattaccaagctaaatgaggatattttcatcgtggatcaacatgctaccgacgagaaatacaattttgagatgcttcagcagcacactgtgttgcaaggccaaaggctcatagcaccacagacccttaacctgaccgcagtgaacgaagccgtactgattgaaaacctggagatattccgaaagaacggattcgatttcgttatcgatgagaacgcacctgtaacagagcgagccaaactgatctccctgcctacaagcaagaattggacgttcgggccacaagatgtcgacgagctgatatttatgctcagtgattcaccgggagtcatgtgtcgaccctcaagggtgaagcagatgttcgcctctcgagcctgcagaaaaagtgtgatgattggtacggctctcaacacatccgagatgaagaaactcataactcacatgggagagatggaccacccgtggaattgtcctcacgggaggcccaccatgcgccacatcgcaaatcttggtgtaattagtcagaactag

SEQ ID NO: 25698 - DNA, 2448 bp, synthetic construct
  misc_feature 1..2448: note = Description of Artificial Sequence: Synthetic coding sequence
  source 1..2448: mol_type = other DNA
atggagcgggccgagagcagccggagcaagctgaaggactacggcgttgacctcatcgaggtgtccgacaacggatgcggcgtggaggaggagaattttgaaggtctgactctgaagcatcatacttcgaagatccaagaatttgcagatctgactcaggtggaaacattcgggttcagaggtgaagctttgagtagcctgtgtgcactctccgatgtgacaataagtacatgccacgcctcggcaaaggtgggaactcgcctcatgttcgaccataacgggaaaatcattcagaagacgccgtacccgcgaccgcggggaacaaccgtctccgtgcagcagctgttctctacgcttccagtccgccataaggaattccagcggaacatcaagaaagagtacgccaagatggtccaagtgctccatgcctattgcatcatcagtgcaggcatccgggtttcctgtacgaatcaactgggccaaggcaaacggcagccggtggtctgtactggcggctccccttcaatcaaagagaacattggctcagttttcggacagaagcagttgcagtcattgatcccatttgtgcaattgcctccatctgattcggtttgtgaggagtatggactgagttgcagtgatgcattacataacctcttctacatctcaggtttcatatcacagtgcacacacggtgttggaagaagttccaccgatcgccagttcttttttataaacagaaggccgtgtgatcccgcgaaagtctgccgcctcgtgaatgaggtgtaccacatgtacaatcggcaccagtatccattcgtagtacttaatataagtgtcgattccgaatgcgtcgatattaatgttacacccgataaaaggcagatactccttcaagaggaaaaactgcttcttgcagtccttaagacatctctgattggaatgtttgattcagatgtgaacaagctgaacgtgtctcagcagccgctgctcgatgtggaaggtaacctgatcaaaatgcacgcagccgatttggagaagcctatggttgagaaacaagaccaaagccccagtctaagaacaggcgaggaaaagaaagacgtgagtatttcacgattgcgcgaggcattttcattaagacacacgactgaaaacaagccgcactctcctaagacgccggaacccaggcgcagcccacttgggcagaaaaggggcatgttatcctccagtacatcaggcgcaatcagtgataaaggtgtcctacggccccaaaaggaggctgtttccagtagccacggacccagcgaccccactgatcgcgctgaagtcgaaaaagacagcggccacggcagcacttccgtggactccgagggattcagcataccagacaccggttcgcattgctcctcggagtacgctgcttcgagcccaggcgatcgtgggtcccaagaacatgtcgacagtcaggagaaagccccgaagacagatgacagctttagcgatgtggattgccattcgaaccaagaagacaccggctgtaagttcagagttctccctcagccaacgaatctcgcaacccctaatacaaaaagatttaagaaggaggaaatcttatctagctcagatatatgtcagaagcttgtgaatacacaggatatgtcagcatcgcaggtcgacgtggcagtcaagattaacaagaaggtggtgccactggacttttccatgtcttccctggcgaagaggatcaagcagctccaccatgaggcccaacagtctgaaggcgagcagaactatcgcaaattcagggccaagatctgccctggggagaaccaggcggcagaagatgaattgcggaaagaaataagcaaaaccatgtttgccgagatggagataatcggccagtttaacctaggatttatcataactaaacttaacgaagacatttttatcgtggaccaacatgcaactgacgagaagtataactttgaaatgttgcagcagcacaccgtgctccaaggacagaggctaatcgcgcctcaaaccctcaatctgactgctgtgaacgaagctgtccttatcgaaaatctggagatatttaggaagaatggattcgacttcgttatcgacgagaatgccccagtcacggaaagagctaagcttatttctctacccacctccaaaaattggacctttgggccccaggacgttgacgagctaattttcatgttgtctgactcccctggcgtgatgtgcagaccctcccgcgtcaaacagatgttcgcatctcgtgcatgtcgaaagtctgtgatgatcggcacggctctaaacacttcagaaatgaagaaactgatcacccatatgggcgaaatggaccacccctggaactgcccacacggccgccccacaatgcggcacatcgccaacctgggcgtgatcagccaaaattag

SEQ ID NO: 25699 - DNA, 1719 bp, synthetic construct
  misc_feature 1..1719: note = Description of Artificial Sequence: Synthetic coding sequence
  source 1..1719: mol_type = other DNA
atggagcgggccgagagcagcagcaccgagcccgccaaggccatcaagccaatcgacaggaaatccgtgcaccaaatctgctccggacaggtggtgctatctctctctacggccgtcaaggagctggtggagaacagcctcgacgccggagccaccaacatcgacttgaagctcaaagattatggtgttgacctgatcgaggtgtctgataatggctgtggggtggaggaagagaactttgaagggctgacactaaaacatcatactagtaagatacaggaatttgcagacttaactcaagtcgaaactttcggattccgtggtgaggcactgagtagtctctgtgctctcagtgacgttaccattagcacttgtcacgccagcgcaaaggttggcactagacttatgtttgaccacaacggcaagatcattcagaaaactccgtacccccgcccacggggcactaccgtgagtgtgcagcagttattttcgaccttgccagtgcgtcataaggagttccagcggaacattaagaaggagtatgctaaaatggtacaggttctgcatgcttattgtattatatccgctggcatccgagtatcctgcaccaaccaattaggtcagggcaagcgtcaacccgtggtgtgcacaggcggctccccctccataaaagagaacatcggctccgtgttcggacaaaaacaattgcaatccctgattccattcgttcagttgcccccttccgactcggtatgtgaagagtatggattgtcctgttctgacgcactgcacaacctgttttatatctcgggctttattagccaatgcacgcatggggtaggcaggagcagtactgaccgccagtttttctttattaaccgtagaccctgtgatccagctaaagtctgcaggctggtgaatgaagtgtatcacatgtataatcggcaccagtacccatttgtcgtcctgaacatttcagtggattcagagtgtgtcgatataaacgtcactcccgacaagaggcagatccttctccaagaagagaaacttctattggcagtcttaaaaactagtttgataggaatgttcgactccgatgttaacaagcttaatgtgagccagcagccgctgctcgacgtagagggcaacctcatcaagatgcatgctgcagatctggagaagcccatggttgaaaaacaggaccagagtccatccctgcgtacaggagaggaaaagaaagacgtgtcaatctcccgccttcgggaggcattctcgcttcggcacaccacagaaaacaaacctcatagtcctaagaccccggaacccagacgttcccccctgggccaaaaaagaggcatgctaagctccagcacatcgggggccatctcagataaaggggtgcttcggccccagaaggaagccgtctcaagttcccacggtccttccgacccgacagaccgcgccgaggttgagaaggattctgggcacggctctacgtccgtggattccgaagggtttagcataccagacactggctcccattgttcgagcgaatacgcagcctcttctcctggggaccgtgggagccaagagcacgtggattcacaagagaaagcacccaagacggacgacagcttctcagacgtcgactgtcacagtaaccaggaagataccggtcttaagaccggaccgtccgatccccgcacttctatgaactag

SEQ ID NO: 25700 - DNA, 2271 bp, synthetic construct
  misc_feature 1..2271: note = Description of Artificial Sequence: Synthetic coding sequence
  source 1..2271: mol_type = other DNA
atgtggggccggcggcggaagctgcggcggctgaacgacgtgaccatttccacatgccatgcctcagcgaaagtcggcacccggctcatgttcgaccacaatggaaaaatcatacaaaagactccctatccaagaccaagaggaaccacagtctccgtacaacagcttttcagcacgcttccagtaagacacaaggaatttcagaggaatataaagaaagagtacgccaagatggtacaggtgttgcatgcttactgtataatttccgctgggatcagggtatcttgcactaaccagttaggtcagggcaagcggcagcccgtggtgtgtaccgggggaagtccaagtataaaggagaacatcggatcggtcttcggacaaaaacagttacagtctctgatcccatttgtgcagctgccgccttccgattccgtttgcgaagaatatggattgagttgtagcgacgcccttcacaacctgttttacattagtggctttatctcccagtgcacacatggcgtgggccggtccagtactgaccgccaatttttttttattaatcgccgcccatgcgaccctgccaaggtgtgcaggctggtgaatgaggtataccatatgtataaccgacatcaatacccattcgttgtgctaaatatctccgtggactctgagtgcgtagacattaacgtgacgcccgataagcgccaaattttgctgcaggaagagaagctactcctggccgtgctgaagaccagcctgattgggatgttcgactccgacgtcaataaattaaacgtgtcgcaacagcccctcctggacgtagaaggcaacctgattaaaatgcacgccgccgatctggagaagcccatggtggaaaagcaggatcagtcccctagtctccgcacaggagaagagaaaaaagacgtctccatctctagactccgcgaagccttctcacttcgccacacaacagagaacaaaccacacagcccaaagactcccgagcccagaaggtctcctctaggccagaaaagaggtatgctgtctagctcaacctcaggcgccattagtgataagggggtgttacgcccacagaaggaggcagtctccagtagtcacggcccctctgacccaactgacagggctgaggtggagaaggatagcggccacggctctacatctgtggatagcgaaggcttttccattcccgatactgggagccactgctcaagtgaatatgctgctagctcacccggtgatcgtggatcccaagagcatgttgattcacaggagaaggctcccaagacagacgacagcttctccgacgttgattgtcactccaatcaggaggatacgggatgtaaattccgggtgctgccacagccaacaaatctcgccacacctaacacaaagagattcaagaaggaggaaatcctgagctcaagcgacatctgccagaagctggtgaacacccaggacatgtcggcctctcaggtggatgtggctgttaagattaataagaaagtcgtgccactcgatttcagtatgagctccctcgcgaagaggataaagcagctccaccacgaggctcagcagtcagaaggtgaacagaactaccggaagttccgcgccaagatatgcccaggcgaaaatcaagcagcggaggatgagctgcgcaaagagatcagtaaaacaatgttcgccgagatggaaattatcggccagttcaacctcgggtttataataacaaaactgaacgaagacattttcattgttgaccaacatgccactgacgagaagtacaattttgagatgctgcagcagcacacggttctccaagggcagagactcatcgctccccagactctgaaccttacagcagtcaacgaggccgtgcttatcgagaatctggagatttttagaaaaaatgggtttgacttcgtaatagatgagaacgcccctgtcacagagcgggcgaaactgataagcctaccaacgagcaagaattggactttcgggcctcaggatgtcgatgagctcatcttcatgctatccgacagccccggcgtaatgtgccggccgtccagggtcaaacagatgttcgccagccgggcgtgtaggaaatctgttatgattgggactgcattgaatacttcagagatgaaaaagctgatcacacacatgggggaaatggatcatccatggaactgccctcacggaaggccgaccatgcggcacatcgccaatttaggggtcatctcacagaactag

SEQ ID NO: 25701 - DNA, 1812 bp, synthetic construct
  misc_feature 1..1812: note = Description of Artificial Sequence: Synthetic coding sequence
  source 1..1812: mol_type = other DNA
atgagcgccgccgtgaccgccggcaagctggcccgggcccccgccgaccccggaaaggccggagtgccaggtgtggccgctcctggagcccctgccgcagcccccccagccaaagagatcccagaagttctagttgacccccggtcgcggcgtcggtatgttagaggacgcttcctaggaaagggagggtttgcgaaatgtttcgaaatctccgacgcagacacaaaggaggtgtttgctggtaaaatcgttccaaaatcattacttctcaaacctcaccagagagaaaagatgagcatggaaatttctatccaccgctcactcgcgcaccagcatgtcgtggggtttcacggcttctttgaagacaacgacttcgtcttcgttgtgttagaactgtgccgaagacgctcactgctggaactgcataagagacgaaaagctctgacagagcctgaagcacgctactacttgcggcaaatcgttctaggatgccagtacttacatcgtaaccgggtcatccacagggatctaaaacttggtaacctgtttctcaatgaggacctcgaggttaagatcggggactttggtctggcgaccaaagtcgaatatgatggcgagcgtaaaaagaccctctgcggtacaccaaactacattgctccagaagtgctgagtaagaaaggtcattcctttgaagtagatgtctggtccatcgggtgcatcatgtatacccttcttgtcggaaagccacctttcgaaacttcctgtctgaaagagacgtatcttcggatcaaaaaaaatgaatactccatcccaaaacacatcaatccagtggctgcgagcctcatccagaaaatgctgcagaccgaccccactgcaagaccaaccatcaatgaactattgaacgatgagttcttcacatctggctacatccccgctcgactgcccataacttgtctcacaatacccccgcgcttctccattgctccttctagtcttgacccatcaaaccggaagcccttgacagttctaaacaaggggctggagaacccattgcccgaaagacccagagagaaagaggagcccgtggttagggagaccggtgaagtggttgactgccacctatcggatatgctgcagcagctccatagtgtcaatgcttctaagccatccgaaagagggcttgtgcggcaagaagaagcggaggacccggcctgtattccaatattttgggtcagcaaatgggtggattatagcgataagtatggcctcgggtaccagttatgtgataacagtgtgggcgtgctgttcaatgacagtacccggcttatcctgtataatgacggggattctctccagtacatagagagggacggcactgagtcctatctgaccgtttcttcccatcccaatagcctcatgaagaagataactctgctgaagtattttcgcaactacatgtctgagcatctgctcaaagctggcgctaatataactccccgggagggggatgagttggctcgcctgccgtatctacgaacctggttccggacccgaagcgctattattttacacttgtcaaatgggtctgtccagatcaactttttccaggatcatacaaagttaatcctgtgtccgcttatggccgccgttacctatattgatgaaaagagggatttccgaacttacaggctctcgctgctggaagagtatggctgctgcaaggagcttgcgagtaggctgcggtacgcccgtacaatggtcgacaagctgctaagcagtcgctccgcaagtaatcggctgaaggcctcctag

SEQ ID NO: 25702 - DNA, 744 bp, synthetic construct
  misc_feature 1..744: note = Description of Artificial Sequence: Synthetic coding sequence
  source 1..744: mol_type = other DNA
atgagcgccgccgtgaccgccggcaagctggcccgggcccccgccgacccaggtaaggctggggtgccaggtgttgctgctcctggcgcacctgccgccgctcctcctgctaaagaaatcccagaggttctggtggatccccgctcgagaaggcgctatgtgcgagggagattcctgggcaagggaggttttgctaagtgttttgaaatcagcgatgccgacacaaaggaagtgtttgccggcaagattgtgccaaagagccttcttctgaaaccccaccaacgtgaaaagatgtcaatggaaatctcaattcataggtccctggctcaccagcatgtggttgggttccacggtttctttgaggacaacgattttgttttcgtggtgctggagctctgccggcgccgcagtttattagagctgcataagcgacgaaaggcattaacagagcccgaggctcggtattaccttaggcaaatcgtgctcggatgccagtacttacatcgtaaccgagtgattcatcgcgacctcaagttgggaaatctgtttctgaatgaagatctggaggtgaaaattggagattttgggctcgctaccaaggtcgaatatgacggcgaaagaaagaaaacattgtgcgggacaccaaactacatcgcacccgccgtgccatgtttgcaatgcgcccctcaaccccggtggctggggcgggccgctagctccctgcaggtaggggtcgccgtatag

SEQ ID NO: 25703 - DNA, 1521 bp, synthetic construct
  misc_feature 1..1521: note = Description of Artificial Sequence: Synthetic coding sequence
  source 1..1521: mol_type = other DNA
atgagcatggagatcagcatccaccggagcctggcccaccagcacgtggtcgggttccacgggtttttcgaggacaatgactttgtatttgttgtgttagagctgtgtcgccggaggagtttgctggagctccataaacgcaggaaggctttaaccgagcccgaggccagatattatctccgccagatcgtgcttggctgtcagtatttacatcgaaatagggtgattcatcgggacctcaaacttggtaatctgtttttgaacgaggatctcgaagtgaaaatcggtgattttggactggctaccaaggtggagtatgatggcgaaagaaagaagactttatgtggaacaccgaactatattgctccagaagtcctgagcaaaaaagggcactccttcgaggtggacgtatggagtatcggctgtataatgtacacacttctggtcgggaagccgcctttcgaaacctcctgcttgaaagagacatatctaaggattaaaaagaatgaatactcaatcccaaagcacattaatcctgttgcagcctctctgattcagaagatgttgcagacagaccctactgccaggcctaccataaatgaactgcttaacgacgaattttttacctctggctacataccggcccgtcttccgatcacttgtttaactattcccccccgattttcgattgctccctcgtcactcgacccctcaaatcggaaacccttaaccgttctgaacaagggtctggaaaacccactgcccgagagaccacgggaaaaagaggagccagtagtcagagagaccggggaggtggtggactgtcacttgtccgacatgcttcagcagcttcactcagttaacgcaagcaagccaagcgagcggggcctcgtccggcaagaagaagcggaagaccccgcctgtatccccattttctgggtctctaaatgggtggactatagcgataaatacggcctgggatatcagttgtgtgacaactcagtaggcgtgcttttcaatgattccacccgtcttatcttatacaacgatggggattccctccagtacattgagagggacggcactgagagctatttaactgtgtctagccatcctaatagtcttatgaaaaaaataaccctactgaagtattttcggaactatatgtctgagcaccttctgaaagcaggagcaaatatcacaccccgggagggcgacgaattagcacgactgccctatctccgcacgtggttccgtaccagatctgccatcattctgcatttatctaacggaagcgtccagattaacttctttcaagatcacacaaagctgattttgtgcccgttgatggccgcagtcacatacatcgatgagaaacgggacttccgaacataccggctgtccctgcttgaggagtatggctgctgtaaggagttggcttcacggctgcgctacgcaagaaccatggtggataagctgttgtccagcaggtctgcttccaatcgcttgaaggccagctag

SEQ ID NO: 25704 - DNA, 1941 bp, synthetic construct
  misc_feature 1..1941: note = Description of Artificial Sequence: Synthetic coding sequence
  source 1..1941: mol_type = other DNA
atggagcccgccgccggcttcctgagcccccggcccttccagcgggcggctgcggcacctgcgccgccagcaggcccggggccccctccttccgccctaagagggccagagttggagatgctagctgggctgcccacatctgatccgggaagattgatcacagacccaagatccgggagaacctacctcaaagggaggttgttgggtaaagggggcttcgcacgttgttatgaggctaccgacaccgaaacaggctccgcatacgcggtgaaagtgattccacagtccagagtagctaagccacatcagcgagagaaaattctgaatgaaatcgagttgcatagagacctgcaacaccgccatatcgtgcgattctcgcaccatttcgaggatgccgacaatatctacatttttcttgaactatgctccaggaaatcactggcacacatatggaaagccagacacaccctcctggagcctgaggtgagatactatcttcggcaaatcctctccggactcaaatatttgcaccagcgtggcatcctgcacagagacctcaagctcggtaatttttttatcactgagaacatggaactcaaggtgggagacttcggcttggctgcaaggttggagccaccggagcagcgcaagaaaactatctgcggcacccccaattacgttgcaccagaggtcctgctgaggcaaggccacggccctgaggctgatgtgtggagcttgggatgtgtaatgtacactttgctttgcggaagcccaccattcgaaaccgctgacctaaaggagacctatagatgtatcaagcaggtgcactacaccctcccagcatcactgagcctgcctgcaagacaactcttagccgccatcctccgcgcaagtcccagggaccggcctagcatcgatcagattctccggcatgacttcttcaccaaggggtacacgccggatcggcttccaatctcatcttgtgtaaccgtaccagacctgactccgccaaatcctgccaggtctcttttcgcaaaggtgaccaagagcctgtttggtcggaagaaaaaaagtaaaaatcatgcccaggaaagagatgaggtgtccgggctagtctccgggttgatgaggacatccgtggggcaccaggacgccaggcccgaggcaccggctgcaagcggaccagcccctgtgagcctggttgagacagcacccgaggattctagccctcgcggaacactggcatcctctggggatggcttcgaggagggcctgaccgtagccacagtggtcgaatctgccctgtgcgcactgaggaattgtatcgcgtttatgccccctgccgagcagaatcctgctcccctggctcaacccgaaccgctggtttgggtaagtaaatgggtggactacagcaacaaattcggcttcggttaccagttgtcatcaagacgggttgcggtgttgtttaatgatggtacccacatggcattgtcagccaaccgcaagaccgtacattataaccctacttccaccaaacacttctccttcagcgtgggggctgtgccccgtgcactgcaaccacaactgggtattctgcgctactttgcaagttacatggaacagcaccttatgaaggggggggacctcccaagcgtggaagaggttgaggtcccagcccctccactgttgctgcagtgggtgaagacggatcaagccctgctcatgctgttctctgatggcactgtgcaagttaacttttacggcgatcataccaagctgatcttgtctggatgggaacccctgctggtaaccttcgtcgcccggaacagatccgcatgcacctacctcgccagccaccttagacagctcggatgttcaccagatctgcggcagcgactacgctacgctcttaggcttctgagagatcgttccccggcttag

SEQ ID NO: 25705 - DNA, 1866 bp, synthetic construct
  misc_feature 1..1866: note = Description of Artificial Sequence: Synthetic coding sequence
  source 1..1866: mol_type = other DNA
agccggcagcggcacgcccggcccggccccggcggcaccgagaagcctgggcctcggtgcgacgcccccgctgcctggtccctgcctcctgtctcatgcctccgtacttacctgaagggtaggctattggggaagggcgggttcgctcggtgctatgaagcgacagataccgaaaccgggtcagcctacgcggtaaaggtgataccccagtcgagagtggcgaaacctcatcaacgcgaaaagatcctgaacgagatagaactccatcgtgacctgcagcatagacatatcgtgcgcttctctcaccacttcgaggacgccgataatatatatatctttctagaattatgctcacggaagtctctggcacatatttggaaggctcgccacacacttctggaaccagaagtgcgatattacctgaggcagatccttagtggacttaagtacctccatcagcggggcatattacaccgagaccttaagctgggaaactttttcatcactgagaacatggagctgaaagtgggcgactttggattggccgccagattggagcctcccgagcaaagaaaaaagactatttgtgggacccctaactacgtggcccctgaggtgttgctaaggcagggacacggaccagaagcagacgtttggtctcttggttgcgttatgtacactctcctttgcggctcgccccccttcgaaacggcagacctcaaagaaacttacaggtgtattaagcaggtgcattatacgttgccagcttccttatctctgccagcaagacagctgctcgcggccatactgcgtgccagtcccagggataggccttcaattgaccaaatactcaggcacgacttctttactaagggatacacccctgaccgcctccccatcagcagctgtgttaccgttcccgatctaaccccccccaaccctgcacggagcctgtttgccaaagtcacgaagagtctattcgggaggaaaaagaagagtaagaaccacgcgcaagagcgcgacgaggtgagcgggctggtatccggactgatgaggactagcgtggggcaccaggacgcccgaccagaagctcctgcagcctcaggacctgcacctgtgtcattggtagagaccgcacccgaggattcatctccgcgcggcacattggccagctccggtgatggatttgaagagggactgaccgtggctactgtggttgagtccgccctgtgcgcactgcgcaactgcatcgcattcatgccgccagccgagcagaaccccgcccctctcgcgcagccagagccattggtctgggtgagtaaatgggtagactactccaataagttcggtttcggctaccagctgagctcccgccgcgtcgccgtcctgtttaatgacgggactcacatggcactttcagcaaacaggaaaacagtgcactataatccaacctcaaccaagcattttagcttcagcgttggagctgtgccgagggccctgcagccccagttgggaattttgcggtatttcgcatcctatatggagcagcatctaatgaaggggggggacctcccatccgtggaggaagttgaggtgccagccccacctttattgttgcaatgggttaagactgaccaggctttgctaatgctctttagcgacggcaccgtgcaagttaacttttatggcgatcataccaaactgatactgtcaggatgggagcccttactagtgactttcgttgcaagaaatcgctctgcttgtacatatctggctagccacctccgacagctcggctgctcacccgatcttcggcagaggttaagatatgcccttcggctgctgagggacaggagtcctgcctag

SEQ ID NO: 25706 - DNA, 2913 bp, synthetic construct
  misc_feature 1..2913: note = Description of Artificial Sequence: Synthetic coding sequence
  source 1..2913: mol_type = other DNA
atggccacctgcatcggcgagaagatcgaggacttcaaggtgggcaacctccttggaaaaggatcttttgcgggagtctatcgcgccgaaagcatccacactggattggaggttgccatcaaaatgattgataaaaaggcaatgtataaggctggcatggtccagcgcgtgcaaaacgaggtaaaaatccactgtcagctcaagcacccaagcattctggaactttacaattactttgaggatagcaactatgtctatcttgtcctcgaaatgtgtcataatggtgagatgaataggtatcttaagaatcgagtgaagcctttttctgagaatgaagcccgtcatttcatgcaccaaattatcaccgggatgttgtatctgcactctcacggcatactgcatcgcgatctcacattgtctaatctcctcctgacccggaacatgaacatcaaaatcgcagatttcggcctggccacccagctgaaaatgccacacgaaaagcactacactttatgcggaacacccaattacatcagccctgagattgctacccggagtgcccacggtctggaatccgatgtttggtccctgggctgtatgttctacaccttgttgatcggtcgcccaccgtttgacacagacacggtgaagaacacactgaataaggtcgtcctggctgactacgagatgccatccttcttgtctatcgaggcaaaggacctgatccatcagctgcttaggagaaaccctgctgataggctgtccttgagctcagtgctggaccatccttttatgagcagaaactccagcaccaaatccaaggacttaggtactgttgaggactctatcgacagtggccatgctaccatcagcaccgccattacggcatctagttctacgagtatttccggctctcttttcgacaagcgacgcttattaattggccaacctctgccgaataagatgaccgtttttcccaagaacaagagcagtaccgacttttcttccagcggcgatggaaacagtttctatactcagtggggtaaccaggaaaccagtaactccggacgagggcgggtgattcaggacgctgaagagcggccccacagcagataccttcggagggcctattcctctgatcgctcaggcacatccaactcccagtcacaggccaaaacttacacaatggagaggtgccattctgctgaaatgctgtcagtttccaaacgaagcggagggggcgagaacgaggagcgctattcaccaactgacaacaacgctaacatttttaacttcttcaaagaaaaaaccagctcctcgtcaggtagcttcgaacgccccgataataatcaggcactgtccaaccatctgtgccctggcaagactccgttcccattcgctgatccaacgccccagacagagactgttcagcaatggttcggaaatctgcagatcaatgcccacttgcggaagacgactgagtacgactcaattagcccaaatagagactttcaaggacaccccgacctgcagaaagatacctcaaagaacgcctggaccgacaccaaggtcaaaaaaaactctgacgccagcgataacgcccactccgtaaaacagcagaatacaatgaagtacatgaccgcactgcattccaaaccagaaatcattcagcaggagtgtgtctttggtagcgatcccctttcagaacagagcaagacgcggggtatggaacccccctgggggtaccagaacaggacgctacgttctatcaccagccccctggtggctcacagactgaagccaatccgacagaaaactaagaaagccgtagtctctatcctcgattcagaggaggtgtgtgttgagctagtaaaggaatacgccagccaggaatatgtcaaggaggtactccagatctcctctgacggcaacaccatcaccatctattacccgaacgggggccgcggcttcccacttgccgatcgaccgccctctcccacggataacatctcaaggtattccttcgacaacttgcctgaaaaatactggcgcaagtaccagtatgccagtaggttcgttcagctggttcggtcaaaatctcccaaaattacctatttcactaggtatgcaaagtgcattctgatggagaattctccgggggccgattttgaagtgtggttttacgatggagtcaaaattcacaagacagaagatttcatacaagtgattgaaaagaccgggaagagttataccctcaagtccgaaagtgaggtgaattccctaaaggaagagatcaagatgtatatggaccacgcaaatgaaggacaccgcatttgtctggccctggagagcatcatcagcgaagaagagagaaaaactcggagcgctcctttctttccaattatcatcggcaggaaacccggttctacgagcagtccaaaagccctgagccctcccccaagtgtcgactccaattaccccactcgcgaacgggcaagcttcaacaggatggttatgcattccgccgcatcccccacacaagcaccaatccttaatccttctatggtgacaaacgaaggactcggactcacaaccaccgcgtctggcacggacatatcttccaattctctcaaagactgtctgcctaagtccgcccagctgctgaagtctgtattcgtgaagaacgtcgggtgggcaacccagttgacctctggagccgtgtgggttcagttcaatgacgggagccagttagttgtgcaagccggggtgtcatccatcagttatacctctccgaatggccagacgactagatacggggagaacgagaaactaccagactatattaagcaaaagctgcagtgcttgtcatccatactcttgatgttcagtaaccccacacctaactttcattag

SEQ ID NO: 25707 - DNA, 2817 bp, synthetic construct
  misc_feature 1..2817: note = Description of Artificial Sequence: Synthetic coding sequence
  source 1..2817: mol_type = other DNA
atggccacctgcatcggcgagaagatcgaggacttcaaggtgggcaatctgctcggaaagggcagctttgcgggcgtgtatcgcgccgagtctattcacaccggcttagaggtcgctattaagatgctttataattattttgaagatagcaattatgtttacctggtcctggagatgtgtcataacggcgagatgaacaggtacttaaaaaaccgggtgaagccattcagtgagaacgaagcgaggcatttcatgcaccagattattacaggtatgctatatctgcatagtcatggaatcttacacagagatctcaccctgtcaaacctgcttctaactcgcaacatgaacattaaaattgcagactttggactagcaacacaactaaagatgccccacgagaagcactacactctgtgcgggaccccaaactacattagcccagagatcgctacacggtccgcacacggactggaaagtgatgtgtggagtctgggttgcatgttttatactctactgatcgggcgacccccctttgatactgacactgtaaagaacaccctgaataaggtcgttctcgccgattatgagatgccctctttcttgtctatagaggccaaggacctcatccaccaactgctgcgcaggaatccggctgatcgtctttcactgagttctgttctcgatcacccttttatgtcccggaatagcagtactaagagcaaagacctgggcacagtggaggacagcattgattcaggacacgcgaccatttccaccgctatcacagcctcaagcagtacctctatctccggatcactatttgataaaagacggctccttatcggtcagcccctcccgaacaaaatgaccgtgtttcctaagaataagagttcaaccgacttctccagctccggggatggcaactccttctatactcaatggggtaaccaagaaacctcaaattcgggtagagggagagttatccaagatgccgaggagaggccccatagtcggtacctgcggagggcctactcaagcgaccgctccggcaccagcaattcgcagtcccaggccaaaacctacactatggagaggtgtcattctgctgaaatgctgagcgtatcaaaaagatctggcggtggggaaaatgaagagaggtattcccctacagacaacaacgccaacatttttaacttcttcaaggagaagaccagtagtagtagcggctcctttgagagaccagataataaccaggccctgtccaaccacttgtgtccaggcaagactcctttcccgttcgccgaccccactccacagaccgagactgtccaacagtggttcgggaatttacagatcaacgcccacttaagaaaaactacagagtatgatagcattagcccaaacagagattttcaggggcatccggatctgcagaaggacactagtaagaacgcctggactgatacaaaggttaagaagaactcagacgctagtgataatgcccacagcgtgaaacagcaaaacacgatgaagtacatgacggcactccattcgaagccagagataattcaacaggagtgcgtctttggaagtgatcctctcagcgaacaatccaaaaccagagggatggagcctccctggggatatcagaaccgcacgctgcgcagtatcacatcaccactggtggctcaccggctgaaaccgatccgtcaaaaaactaagaaagcggtcgttagcatcctcgattcagaagaagtgtgcgtcgaattggttaaggagtatgcatctcaggagtatgtgaaagaagtcctacagatatctagcgacgggaacaccatcacaatttactatccgaacggcgggagggggttccctcttgctgacagacctccctcaccaacagataacatttcgagatattcatttgacaatctccctgaaaagtattggcggaagtatcagtacgcctcgaggtttgttcagctagttagaagcaaatctccgaagatcacctatttcacgcgctacgcaaagtgcattctcatggagaatagtcccggcgcagattttgaggtatggttctatgatggtgtaaaaatccataagacggaggattttatccaagtgatagaaaaaaccggaaagagctacactctgaaatccgaatctgaagtaaacagtctgaaggaggaaataaaaatgtatatggatcatgccaacgaaggacaccgtatctgtctagctctggagtccattatttcagaagaggaacggaagaccagatctgctccattcttccccataattattggaaggaagccagggtctacgtcttcccctaaggcccttagcccaccaccaagcgtggactccaattatccaactagggagcgcgcgtccttcaacagaatggtcatgcattcagccgctagtccaacccaggcacctattttaaatcccagtatggtgaccaacgagggactgggcctgacaacaaccgctagcggaaccgacatttcctccaactctctgaaagactgcctccctaaaagcgcacagttgcttaagtctgtattcgttaagaatgtggggtgggctacacagttgacttccggcgctgtttgggtccagtttaacgacggcagtcagctggtggtccaggctggagtgagcagcatatcctacacgagccctaacgggcagacgacccgttacggagagaatgagaagctccccgattatatcaaacagaagctgcagtgtctatccagcatcctacttatgtttagtaacccaacacctaattttcattag

SEQ ID NO: 25708 - DNA, 2790 bp, synthetic construct
  misc_feature 1..2790: note = Description of Artificial Sequence: Synthetic coding sequence
  source 1..2790: mol_type = other DNA
atgatcgacaagaaggccatgtacaaggccggcatggtgcagcgggtgcagaacgaagtcaagatccattgtcagctgaagcacccgtctatcctcgaactttacaactatttcgaggacagcaactacgtatatctagtgctagagatgtgtcacaacggcgaaatgaatagatacttgaaaaatcgagtgaaaccctttagcgagaacgaagccagacacttcatgcatcagatcataaccggtatgctgtatcttcactcgcacggcatcctgcacagggatcttactctgtccaatctgctcctcacccgcaatatgaatatcaagattgctgacttcgggcttgctactcagctaaaaatgccacacgagaagcattataccttatgtggcacaccaaactacattagtcctgagattgcaacaagatccgcacacggacttgaatccgacgtttggtccctcggctgcatgttttataccctacttatcggtcgccccccttttgacacagacactgttaagaataccctgaataaggttgtcttggccgattatgagatgccatcgttcctgtccatcgaggctaaggacctaattcatcagttgctccgccggaatccagcagaccggctgtccctaagctccgttcttgatcatccattcatgtcccgcaacagcagcaccaagtctaaagatctggggactgttgaggatagcattgattctggccatgccactatctctaccgccatcaccgcatcttcttcaacaagcatctcaggatccctctttgacaagcgaagacttcttatcgggcagccgctgccaaacaaaatgaccgtctttcctaaaaataaaagcagcaccgatttttcttcaagcggggacggcaactccttttatacacagtggggaaatcaagagaccagtaattcaggccgcggaagagtgatacaggacgctgaggaacggccccacagccgatatctgagacgcgcctacagttcagatagatctggaacttctaactcacagtcacaagctaaaacgtatacgatggaaagatgtcacagtgccgagatgttaagcgtttccaaacgcagcgggggaggcgaaaacgaggagaggtactcaccaaccgataacaacgcaaacattttcaactttttcaaggaaaaaaccagcagttcctctggcagttttgagcgcccagataacaatcaggccctgtctaatcacctctgtcctggcaaaacaccgtttcctttcgctgacccaacaccacagaccgaaaccgtgcagcagtggtttggcaatttgcagatcaatgcccatcttcgcaagaccacagagtacgacagtatcagccctaacagagatttccaaggacatcctgatctccagaaggacacgtcaaagaacgcttggacggatacgaaggtgaagaagaacagcgacgctagcgataacgcacatagtgtaaaacaacagaacacaatgaaatacatgacggccttacacagtaaacctgaaataattcagcaggaatgcgtgtttggcagcgacccgctttcggagcagtctaagaccaggggcatggaacctccttggggctatcagaataggacactacgatctatcactagtccccttgtcgcccataggctcaagccgatcaggcagaaaaccaaaaaggcagtggtctccattcttgattctgaagaagtctgcgtcgagctagtcaaagaatatgcctcccaggagtacgtcaaagaagtgctgcagatctcttctgatggtaacaccattaccatctattatcctaatgggggccggggttttccactggcagatagaccaccatctcctactgacaacatcagccgctattcattcgacaatctgcctgaaaagtactggcgtaaataccagtacgcaagcaggttcgtgcaattagtgaggtccaaaagccccaagatcacatacttcacacggtatgcaaaatgtatactgatggagaacagtcctggcgccgactttgaagtgtggttttatgatggagtgaaaatccataagactgaagatttcatacaggttattgagaagactggcaagagttacacactaaagagtgaaagcgaagtcaactccctcaaggaggagataaagatgtatatggatcatgctaacgaggggcatcgcatctgtctcgccctggagagcattatttctgaggaagagaggaagaccagatccgcaccattttttcctatcattatagggagaaagccaggatctacatcctcacccaaggccttgtcccctcctccatccgttgacagcaactaccccaccagagagagggccagctttaatcggatggtcatgcacagcgctgcgtctccgactcaagcacctattctgaatcctagcatggtaaccaacgaaggacttggcctgaccacaaccgccagcggcacggatatctccagtaattctttaaaggattgtctgcccaagagtgcccagctgctgaagagcgtatttgtcaagaatgtcgggtgggcgacccaacttacttctggggctgtgtgggtccaattcaacgacggttcacagctggttgtacaggccggtgtcagtagtataagctacaccagtcccaacggccagaccactagatacggcgagaacgaaaaactcccagattatataaagcagaagctgcagtgcttaagtagcattttgctaatgttttcaaaccctacaccgaactttcattag

SEQ ID NO: 25709 - DNA, 1752 bp, synthetic construct
  misc_feature 1..1752: note = Description of Artificial Sequence: Synthetic coding sequence
  source 1..1752: mol_type = other DNA
atggccgcccggcggcggcggagcaccggcggcggccgggcccgggctctgaacgaatctaagagagtgaacaacggaaatactgcacccgaggattctagtccagcaaaaaaaacacgccgttgccagcggcaggagagtaaaaagatgcccgtggctggcgggaaagctaataaggacagaactgaagataagcaggatgggatgcccgggcgctcctgggcctcaaaaagagtgtccgagagtgtgaaggccctgcttctgaagggtaaagcccctgtcgacccagagtgtacagctaaggtgggcaaggcccacgtctactgtgaagggaacgatgtctacgatgtcatgctgaatcagactaacctccagttcaacaacaacaagtattacctgatacagctccttgaggacgatgcccaaaggaacttctccgtttggatgaggtggggtcgggtaggtaagatgggacagcattcccttgtggcttgtagtgggaacttgaataaggccaaggagatctttcagaaaaagttcctcgataagacgaagaacaattgggaggacagggagaagtttgagaaagttccagggaagtacgatatgttgcagatggactacgctaccaatacacaggacgaggaagagacaaagaaggaggaatccctgaagtcccctctgaaaccagagagccaacttgaccttagggtgcaggagttgattaagctcatatgtaacgtccaggctatggaggagatgatgatggaaatgaagtacaacacgaagaaagcaccattaggtaaattgacagtggctcagattaaagccggctatcagagtctgaagaagatcgaggactgcatcagggccgggcagcacggacgtgcccttatggaagcatgtaatgaattttacacccgtattccgcacgacttcggacttcgtaccccccctctaattcggacacaaaaggagttgagtgaaaagatccagctgcttgaagcactgggggacatcgagatcgcaatcaagcttgttaaaaccgagctccaaagccccgagcaccctctggaccagcactatcgaaacttacactgcgcgcttcggcccctcgaccatgagtcttacgagtttaaagtgatcagccagtacctccaatcaactcacgctcctacccactctgactacacaatgacactgttggatttgtttgaggtggagaaagacggcgaaaaggaggcattcagggaagacctacataataggatgctgctctggcacggatcacggatgagcaattgggttggcattctgagtcacggcctgcgtatcgcccctcctgaggccccgatcaccggctacatgttcgggaaaggcatctactttgccgacatgtccagtaagtcagctaattattgttttgccagcagacttaaaaacaccggtctccttctcctgtcggaggtcgccctcggacaatgcaatgagctgttggaagctaaccccaaagccgagggcctgctgcagggaaagcattcaacaaaggggcttggaaaaatggccccctcctccgctcattttgtaacactgaatggcagcaccgttccgctggggcccgcctcagacactggaatcctcaatcccgacgggtatactctcaattataacgaatacattgtttacaaccccaaccaagtccggatgcgctacttacttaaggtgcaatttaactttcttcagctgtggtag

SEQ ID NO: 25710 - DNA, 1713 bp, synthetic construct
  misc_feature 1..1713: note = Description of Artificial Sequence: Synthetic coding sequence
  source 1..1713: mol_type = other DNA
atggccgcccggcggcggcggagcaccggcggcggccgggcccgggccctgaatgagagcaagcgagtgaataacggcaacacagctcctgaggactcatcgccagccaagaaaacacgcagatgccaaaggcaagaatctaagaagatgcctgtagctggcgggaaggccaataaagacagaactgaggataaacaggacgaatcggtaaaggcccttttgctcaaaggcaaggcacccgtagacccggaatgtaccgcaaaggtgggtaaggcccatgtatactgcgaaggtaatgacgtctacgatgttatgctaaaccagaccaacctccagttcaataacaacaagtattacctgatccaactcctcgaagacgacgcccagagaaatttcagcgtttggatgagatggggccgcgtgggaaaaatgggccagcatagcctggtggcctgttctggcaacctcaacaaggcgaaagagatcttccagaaaaaatttctggataagactaagaacaattgggaagatagggaaaaatttgagaaggttcctgggaagtacgatatgctacagatggactatgcaaccaacacacaggacgaagaggaaactaaaaaagaggagtccctcaagtctcctttaaagccagaatctcagctcgacttgcgggttcaggagctaatcaagctcatctgtaacgtgcaggccatggaggaaatgatgatggaaatgaagtacaatactaaaaaagcccctctcgggaaactgaccgttgctcagatcaaggctggctaccagagcctcaaaaagattgaagactgtataagggccggccaacatggaagagctctgatggaggcctgtaatgagttctacaccagaatcccgcatgacttcggcctccgtacaccccctctgattaggactcagaaagagttgtctgagaagatccagctgctggaagcgcttggagacattgaaatagcgatcaagctggtcaagactgagctgcagtcacctgagcacccactagatcagcactacaggaacttgcattgtgctttgcgcccccttgaccatgagtcctacgagttcaaggtgatatcccagtaccttcaaagtacacatgctccaacccactccgactatactatgactctactggacctctttgaagtagaaaaggacggtgagaaggaagcattccgagaggacctgcataaccgcatgctactgtggcatggtagccgtatgtccaactgggtgggcattctctcccatggcctgcgaatcgccccacccgaagcccccatcaccgggtacatgttcggaaaagggatttactttgcagatatgagctctaagagcgccaactactgtttcgcttccagactgaagaatactgggctgctacttcttagcgaggtggctcttggccagtgtaatgaactcctggaggcaaatcccaaggccgaggggctcctgcaggggaaacactcaaccaaagggctaggcaagatggcccctagcagtgcacacttcgtcacattaaacgggagcaccgttcccctgggtccagcatctgacactggaatcctaaacccagatggatacactctcaattacaatgagtacattgtctacaacccaaatcaggtgagaatgcgttacctgcttaaggttcaatttaactttctgcagttgtggtag

SEQ ID NO: 25711 - DNA, 1623 bp, synthetic construct
  misc_feature 1..1623: note = Description of Artificial Sequence: Synthetic coding sequence
  source 1..1623: mol_type = other DNA
atgagcctgctgttcctggccatggcccccaagcccaagccctgggtgcagaccgaggggcccgaaaaaaaaaaagggcgccaggctgggagagaagaggacccgtttagatcaactgctgaagcactcaaggcaatccctgctgaaaagagaatcattagagtcgatccaacttgcccgctgtcatctaatccaggcacacaggtgtacgaggattacaactgcacactgaatcaaactaatattgagaacaacaacaataagttctacataatacagctactccaggactccaatcgattcttcacatgctggaaccactgggggcgtgtgggagaggtcggccaatcgaaaattaatcactttactaggctcgaagacgctaagaaggatttcgagaagaagtttagagaaaaaaccaaaaataattgggcagaacgcgatcactttgtttcccatcctggtaagtatacactgattgaagtccaggctgaggacgaggcccaagaggctgtcgtgaaggtcgataggggacccgtaaggacagtaacgaaaagggtccagccctgttctctggatcccgcaacacagaagttaattacgaatatattttctaaggagatgttcaaaaacactatggcactgatggacttagacgtcaagaagatgcccttagggaagctctccaagcagcagattgcccgggggtttgaggcattggaagctctggaggaagctctgaaagggcccacagatggaggtcagtcactggaagaacttagctcacacttctacaccgtcatcccgcacaacttcggccacagccagcccccacccatcaactcgccggagctgctgcaggcaaaaaaggacatgctgttagttctagccgatatcgaattagctcaggccctgcaggccgtgagcgagcaggaaaagacagttgaggaggtccctcacccgctggaccgagactatcagctcctgaagtgccagctccaactgttggatagcggcgccccagagtacaaagtgatccagacttacctggaacagaccggtagcaatcacaggtgtcctaccttgcaacatatttggaaggtgaaccaagagggggaagaagaccggtttcaggctcacagcaagcttgggaatcgtaaattgttatggcatggtaccaacatggcagtggtggccgctatcctgacctccggattacggatcatgccgcattctggcggcagagtggggaaaggcatctacttcgcttccgaaaactccaagtccgccgggtatgttattggtatgaaatgtggagcgcatcacgttggatacatgtttcttggcgaggtggcactcggacgtgagcaccatattaataccgacaatccatctcttaaatcccccccgccagggttcgattctgtgatcgcccgggggcatacggagcccgatcccacccaagacacggagctcgaactggatggccagcaggtggtcgtccctcagggccagccggtgccatgtccggagttctcctccagcaccttcagtcagagcgaatacttaatctatcaggagagtcaatgccgcctgcggtatttgctcgaggtgcatctttag

SEQ ID NO: 25712 - DNA, 1602 bp, synthetic construct
  misc_feature 1..1602: note = Description of Artificial Sequence: Synthetic coding sequence
  source 1..1602: mol_type = other DNA
atggcccccaagcccaagccctgggtgcagaccgagggccccgagaagaagaagggtcgacaggcgggcagggaggaagacccttttaggagcacagctgaggccctcaaagccatccccgccgagaagaggattatcagagttgaccctacatgtccactgtccagtaatcccgggacccaggtgtatgaggattacaattgcacactgaaccaaaccaacatagaaaataacaataacaaattctacataattcagctcctgcaggattccaatagattcttcacctgttggaaccactggggcagagtaggagaagttggccaaagcaaaatcaaccattttacaagactggaggatgctaagaaggacttcgagaaaaagttccgagagaagacgaaaaataactgggcggagagagatcatttcgtttctcacccaggtaagtacactctcattgaggtgcaggccgaagacgaggcccaggaggcggtcgtgaaggtggaccggggccctgtgcgaacagtcacaaagagggtccaaccttgttctctggaccccgcaacacagaagctcatcacaaacattttttctaaggagatgtttaagaacacaatggccctgatggacctcgatgtcaaaaagatgccattagggaaactttcaaagcaacaaatcgctcggggatttgaggcactcgaagccctggaggaggcgctgaaaggaccaaccgacggaggacagagtttggaagagctctctagtcatttctatacagtgatcccccacaactttgggcacagccagcctccgccaatcaacagccccgagctcctccaggctaagaaagatatgctcttggttctggccgatattgagttggcccaggccttgcaagcggtctccgaacaggagaaaactgtggaagaggttcctcatccgctggatagagactaccagcttctcaaatgtcagctacagttgctggatagtggcgcacccgagtacaaggtgatccagacatacctggaacagaccggaagcaaccacaggtgtcctactctccagcatatctggaaagtcaatcaagaaggggaagaagaccggttccaagctcactccaaacttggcaatcgcaaactactctggcatggcacaaatatggccgtggtagctgccattttgacgtccggactaaggataatgccccattccgggggccgcgttggaaagggcatctatttcgccagcgaaaactccaagagcgccgggtacgtaatcggcatgaagtgcggtgcccaccacgttggatacatgttcctgggggaggtggccctcggtagagagcatcatatcaacacagacaatcccagcctaaagagcccccctcctgggttcgatagcgtgatcgcgcggggacatactgaacccgaccctacacaggacaccgagctcgagttagatggccagcaagtggtggtcccacaaggccaacccgtcccctgcccagaattctcaagtagcacattttcccagtccgagtatttgatctatcaggagtcacaatgtagattgaggtatctcctcgaggtccacctatag

SEQ ID NO: 25713 - DNA, 1602 bp, synthetic construct
  misc_feature 1..1602: note = Description of Artificial Sequence: Synthetic coding sequence
  source 1..1602: mol_type = other DNA
atggcccccaagcccaagccctgggtgcagaccgagggccccgagaaaaaaaaggggcgtcaggcggggcgcgaggaggatccgttccggtctacggccgaggcacttaaggccatacccgccgaaaagcggattattcgcgtcgaccccacatgccccttatcaagcaatcctggtacccaggtatacgaggactataactgtacgctgaaccagaccaacattgagaataacaataataagttttacattatccagctcttgcaagatagcaaccggtttttcacttgctggaaccactgggggagagtaggcgaagtgggtcagtcaaagatcaatcactttacccgactggaagacgcaaaaaaagattttgaaaagaaattccgggaaaaaacaaagaataactgggccgagcgcgaccacttcgtcagccatcccggaaagtacacgctcatcgaggtgcaagctgaggatgaggctcaggaggcagttgtgaaggtcgataggggacccgtcagaaccgtgaccaagagggtccagccctgttcccttgatcccgcaactcagaaactcataaccaatatcttttcaaaggagatgtttaagaacacaatggcgctcatggatctagacgtgaaaaagatgcccctgggcaaactctccaagcagcagattgcgaggggcttcgaggccctggaagccctggaggaggccctcaagggccccacggacggaggccagtcgctggaagagttgtcttcacacttttacactgtcataccacacaattttggccattcccaacctcctccaattaattctccggaattacttcaggcgaaaaaagatatgcttctcgttcttgccgatatagaactggcccaggctctgcaggccgtgtccgaacaggaaaaaacagtagaagaagtcccgcaccctctagatcgcgactaccagttactaaagtgtcagcttcagctgttagattctggcgcccctgagtacaaggtaatccaaacatatcttgagcagactggttccaaccacaggtgccccacccttcagcatatctggaaagttaaccaggagggagaggaggacaggtttcaggctcactctaagctcggcaatcgtaagttgctctggcatggcaccaatatggctgtggtggccgctattctgacatccggactcaggattatgcctcactctggcggacgggtcgggaagggcatctactttgcttccgaaaactccaaatccgcaggctatgtcatcggaatgaaatgtggggcccaccacgtcggatacatgttcttaggagaagtcgctctgggacgtgagcaccacatcaatacagacaacccttcactcaaaagtcctccacccggctttgactcggtgattgcccgaggtcatactgagcccgaccccacccaggacacagagctggagttagatggtcagcaggtggtagttcctcagggacagcctgtgccgtgcccagagttctcctcatcaaccttctcccagtctgagtacttgatatatcaggaaagtcaatgtcggctgagatacctgttggaagtgcatctgtag

SEQ ID NO: 25714 - DNA, 999 bp, synthetic construct
  misc_feature 1..999: note = Description of Artificial Sequence: Synthetic coding sequence
  source 1..999: mol_type = other DNA
atggcccccaagcccaagccctgggtgcagaccgagggccccgagaaaaaaaaaggaaggcaggctggaagggaggaggatcccttcaggtcgaccgcagaggcactgaaagcaatcccagctgagaaaaggattatacgcgtggacccaacctgccccctgagttccaaccctgggacccaggtttacgaagattataattgcaccttgaaccaaaccaatatcgagaacaataataacaaattctacatcatccagctgctccaggacagcaatcggtttttcacgtgttggaatcactgggggcgggtgggcgaggtcggtcagagcaagatcaaccacttcacacggctggaggacgccaagaaagactttgaaaagaaatttagggagaagaccaagaacaattgggccgaacgcgatcactttgtttcccacccaggtaagtataccctcatcgaagtccaggcagaagatgaagcacaagaagcagtcgtgaaagtcgacagaggtccggtgcgaacagtgaccaaaagggtgcaaccatgctccctggaccccgctactcagaaattgattactaacatcttttctaaagagatgtttaagaatactatggctctgatggaccttgatgtgaagaaaatgcctctgggaaaactttccaaacagcagatcgcacgaggcttcgaggcactggaggcacttgaagaggcactaaaaggcccgacagatggcggacagtctctggaggaattatctagtcatttctacacggtgatccctcataactttggccactcgcaaccacccccaatcaattctcctgaactcctccaggccaagaaagatatgctcctggtcttagctgacatcgagctggctcaggcattgcaggcagtcagcgaacaggagaagaccgtcgaagaagtgccgcatcccctggatcgagactatcagctactgaagtgccagcttcagttacttgattccgggtag

SEQ ID NO: 25715 - DNA, 5175 bp, synthetic construct
  misc_feature 1..5175: note = Description of Artificial Sequence: Synthetic coding sequence
  source 1..5175: mol_type = other DNA
atggtgatgggcatcttcgccaactgcatcttctgcctgaaggtgaaatacctcccccagcagcagaagaaaaagcttcagaccgacatcaaggagaatggcgggaagtttagtttttcacttaacccccagtgcacacacatcattttagacaacgcggacgtgctgagccaataccaattaaactcaatacaaaagaaccacgtgcacatcgccaatcccgactttatctggaagagcatcagagagaaacgactcctagacgtcaaaaactatgacccttacaaacctctggacatcacacctcctcccgatcagaaagccagttctagcgaagtgaagaccgaaggcctgtgcccagacagcgcgactgaggaggaggacacagtcgagttaacagaattcggcatgcaaaacgtggaaatcccacaccttcctcaagactttgaagtggccaaatataacacacttgagaaggttgggatggaggggggccaggaggccgtggtggttgaactacagtgctcccgcgacagcagggactgccctttcttaatctcttctcacttcctgctggacgatggcatggagactagacggcagttcgccataaaaaagacttccgaggatgcttccgaatacttcgagaattacatcgaagaattgaagaagcagggctttcttctgcgtgaacactttacacctgaggccacacagttagcatcagagcagctacaggctctgctactggaagaagtcatgaacagctcaacattgtctcaggaggtgagcgaccttgtggaaatgatctgggccgaggctcttggccatctggaacacatgctgctcaaacctgtcaatcgaatctctctgaatgatgtgtcaaaagccgagggtattctgctactggtcaaggctgccctgaagaatggagagacggctgagcagcttcagaaaatgatgactgaattttatcggctgatcccacacaaagggacaatgccaaaagaggtgaacctaggcttgctcgcaaagaaggccgatctctgtcagctgattcgcgatatggtgaatgtttgtgagaccaacctgagtaaacctaaccctccctctctggcaaaatacagagccctgagatgcaagatcgagcacgtggagcagaataccgaagagttcctcagggttcggaaagaggtcctgcagaatcatcactccaaaagccccgtggacgtccttcaaatcttccgcgtcggaagagtgaatgagaccacggaattcttgtccaagcttgggaacgtccggcctctgctccacggatcaccagtgcagaacatcgtgggaatattgtgcagagggcttttgcttcccaaggtggtggaggatcgcggtgtccagcggacggatgtcggcaatctcggctccggcatctactttagcgattcattaagtacatctattaaatattcccatcctggggaaactgacggaacgaggctgttacttatttgcgatgtcgccctcggaaagtgcatggacctgcatgagaaggatttcagcctcaccgaggcacctccgggttacgattctgtgcatggagtgtcccaaacagccagtgtaacgaccgacttcgaagacgacgaattcgttgtctacaaaaccaatcaagttaagatgaaatacattattaaattttccatgccgggggaccaaattaaagatttccatccctccgatcatactgaacttgaggagtaccgtcccgaattctcaaactttagcaaggtagaggattaccagttacccgatgcgaaaacatccagttctacaaaagccggactccaggatgcctccggaaacctggtaccactggaagacgtacatatcaagggccgtattatcgatactgtggctcaagtgatcgttttccagacttatacaaataagtcccacgtccccatcgaggcaaagtacatctttccactcgatgacaaggccgcagtgtgtgggttcgaggcctttatcaatgggaagcacatcgtcggggaaatcaaggagaaggaagaagcacagcaggagtacctggaggctgtcacccagggccacggcgcgtatctcatgagccaagacgcacccgacgtgtttaccgtgagtgttgggaatctcccacccaaggcaaaagtactgatcaagataacctacatcactgagctttctatactggggacagttggggtgttcttcatgcctgcgaccgtggccccctggcagcaagacaaagcgctgaacgagaacctgcaggataccgtggagaagatctgtatcaaggaaataggaaccaagcagtccttttcgctgactatgtccattgagatgccctacgtgatagaattcatattttccgatacccacgaactgaagcagaagcgcacggattgcaaggcagttatttccaccatggaggggtcctctttggactcctcgggcttttcacttcatattggactcagcgccgcttatttgccacgtatgtgggtagaaaagcaccctgaaaaggagtctgaagcctgtatgctcgtgttccaaccagatctggacgtggacctccccgacctggcatcggagtccgaagttatcatctgcctggactgcagctcttccatggagggtgtcaccttcctacaagctaagcaaatcgcacttcacgcactaagtcttgttggtgagaagcagaaggttaatataattcaatttggtacaggatataaggagctcttctcctacccaaagcatatcacctctaacaccatggcagccgaattcattatgtccgctactcccactatgggaaacaccgacttctggaaaacgctgagatacctttctctgttgtacccggctcgcggtagccgcaacatcctcctcgtatctgacggacacctgcaagacgaaagcctgacgctacagctggtcaaacggagccgccctcatacacgtctgtttgcttgcggaataggctccactgccaacaggcatgtgctgaggatcctgagccagtgcggggcaggcgtcttcgaatactttaacgccaaatccaaacattcatggcggaagcagatcgaggatcagatgactcgcctgtgtagccctagctgtcatagcgtgtccgtcaaatggcagcagctcaatccagatgtcccggaagcactccaggcccccgcccaggttccttctcttttcttgaacgaccgcctactggtctatggttttatacctcactgtacccaggctacactctgtgcacttatccaggaaaaggagttcagaaccatggtctcaaccaccgaattgcagaagacaacagggacaatgatacacaagctcgccgcgcgcgcgctcatcagagactacgaagacggcatcctgcatgagaatgaaactagtcacgaaatgaaaaagcagactctgaagtcacttatcattaaactatctaaggaaaattcactcataacacagttcacgtcctttgtggctgtggagaaacgagacgaaaacgagagccccttccctgacattcctaaggtgagtgagctcatcgccaaggaagacgtggacttcttgccttacatgagctggcagggggagccccaggaggcagtcaggaatcagtcattgctggctagcagcgagtggcccgagctgcggctcagcaagcggaaacacagaaaaatccctttctccaagcggaagatggaactctcccaaccagaagtaagcgaggattttgaggaggatggcttgggggtgctgccagcatttaccagcaatctcgagaggggaggagtcgagaagctccttgacctcagctggactgaatcctgcaagccaacagccacagagcctctgtttaagaaggtgtcaccttgggagacatccacatccagtttcttcccaatactggccccggccgtgggcagttacctgcctccgaccgcgcgcgcccattctcctgctagcctatcgtttgcctcataccgacaggtagcttcattcgggtccgccgcacctccgcggcagttcgacgcctctcagttttctcaggggcccgtgcctggtacctgtgctgactggatcccacagagcgccagttgcccaactggtccaccgcagaatccaccgtcttcaccatattgcggcattgttttctctgggagcagcttgtcgagcgctcagtccgccccacttcagcatcccggaggcttcacaacccggcctagcgccggaacctttcccgaattggactctccccaactgcacttttctcttccaaccgaccccgaccctatccgtgggttcgggagttaccaccctagcgcctcctctcctttccactttcagccatcagctgcttctctcacggccaacctacgcctgcctatggcttccgcgctacccgaagccctttgctcccagtctagaacgaccccggtcgatctgtgcctgttagaggaaagtgtgggtagcctggaaggcagccggtgtcctgtgtttgcctttcagagctccgatacagagagcgacgaactgtcggaagtgctccaggattcctgctttcttcagatcaagtgcgatactaaggacgatagtattttatgcttcctggaagtgaaggaggaggacgagatcgtttgcattcagcactggcaggatgctgtgccctggaccgaattgctgtctctccagaccgaggacggattctggaaactgaccccggagttaggactcatcttgaacctgaacactaacggcctccatagcttcttaaagcaaaagggcatccaaagtcttggtgtaaaggggagagaatgcctcttggacttaattgctaccatgttagttctacagtttattagaacgaggctggagaaagaaggtatcgtgttcaagagcctcatgaaaatggacgacgctagcatctctagaaatatcccctgggcctttgaagctattaaacaggcatccgagtgggtccgccgcactgaagggcagtatccttccatttgtccacgccttgagttggggaacgattgggatagcgcaaccaagcaactgctcggcttgcagcccatttcaactgttagccctcttcatcgtgtgctccactatagccaggggtag

SEQ ID NO: 25716 - DNA, 1911 bp, synthetic construct
  misc_feature 1..1911: note = Description of Artificial Sequence: Synthetic coding sequence
  source 1..1911: mol_type = other DNA
atgaaccccagcgcccccagctaccccatggccagcctgtacgtgggcgacttacaccctgacgtgaccgaggccatgctctatgaaaaatttagtccagcaggtcccatccttagcataagagtgtgtcgtgacatgatcacaagacgctccctgggttatgcgtacgtaaactttcaacaacctgccgatgcagaaagagcactcgatacaatgaactttgacgttatcaagggcaaaccagtgcgaataatgtggtctcaacgcgatccttccttgcggaagtccggagtaggcaatatttttatcaaaaatttagacaagagtatcgacaataaagcactgtacgatacattctcggcctttgggaacatattaagctgcaaagttgtgtgcgacgaaaatgggtctaaaggctacggctttgtgcattttgaaacccaagaagctgccgagcgagccatcgagaaaatgaacggcatgctgctcaatgacagaaaggtcttcgtcggccgattcaagtcgcggaaggagcgagaagctgagttgggcgcccgcgcaaaagagttcaccaatgtctacatcaagaatttcggcgaggatatggatgatgagcgtctaaaagatctgtttgggaaattcggccccgctcttagtgttaaagtgatgactgatgaatccgggaagagtaaggggttcgggtttgtctcatttgaaaggcacgaggatgcccaaaaagccgtcgacgagatgaacggcaaagaactcaacggcaaacaaatctacgtcggcagggctcagaagaaggtcgagcgccaaacagaactgaaaaggaaatttgagcagatgaagcaggatagaataacaaggtaccagggagttaacttatatgtcaagaatttagatgatgggatagatgatgaacgcctgcgtaaagagtttagcccgtttggtacaattaccagcgcaaaggtcatgatggagggcggccgcagcaaaggtttcggtttcgtgtgtttcagcagtcctgaagaagccacaaaggccgtgaccgaaatgaacggacgcattgtggcaactaagcctctgtatgtggcactcgctcagcgcaaagaagagcggcaagcccacctcacgaatcagtacatgcaacgtatggcttcagtccgcgctgttcccaaccccgtcatcaacccctaccagcctgcgcccccctcggggtacttcatggccgctattcctcagactcaaaaccgagcagcatactatcctccatcacagattgctcagctgaggcctagcccccggtggactgcccagggggcgcggccacatccatttcagaacatgcccggggcaatccgacctgccgctcctcggccccctttctccaccatgagacctgcctcatcccaggtgccgagagttatgtcaacccagcgagttgctaacacatcgactcaaactatgggtcctcgacccgccgcagccgccgctgccgcgacccctgccgtgcgcaccgtaccccagtataagtacgccgctggggtccggaacccccagcagcacttgaacgctcagccacaggtaacgatgcaacaaccggcagtccatgtccaggggcaggaaccactgaccgctagtatgctcgccagcgcgcctcctcaggagcagaagcagatgctcggtgaacgtctgttcccccttatccaggcaatgcaccctacactggctggcaagatcaccggcatgctgctcgagatcgataactctgagctgctccatatgctggagtcccctgaatcattgagatctaaagtggatgaggccgtggcagtcctgcaggcccaccaggctaaggaggctgcacagaaggccgtgaatagcgctacaggggttccaacagtatag

SEQ ID NO: 25717 - DNA, 1644 bp, synthetic construct
  misc_feature 1..1644: note = Description of Artificial Sequence: Synthetic coding sequence
  source 1..1644: mol_type = other DNA
atgaaccccagcgcccccagctaccccatggccagcctgtacgtgggggatctgcatcccgatgtgactgaggcaatgctctatgaaaagttcagtcccgctggccccatactgtctattcgcgtctgcagagatatgattacacgaaggtcactgggatacgcatacgtgaactttcagcagccggccgacgcggagagggccctggacaccatgaatttcgatgtcatcaagggcaaacctgtcagaattatgtggtcacaacgggacccgagcctgaggaaaagtggggtggggaacatttttataaaaaatctagacaaaagcattgacaataaggcactctatgacaccttctcggctttcgggaatatcctgtcctgtaaggtagtatgcgatgagaatggttctaaaggatatggatttgtgcatttcgagacccaggaggctgccgagcgggcgattgaaaaaatgaatggtatgcttctcaacgatcgtaaagtgtttgtgggtagattcaagagcagaaaggagagagaagcagagctcggagctagggccaaggagtttacgaatgtctatatcaagaactttggagaagatatggacgacgaaaggctgaaagacctcttcggcaagttcgggcccgccctatccgtgaaggtgatgacagacgaatccggcaagtccaagggctttggatttgtaagctttgagcgacatgaggacgctcaaaaggccgtcgatgaaatgaatggaaaggaactcaacgggaagcagatctacgtagggagagcccagaagaaagtcgagcgacagactgagctcaagcgtaagtttgaacaaatgaagcaggatcgtatcacacggtaccagggggtcaacctgtatgtgaagaatctcgacgacgggattgatgacgagagattgcgcaaggagttttcccccttcggcaccataacaagcgccaaggtgatgatggagggaggaaggtccaaagggtttggatttgtctgcttttcaagcccagaggaggcaactaaggccgtcacagagatgaatggcaggattgtggcaaccaagccactgtacgtggcactggcccagcgcaaggaagaacgacaagcacaccttactaaccaatacatgcaacgcatggcttcagtgcgagcggttccaaatccagtaataaacccctaccaaccagctcccccctccggatactttatggccgccataccacagacccagaatagggcagcttattatccacctagccagatagctcagctgcgcccatcacctcgttggacagcacagggggcgcgaccccaccccgccgtgcatgtgcagggacaagagccccttacagcctctatgctcgcctcagccccacctcaggaacagaagcagatgttaggcgagcgcctgttccccttgattcaggctatgcacccaacactggctgggaagattacaggtatgctgcttgagatcgacaacagcgagctcctccacatgctggaatcaccagagagcctgcgaagtaaggtggacgaggccgtagcagttttgcaggcccatcaggccaaggaggctgcacagaaggccgtcaacagcgccaccggcgtacctactgtgtag

SEQ ID NO: 25718 - DNA, 129 bp, synthetic construct
  misc_feature 1..129: note = Description of Artificial Sequence: Synthetic coding sequence
  source 1..129: mol_type = other DNA
tgaatgctggagagccccgagagcctgcggagcaaggtggacgaggccgtggccgtgctccaagcccaccaggccaaggaagcagcccagaaggctgtaaactccgctacaggggtgccaactgtgtag

SEQ ID NO: 25719 - DNA, 117 bp, synthetic construct
  misc_feature 1..117: note = Description of Artificial Sequence: Synthetic coding sequence
  source 1..117: mol_type = other DNA
atgaaccccagcgcccccagctaccccatggccagcctgtacgtgggggacctgcacccagatgtcacagaggccatgttgtatgagaagttctcccctgccggtcctattctgtag

SEQ ID NO: 25720 - DNA, 357 bp, synthetic construct
  misc_feature 1..357: note = Description of Artificial Sequence: Synthetic coding sequence
  source 1..357: mol_type = other DNA
atgaaccccagcgcccccagctaccccatggccagcctgtacgtgggtgacttacacccagacgtgaccgaagctatgctctacgagaagttttcccctgccggccccatcctgagcattcgggtgtgccgggacatgatcacacggcggtctttaggatacgcttacgtcaacttccagcagcccgcagacgccgagcgtgcccttgatactatgaacttcgatgtgattaaagggaaacccgtgagaattatgtggagtcagagggacccaagcctccgaaagagtggggtcggtaatattttcattaagaatctggataagtctatcgacaacaaagcactgtatgatacgtag

SEQ ID NO: 25721 - DNA, 132 bp, synthetic construct
  misc_feature 1..132: note = Description of Artificial Sequence: Synthetic coding sequence
  source 1..132: mol_type = other DNA
atgaaccccagcgcccccagctaccccatggccagcctgtacgtgggtgacttgcaccctgatgtaaccgaggcgatgctgtacgaaaagttcagtccagccggtccaatcctgagcatccgagtttgttag

SEQ ID NO: 25722 - DNA, 510 bp, synthetic construct
  misc_feature 1..510: note = Description of Artificial Sequence: Synthetic coding sequence
  source 1..510: mol_type = other DNA
tgagccagcagccaggtgccccgggtgatgagcacccagcgggtggctaacacttctacccaaacgatggggccacgccctgctgcagctgctgcagccgccactcctgccgtcagaaccgtgccacagtataagtatgcagcgggagtgcgaaaccctcagcagcatttgaatgcacagcctcaagtaactatgcagcagccagcagtgcatgtgcagggccaggagccacttaccgccagcatgctcgcttcagcgccgccccaggagcagaagcagatgctcggtgaaaggctgtttcctttaatccaggctatgcatcctacccttgctggcaagattacaggcatgctccttgagattgacaactcggagttgctgcacatgcttgagtccccagagtccctcaggtctaaagtggacgaagcagtggcggtgttacaggcgcaccaggcaaaagaagcggctcagaaggccgtgaactccgccactggagtgccaaccgtatag

SEQ ID NO: 25723 - DNA, 186 bp, synthetic construct
  misc_feature 1..186: note = Description of Artificial Sequence: Synthetic coding sequence
  source 1..186: mol_type = other DNA
atgaaccccagcgcccccagctaccccatggccagcctgtacgtgggtgatttgcacccggacgtgaccgaagccatgctgtacgaaaagttcagccctgctgggccaattctctcaatcagagtgtgtagagatatgataactcgccgctctctgggctacgcttatgttaactttcagcagtag

SEQ ID NO: 25724 - DNA, 390 bp, synthetic construct
  misc_feature 1..390: note = Description of Artificial Sequence: Synthetic coding sequence
  source 1..390: mol_type = other DNA
atgaaccccagcgcccccagctaccccatggccagcctgtacgtgggtgatctgcacccagatgtcacggaagctatgctctatgaaaaattctctcctgccggccccatcctcagcatccgcgtgtgcagggatatgatcacacgaagaagtctgggctatgcatatgtgaattttcagcaacctgcggacgcggagcgggctctggatactatgaatttcgacgtgattaaaggcaaacccgtgcgtatcatgtggtcccagcgagacccctccctgaggaagtccggcgtgggcaacattttcatcaagaatctggacaagtcaatcgataacaaggctctatacgatacattctctgccttcggtaacattctctcctgcaaatag

SEQ ID NO: 25725 - DNA, 552 bp, synthetic construct
  misc_feature 1..552: note = Description of Artificial Sequence: Synthetic coding sequence
  source 1..552: mol_type = other DNA
atccggcccgccgccccccggccccccttcagcaccatgcggcccgcgtcttctcaggtccctcgtgtgatgtccacacaacgtgtggcaaatacttccacccagacaatgggaccacggcccgcagcagccgcagccgcggcaacccctgcagtcagaaccgtcccacagtataaatatgctgccggggtcagaaacccccagcagcatctgaacgcccaaccacaggtgacaatgcagcagccggccgtgcacgttcagggccaagagccacttaccgccagcatgctagctagtgcaccccctcaggaacaaaagcagatgctcggcgagcgactattccctctgatccaggccatgcatcccacactggctggcaagatcacaggcatgctgttagaaatcgacaactcagagctccttcatatgctcgagtcccctgagtccctcaggtccaaagtagatgaggctgtagctgttctgcaggcccaccaggccaaagaggctgctcagaaagccgtgaactctgctactggagtgccaaccgtgtag

SEQ ID NO: 25726 - DNA, 228 bp, synthetic construct
  misc_feature 1..228: note = Description of Artificial Sequence: Synthetic coding sequence
  source 1..228: mol_type = other DNA
atgaaccccagcgcccccagctaccccatggccagcctgtacgtgggggacttacatcctgacgtgacagaggccatgctgtacgagaagttttcccccgccgggccgattctatccatccgcgtttgcagagacatgatcacccggagatctctgggctatgcatatgtaaatttccagcagcccgctgacgctgagagggccttggacactatgaacttcgactag

SEQ ID NO: 25727 - DNA, 1008 bp, synthetic construct
  misc_feature 1..1008: note = Description of Artificial Sequence: Synthetic coding sequence
  source 1..1008: mol_type = other DNA
atgagcaagcggaaggccccccaggagaccctgaacggcggcatcaccgacatgctcactgagctggctaacttcgaaaagaacgtgtcacaggccatccacaagtataacgcttatcggaaagcagccagtgtgatcgccaaataccctcataaaattaaaagcggagcggaggcgaaaaagctacccggagtagggaccaagattgccgagaaaatcgatgagttcctcgcgactggcaaacttaggaagctggagaagatacggcaggatgacacttcatccagcattaacttccttacgagggtttctggaatcgggccatcagcagctaggaagttcgtcgatgaaggaataaagacgcttgaggatcttcgcaagaacgaagataagctcaaccatcaccaacgcatcggtctgaagtattttggcgatttcgagaaacgcatcccacgcgaagaaatgctgcagatgcaggacattgtgctcaatgaggtcaagaaagtggactctgagtacatcgcgactgtgtgtgggtcgttccgccgcggcgctgaatcttctggtgatatggatgtcctgctgacacacccaagctttacatcggagtccaccaaacagccaaaactgttgcaccaggtggtcgaacagttgcagaaagtgcattttatcacggataccctaagtaagggcgaaactaagttcatgggagtctgtcagctgccttctaagaacgatgagaaggaatacccccaccgccggattgacattcgactgatacctaaggatcagtactactgcggtgtcctctattttactgggtcagatatttttaataaaaacatgcgggcgcatgctcttgaaaaagggttcactattaatgagtatactattcggcccctgggggtaaccggtgttgctggcgaacctctgccagttgatagtgagaaggacatcttcgattacattcagtggaagtacagagagccaaaggaccgcagcgagtag

SEQ ID NO: 25728 - DNA, 720 bp, synthetic construct
  misc_feature 1..720: note = Description of Artificial Sequence: Synthetic coding sequence
  source 1..720: mol_type = other DNA
tgaggcgacttcgagaagcggatcccccgggaggagatgctgcagatgcaagacattgtactgaacgaagtaaaaaaagttgatagcgaatatatagcaacagtgtgtgggtcttttcgcagaggggccgaatcctccggtgacatggatgtgctcctcacccatccgtctttcactagcgaaagcaccaagcagcccaagttgcttcatcaggtcgtggaacagctccagaaagtccacttcataactgacaccctttcaaagggcgaaacgaagtttatgggagtgtgccagctgccttctaaaaatgacgagaaggagtaccctcaccgccggatagacattcgtctgatccccaaggaccaatactattgcggagtgttgtactttaccggcagcgacatttttaataaaaatatgagggcccacgctttggaaaaggggtttacaatcaatgagtacaccataaggcccttgggtgtgactgtgctgcaagccacacgtgaagatctgatgcataatatgctcttaggtccacagcttaaagctatcaaggagctgcaggagaacccctgtcagtggattgtaaaaaagaccagcctaattacatcatcagggaatacgggcaatccccgcactggagccaatgaggcctgtatattaccgggcagacataacccaatcggggtgctcatctattttctcacctttgcgatgtag

SEQ ID NO: 25729 - DNA, 843 bp, synthetic construct
  misc_feature 1..843: note = Description of Artificial Sequence: Synthetic coding sequence
  source 1..843: mol_type = other DNA
atgagcaagcggaaggccccccaggagaccctgaacggcggcatcacggacatgttgacagagctggccaacttcgaaaagaacgtttctcaggctatacacaagtataatgcttaccgcaaggcagcatccgttattgcaaagtatcctcataagatcaagagtggcgctgaggcaaaaaagcttcccggcgtgggcacaaagatagcagaaaagatagacgagtttctggcaaccggaaagttgcggaaactggagaagatacgacaggacgacaccagctcctccataaacttcctgactcgggtctcgggcatcggacctagcgccgcaagaaagttcgtggacgagggcatcaaaactttggaaggatctcaattggacagttgtccagtcaaggggcatcttaacggtaccgagtccctgttggatttaatctgggacgtgatgacgatcttgaagttaaaaaatgcggacctgcggaagaacgaggacaagttgaaccatcatcagcggatcgggctgaagtacttcggggatttcgaaaaacgcatccctcgcgaggagatgctccaaatgcaggatatagttctcaacgaggtgaagaaggtggatagcgaatacatcgctactgtctgcggcagcttccgccggggggcagagagctccggagatatggacgttcttctcacccatccctcttttactagtgaatccacaaagcagccaaaactgctgcatcaggttgtggagcagctgcaaaaggtgcacttcatcaccgatacactgagcaagggagaaacaaaatttatgggcgtgtgccaattgccgtccaaaaactag

SEQ ID NO: 25730 - DNA, 714 bp, synthetic construct
  misc_feature 1..714: note = Description of Artificial Sequence: Synthetic coding sequence
  source 1..714: mol_type = other DNA
tgagagaagatcgacgagttcctggccaccggcaagctgcggaagttggaaaagatcaggcaagatgacacctctagcagcatcaattttctgacaagggtgtcaggaatcgggccaagtgccgctagaaaatttgtcgacgaaggaattaagacactggaagacctacggaagaatgaagataaactgaaccaccaccagcggatcggactcaaatactttggggactttgaaaaacgtatccccagggaggaaatgcttcagatgcaggacatagtgctgaacgaagtaaaaaaagtcgattccgagtatatcgccactgtgtgtggatcatttcggagaggtgccgagtcctcaggagacatggatgtcctgctaacacatccctcatttacctccgagtctaccaaacagggggtttgccagcttccaagcaaaaatgacgagaaagagtacccccacaggcgcatcgatatccgcctgatccccaaagatcaatattattgcggcgttctctacttcaccggcagtgacatcttcaacaagaacatgagggcccacgctcttgagaagggcttcactattaatgagtataccattcggccactgggggtgaccggcgtggccggcgagccattgcccgtagatagtgagaaagacattttcgactatattcaatggaagtatagggagccaaaggaccgttccgagtag

SEQ ID NO: 25731 - DNA, 546 bp, synthetic construct
  misc_feature 1..546: note = Description of Artificial Sequence: Synthetic coding sequence
  source 1..546: mol_type = other DNA
atgctgcagatgcaggacatcgtgctgaacgaggtgaagaaggtggattctgagtacattgccacagtgtgtgggtcattcagaagaggagctgagtcttccggcgatatggacgtgctgctaacgcacccaagcttcactagcgaatctacaaagcaacctaagctgctccaccaagtggtggaacagctccagaaggttcacttcataaccgatactctgagcaaaggcgagaccaaatttatgggggtctgccaactcccgagtaagaacgatgaaaaagaatacccccaccgaagaattgacattaggttgatccccaaggatcagtattattgtggtgtgctgtattttactggttctgatatttttaacaagaacatgagagctcatgcgttggagaagggatttacaatcaacgaatacactatcaggcccctcggcgtcacaggcgtcgccggagagccccttccagttgattccgaaaaagacattttcgactacattcagtggaaataccgtgaacccaaggacagaagtgagtag

SEQ ID NO: 25732 - DNA, 1728 bp, synthetic construct
  misc_feature 1..1728: note = Description of Artificial Sequence: Synthetic coding sequence
  source 1..1728: mol_type = other DNA
atggacccccggggcatcctgaaggccttccccaagcggcagaagattcacgccgacgcgtcttcaaaggtgcttgcaaagatcccacgaagggaagaaggagaggaggccgaggagtggttgtcatcactcagggcccatgtggtacgaaccggaatcggcagagctagggccgagcttttcgaaaagcaaatagtgcagcacggtgggcaactgtgtcctgcccagggaccgggcgttacacatatcgtagtggacgagggcatggactacgaaagggccctgcgtctcttacgtcttccccaacttcccccaggtgctcagctcgttaaaagtgcttggttgtctttgtgtctccaggaacggagactggtggatgtggctggtttttccatctttatccctagcagatatttagatcacccccaaccgagcaaggccgaacaagatgcctccattccgccaggcacacacgaagccctgctgcagactgcactctctcccccccccccgcctactaggccggtgtctccacctcaaaaggctaaagaagctcctaacacccaagctcagccaatctcagacgatgaagcctccgacggagaggagacacaagtcagcgcagctgatctggaagcactgatttcagggcactatcccaccagcctagagggcgactgtgaaccatctcctgctcccgcagtgttagataaatgggtgtgcgcccagccatcgtcccaaaaggccaccaaccataacctgcatatcacagagaaactggaggtcttagcgaaagcatatagtgtgcagggagataagtggcgtgccctgggctatgccaaagctattaacgcgttgaaaagctttcataagcctgtgacctcttaccaggaagcatgttccatccccgggatcggaaaacgaatggctgaaaagataatcgagatattagagtctggtcacctgcgaaagctggatcacatatctgaatcggtgccggttcttgagctgttttctaacatttggggcgcaggaaccaaaaccgcacagatgtggtatcagcaggggtttaggagtttggaagatatacgcagtcaagcgtcgctcacgacgcagcaggctattggtcttaagcactattccgatttcctcgagagaatgcccagagaagaggctacagagatagagcaaaccgttcagaaagctgctcaggcatttaactctggcttactgtgcgtggcgtgcggctcatatcggcgcggcaaggccacttgcggagatgttgatgtgctgatcacacacccggatggacggagccaccgggggatcttcagtcgtcttttggactcgttaaggcaagaagggtttttaaccgatgaccttgtgtcccaggaggagaatggccagcagcagaagtatctgggggtgtgcaggttgccaggccccgggcgacggcatagacgcttagatattatcgtggttccctattctgaattcgcttgcgctctcctttactttacagggagtgcacatttcaatagatccatgcgcgcactggccaagacgaaggggatgtctctgtctgaacatgctctctccacggccgtggtgcgcaatacgcatggctgcaaggttggacctgggagagtgctgccaacaccgacagaaaaagacgtgttccgcctgctgggactgccctacagggaacccgccgaacgcgactggtag

SEQ ID NO: 25733 - DNA, 897 bp, synthetic construct
  misc_feature 1..897: note = Description of Artificial Sequence: Synthetic coding sequence
  source 1..897: mol_type = other DNA
atgcaccaccagaagtacctgcagcggttcctgggcggcaagcgggaaaagaagcagaaagaagcctgttcaatccctgggattggaaagcgcatggccgagaaaatcatcgagattttggagagtgggcatttacggaagctggatcacatcagtgaaagcgtacctgtcctggaactattttccaacatctggggggccggcaccaaaaccgcccagatgtggtaccagcagggattcagatccctggaagatataaggagccaggcgtctctgaccactcagcaagctattggccttaaacattactccgacttcctggagaggatgccccgggaggaggctaccgagatcgaacagaccgtgcagaaggccgctcaggctttcaacagtggactgctctgcgtggcttgtggctcttatagacggggcaaagcaacttgtggagatgtcgatgtcttaataacccatcctgatgggagaagccatagaggcattttctctagactgctcgactccctgcgccaggaaggtttcctgacagacgacctggtgagtcaggaggaaaatgggcagcaacagaagtacctcggcgtatgtaggctccctggacccgggcgccgtcataggaggctcgatattatagtggtaccctacagtgaatttgcctgtgctttactatatttcactggatcagcacacttcaatcgttcaatgagggcccttgccaagaccaagggcatgagcctctcggaacacgcgttgtctactgccgttgtaagaaacacacatgggtgcaaagtcggccctgggagagtgctacctaccccaaccgagaaggacgtttttcgactcctaggcctcccctatagggagcctgcagaacgagattggtag

SEQ ID NO: 25734 - DNA, 1548 bp, synthetic construct
  misc_feature 1..1548: note = Description of Artificial Sequence: Synthetic coding sequence
  source 1..1548: mol_type = other DNA
atggacccccggggcatcctgaaggccttccccaagcggcagaagatccacgccgacgcctcatctaaagttctagccaaaatccccagacgggaggagggcgaagaggcagaggagtggctgtcttcactacgcgcacacgtggtgagaactggtataggaagagctcgagccgagctctttgagaagcagatcgtgcagcacggagggcagttgtgccctgcacaaggccctggcgtgactcatatcgttgtggatgaaggaatggactatgaaagagcgctgcgtctcctgcgtctcccccagttgccccctggcgcgcagctggttaaatctgcgtggttgagtttgtgtttgcaagaacggagactggtcgatgtcgccggattttccatattcatcccgagtcgctacttggaccacccacagccatccaaagccgaacaagacgcaagcatccccccaggcacccacgaagccctgctccaaacagctctctccccacccccacctccaactagacccgtgtcccctccccaaaaggccaaagaagcacctaatacgcaggctcagccaatctctgacgacgaagccagcgacggcgaagagactcaggtgtcagcagctgacctggaagcgctgatctctgggcattaccccacctcattggagggagattgcgagccaagccccgctcctgctgtgctcgataaatgggtttgtgctcagccttcttcccagaaggccacgaaccacaatctccatataacagaaaaattggaagtgctggccaaagcctattcagtgcaaggggacaagtggagagccctgggctatgcgaaagctatcaacgcgttaaaatcattccataagccagttaccagctaccaagaagcttgctccattccgggaatcgggaaacgtatggcagaaaaaatcatagaaatactcgaatccggccatttaaggaagctggaccacattagtgaatcagttccggtactcgagcttttcagtaatatttggggggccgggacaaaaaccgcccaaatgtggtaccagcaggggttcagatccctggaagatatacgatcccaggcttcactcaccactcagcaggccataggactgaaacattactctgactttcttgagcgcatgcccagggaagaagccaccgaaatcgagcagaccgtccagaaggctgcccaggctttcaactctggcctgctctgtgtcgcctgcgggtcttataggaggggcaaggccacgtgcggagatgttgacgtgctcattacacaccccgacgggcgatctcaccggggcatcttttctaggctgctggacagcttacggcaggaaggctttcttacagacgacctggtgtctcaggaagaaaatgggcagcagcaaaaataccttggagtctgccggttgcccgggccaggtagaagacaccgaagactcgacattatagtcgtcccttactccgaattcgcttgcgctttacagggtggtgcatggccctctgctgcacacagtcattag

SEQ ID NO: 25735 - DNA, 903 bp, synthetic construct
  misc_feature 1..903: note = Description of Artificial Sequence: Synthetic coding sequence
  source 1..903: mol_type = other DNA
atgctgatgcaccaccagaagtacctgcagcggttcctgggcggcaagagagagaaaaaacagaaagaagcctgctcgattcctggaatcgggaagcgcatggccgaaaaaattatagagatccttgaatccggacatcttaggaaactggaccatatttcggaatcagtccccgtgcttgagctgttcagcaatatctggggagcaggaactaaaacggctcagatgtggtatcagcagggtttccggtccctggaggatatacgcagtcaggcgtctctcaccacccaacaagccatcggcctgaaacactattctgatttcctggagcgcatgccacgcgaggaagctactgaaatcgagcagaccgtgcagaaggctgcgcaggcattcaatagcggcctgttgtgtgtggcctgtgggtcttatcgaaggggaaaggctacatgcggggatgtggacgtgctgataacacatccggacggtcgatctcacagaggaattttcagtcgcctgctggacagtctgcgacaggaaggtttcctaaccgatgaccttgttagccaagaagaaaatggacagcagcagaaataccttggcgtgtgtcgtctgcctggccccggcagaaggcatcgacgcctggacataatcgtcgttccatattctgaattcgcttgcgcgctcttatattttacaggttccgcacacttcaaccggagcatgagggccttagctaagactaaaggaatgtccctcagcgagcatgccctgtccacagccgtcgtgcgcaacacgcatggttgcaaagtgggccccggccgagtcctgcccactcctactgagaaagacgtgttccgcctcctaggattgccgtaccgagaacccgctgagagggactggtag

SEQ ID NO: 25736 - DNA, 1728 bp, synthetic construct
  misc_feature 1..1728: note = Description of Artificial Sequence: Synthetic coding sequence
  source 1..1728: mol_type = other DNA
atggacccccggggcatcctgaaggccttccccaagcggcagaagattcatgccgatgctagcagcaaagtactcgctaagattccccgcagggaggagggcgaggaagcagaagaatggctgtcttccctgagggcccacgttgtaaggacagggattggcagagcccgtgccgagctgtttgagaagcaaatagtacagcacggtggccagctgtgcccggcgcaaggtccaggcgtgactcatattgtggttgacgaggggatggactacgaacgggccctgaggctcctgagactcccacagcttcctcccggggctcagctcgtgaaaagcgcatggctctcattgtgcctccaggaacgacggctggtcgacgtcgccgggttcagcatcttcattccttctaggtaccttgaccatccacagccgtccaaggccgaacaggacgcttcaatccctccagggacccacgaggccttgcttcagaccgcgctgtctccaccaccccctccaacacggcctgtctcccccccccagaaggctaaggaggcaccgaacacgcaggctcaacctatcagcgacgatgaagccagtgatggcgaggagacgcaggtgagtgccgccgatttggaggccctgatcagcgggcactacccgactagcctcgagggcgactgtgagccaagtcccgcccctgctgtgctagataaatgggtctgtgcacagccctcgagccagaaagcaacgaatcacaacctacacatcacagaaaagttggaagtgctggccaaagcttactctgtgcagggcgataagtggcgggcactggggtatgctaaagcgattaacgctctgaaatctttccataagcccgtcacaagctatcaggaggcgtgttccatccccgggatcggaaaaagaatggccgagaagattatcgagatcttggaatctgggcacctgcgaaagctggatcatatctccgagagcgtccctgtactcgagctgttcagcaatatatggggtgctggaactaaaaccgctcaaatgtggtaccagcaaggcttccgctccttggaggatataagatcccaggccagcctgaccactcagcaagctattggactcaagcattactcagacttcctcgagcgtatgcctcgggaagaggctacggagatcgaacaaacagtgcagaaggctgctcaagcatttaattctggcctgttatgcgtagcctgcggctcatacaggcgcggtaaagcaacatgcggggatgttgatgtgctgattactcacccggacggccggtctcatagggggattttttctcggctcctggattcactacgccaggaagggttcctcaccgacgatctggtaagtcaagaagaaaatggtcagcaacagaaatatctgggagtttgtcggttgcctggacctgggaggagacataggcggctcgatatcatcgtcgttccctattcagaatttgcctgtgcacttctgtacttcaccggctccgctcactttaacaggagcatgagggccctggccaaaacgaaggggatgtccctgtctgaacatgccctcagcactgctgtggtccgaaacacccatggatgcaaagtaggtcctggcagagtgctacccactccaacggaaaaggatgtgttcagactgcttggtttgccgtacagagagccagcagagagggattggtag

SEQ ID NO: 25737 - DNA, 516 bp, synthetic construct
  misc_feature 1..516: note = Description of Artificial Sequence: Synthetic coding sequence
  source 1..516: mol_type = other DNA
atggactacgagcgggccctgcggctgctgcggctgccccagctgccccctggggctcagttagtgaagtctgcctggctcagcctgtgtcttcaggaaaggagactggtcgacgtagccggattttctatatttattccctccagtccctccctcatgatgaaacctgtgatgggaaagaagcctaggctcgtgcagttgatttggaagcctagcagcgttgcaactactccacctccccttcgggagattgtgagcctcgcccaacccctgctctcctggatcagcggctcagtgcattccccacaggctaggcgtaggccaatcaccacctcgatatcacagaggtcttggaaattctggcccaagccaaccgtctttagggaaactagtgggggcccctgggccatgcctaggccatcaatgcccagcagagcttctatttctctgagccccaggaccaggagaccagctgtatctctcggtctgggaagcggatggctgagaaagtcgtag

SEQ ID NO: 25738 - DNA, 747 bp, synthetic construct
  misc_feature 1..747: note = Description of Artificial Sequence: Synthetic coding sequence
  source 1..747: mol_type = other DNA
atggaggccctgtgcgtgtgcagcctgatgcccctgcactggagctggattctgacggcgtcccacctcgctgcgttttttcagggttttagatcactggaagatatcaggagtcaagcttcactaactacccagcaggccatcggcctgaagcattacagcgatttcctggagcgtatgcctcgagaggaagccaccgaaatcgagcaaaccgttcagaaggctgcccaggctttcaacagtggattactctgcgtggcatgtggctcatatagacgtggtaaggctacgtgtggggacgttgatgtgctgataacccaccccgatggtcgctcccaccggggaatcttttcccggctgcttgacagcctccggcaggaggggttcctgacagatgatttagtgtcacaggaagaaaacgggcagcagcaaaagtacctcggagtgtgtaggctcccaggccctggacgacggcatagacgattagatatcatcgtggtcccctactctgagttcgcctgtgccctcttgtacttcacgggtagcgcccatttcaataggtctatgagggccctggccaagaccaagggcatgtcactttctgagcatgctttgtccactgcagtcgtgcggaatacccatggctgtaaggtcggccccggccgtgtcttacctacgccaactgagaaggacgtctttaggctgcttggactgccctatagagaacccgctgagcgcgactggtag

SEQ ID NO: 25739 - DNA, 1728 bp, synthetic construct
  misc_feature 1..1728: note = Description of Artificial Sequence: Synthetic coding sequence
  source 1..1728: mol_type = other DNA
atggacccccggggcatcctgaaggccttccccaagcggcagaagatccatgcagacgccagcagtaaagttctggctaagatccctcggagggaagagggagaagaggctgaggagtggctgtcttcactgcgcgcccacgtcgtcagaactgggattggtcgtgcccgagctgagctctttgagaagcagattgtgcagcatgggggccagctttgtcctgcacaaggacccggcgtgacacacatcgttgtggatgagggcatggattacgagcgcgctctgagacttctgcggctccctcagctgcctcccggcgcgcagttggtgaagtctgcctggctcagcttatgtcttcaggagcgcagactcgtggatgtggctgggttcagtattttcattccatctcgctacctggaccacccccagccatccaaggccgaacaggatgctagtatacccccgggtacccatgaagcgctcctccaaaccgcgctgtctcccccgcctcctcccactcgacctgtgtcaccccctcagaaggctaaagaggcgccaaacacacaagcccaacccattagcgacgacgaggcgtctgacggtgaggaaactcaggtgagcgcagccgacttagaggcactcatttctgggcactaccccacaagcctagagggtgattgtgagccctcccccgcgccagcagttctggataagtgggtctgcgctcagccctcttctcagaaggcaacgaaccataatctgcacatcacagagaagttggaggtgcttgccaaggcatactcagtccagggcgataaatggcgagctttgggctacgctaaagccattaacgcgctgaaatcattccataagccggttactagctatcaggaagcttgtagcatccccggcatagggaagcgtatggcggaaaagatcatcgaaattctggaatcaggccacttaaggaagctggaccacatctcagaatccgtgcccgtgctggagttgttctctaacatctggggggcgggcacaaagactgcacaaatgtggtatcagcagggctttcgcagtctggaggacatccggtcccaagcaagtctgaccactcaacaggccatcgggctaaagcactatagtgacttcctagagcgtatgccccgcgaggaagccaccgagattgaacagacggttcagaaggcagcccaggcatttaatagtggattgctctgcgtcgcctgtggatcctacaggcgaggcaaagcaacttgtggggacgttgatgtgctgatcactcatcctgacggtagatcacatagaggaatcttcagcagattgctcgactcactgcggcaggaggggtttttgactgacgatctcgtcagccaggaggagaatggccagcaacagaaataccttggtgtgtgtagactgcctggtccaggccgacggcacaggagattggatatcatcgtcgtcccttactccgaattcgcttgtgcactcctgtacttcacaggctcggcccatttcaatcgctccatgcgcgctctcgcaaaaaccaaggggatgtccctctctgagcacgcgctttccaccgctgtggtgcggaatactcacgggtgtaaagtaggcccaggccgcgtgctgcccactcctacagaaaaggacgtatttagattactcggactgccctatagagagccagccgaacgagattggtag

SEQ ID NO: 25740 - DNA, 1464 bp, synthetic construct
  misc_feature 1..1464: note = Description of Artificial Sequence: Synthetic coding sequence
  source 1..1464: mol_type = other DNA
atggactacgagcgggccctgcggctgctgcggctgccccagctgcctccaggggcccagttggtgaaatcagcctggctatctctctgcctccaggagcggaggctggtcgatgtagctggattctcgatcttcattccaagtaggtacctggaccacccccagccgagcaaggccgaacaggacgcgagcatcccacccggtacccacgaagccttgttgcaaacagctctgtctcctccacctccacctacccggcccgtcagccctcctcagaaagccaaagaagcacctaatacccaggcacagccaatctcagacgacgaggcttctgacggagaggagactcaggtgtctgcagccgatttagaggctttgatctctggtcactacccaacaagtcttgaaggcgattgtgagcctagcccagcacccgcagtactggacaaatgggtgtgtgcccagccttcttcacagaaagccaccaatcacaacctccacattactgagaaactggaagtccttgccaaggcatactctgttcagggagacaagtggagggccttgggctatgccaaggctatcaacgcccttaagtcttttcacaagccggtcacgtcttatcaggaagcctgttcaatccccggtattggcaaacgtatggctgaaaagattatcgagatccttgaatcgggccatctgcgtaaactggaccacattagcgaaagtgtcccagtattggaactcttttcgaacatttggggggcaggcaccaagacagcgcagatgtggtatcagcagggttttaggtctctggaggacattaggtcacaggcgtcccttaccactcagcaagcaatcggactgaaacattacagcgattttctagagcggatgcccagggaggaggcgacggagatagagcagaccgttcagaaggcagcccaggcattcaacagcggcctcctgtgcgtggcctgcgggtcttatcgacgtggaaaggccacgtgcggagacgtcgatgtgctaataacgcaccccgatggacggtcacaccgggggatcttctctcggctgctggacagcttgcgacaggagggttttcttactgatgacttagtgtcacaggaagaaaacggacagcagcagaaatatctcggggtgtgcagacttccaggaccaggaaggaggcataggaggttggatattattgtggtgccttatagcgagtttgcttgcgctctgctatacttcaccgggagcgcccactttaataggagcatgagggccctagccaagactaaagggatgagtctctcggagcacgcactgtctaccgctgtcgtccggaacactcacggctgtaaagttggtcccgggcgggtgctgccaactccgacggagaaggacgtctttcggctcctgggcctgccttatcgggagccggctgagcgcgactggtag

SEQ ID NO: 25741 - DNA, 1548 bp, synthetic construct
  misc_feature 1..1548: note = Description of Artificial Sequence: Synthetic coding sequence
  source 1..1548: mol_type = other DNA
atggacccccggggcatcctgaaggccttccccaagcggcagaagatccacgcagacgcatccagcaaggtactagcaaagatcccacgacgtgaggagggggaggaagcagaggagtggcttagctcgctgcgcgcacatgtggtgcggaccggaatcggtcgtgcgagagcagagctgtttgagaagcagattgtccaacacggaggccaattgtgcccagcccagggtccgggggtaacccatattgtcgtggatgagggtatggactatgagagggcactgaggcttttgaggctgccacagctgccacccggagctcagttggtgaagagtgcatggttgtccttatgcctgcaggagagaaggcttgtagacgtcgcgggttttagtatcttcattccctcacggtatttagatcatccccagccctcaaaagccgagcaggacgcaagcatcccacccggaacacatgaggcattactgcagactgccctgtctcccccaccccctcctacgcggcccgtgagccccccccagaaggctaaggaagcccctaacactcaggctcagcctatttctgacgatgaggctagtgacggcgaggaaacgcaggtgagtgccgccgacctcgaggcccttatttccggacattatccaacttctctggagggcgattgcgaaccttcccctgcacctgccgtgcttgataaatgggtgtgtgcacaaccaagctcccagaaagccacaaaccacaaccttcacatcaccgaaaagctggaagttcttgccaaggcttattctgtgcagggggataagtggcgggcattgggttacgctaaggctatcaatgccctgaaatccttccacaagcctgtcacgagttatcaggaggcttgttctatcccagggatcggcaagcgaatggcagaaaagattatagagattttagagagcgggcacttgcgtaagcttgatcacatcagcgaatcagtgcccgtgctggaactgtttagtaacatttggggggcgggaactaagaccgcacagatgtggtatcagcagggctttcgaagcctagaagatatacggtctcaagcctccctgactacgcaacaggctattggtttgaaacactactccgattttctggaaaggatgcctagggaagaggctaccgaaatagagcagacagtacagaaagctgcacaggctttcaattcagggctgctgtgtgtggcttgtggctcgtatcgccgcggaaaggccacttgtggagacgtggatgtgctgatcacacaccctgacggacgttcccacaggggaatcttcagtcggcttctggatagtctgagacaggaaggattcctcactgacgatttagtgtcccaggaagaaaacggccagcaacaaaagtacttgggcgtctgccgcttgccaggaccagggcgaagacacaggcggcttgatattatcgtcgttccctacagtgaatttgcatgtgcgctgcagggcggggcctggccatccgccgcccactcacactag

SEQ ID NO: 25742 - DNA, 810 bp, synthetic construct
  misc_feature 1..810: note = Description of Artificial Sequence: Synthetic coding sequence
  source 1..810: mol_type = other DNA
atggacccccggggcatcctgaaggccttccccaagcggcagaagattcacgctgacgcatccagcaaggtgttggctaagattcccagacgagaagaaggggaagaggcagaggagtggctgagtagcctccgagcacacgtcgtgcgcacggggatcggacgtgcgagagccgaactgttcgagaagcagatcgtgcaacacggaggccaactgtgccccgcacagggacccggagtgacacacatcgttgtggacgaaggcatggactatgaacgcgctctgcgcttgctgcgactgccacaactgcctcctggggcccagctagtgaagtcagcctggctctcgctttgtttacaggaacggaggcttgtcgacgttgctggcttcagcatcttcatcccctctcgctacttggatcacccacaaccatccaaggccgaacaagatgcgagcatccctcccggaacacacgaggctctgttacaaaccgctctgtccccccccccacctccaacccgtcccgtttccccgccgcaaaaggctaaagaagccccaaacacacaggcccagccaatatcagacgatgaggcatccgacggcgaagagactcaagtgtctgcagcggacttagaggcactgatcagcggacactatcccacatcgctggaaggtgattgtgaacccagtcccgctccagccgtcctggacaaatgggtttgcgcccaacctagttcccaaaaggccacgaatcacaacctgcatattaccgaaaagctagaagtcctcgcgaaagcctattctgtgtag

SEQ ID NO: 25743 - DNA, 1413 bp, synthetic construct
  misc_feature 1..1413: note = Description of Artificial Sequence: Synthetic coding sequence
  source 1..1413: mol_type = other DNA
atggacccccggggcatcctgaaggccttccccaagcggcagaagatacacgccgacgcaagctcaaaagttctcgcgaagattccacgcagagaagagggggaggaggccgaagaatggctttcttcccttcgggctcacgttgtcaggactgggatagggcgtgcccgagccgaactattcgaaaagcagattgttcagcatggtgggcagctttgtcccgcgcagggcccaggcgtcacgcacatcgtggtcgatgaaggaatggattatgagcgagcacttagactgttgcgactgccacagctgccccccggcgcccaactagtcaagtcagcctggctgagtctctgtctgcaggagcgcaggctggtggatgtggcaggattctctatctttatccccagtagatatctggaccacccccaaccgagcaaagcagagcaagatgcgtccattccacccggcactcatgaggctctcttacaaaccgccttatccccgcccccccccccaaccaggccagtttcacccccacagaaagccaaagaggctcctaatacccaggcacagcctatctccgacgacgaggcgtccgatggcgaggaaactcaagaggcatgctccataccaggtataggcaagaggatggccgagaagattatcgagatattggaaagtggacatctgaggaaactggatcatattagcgagagtgtgcctgtcctggagctgttttccaatatttggggcgcggggacaaagaccgctcagatgtggtatcagcagggatttagaagcttggaagacattaggagtcaagcttctcttaccacccagcaggccattgggctcaagcactactcagattttctggagcggatgccaagggaagaggctacggaaattgagcagacggtccagaaagcggcacaagcttttaactccggacttctctgtgtggcttgcggcagctatagaagggggaaagccacatgcggagacgttgatgtgttgataacccaccccgatgggcgcagccaccggggaatcttttcccgtctgctagactccctgcgccaggaggctgtgccatcagttggccctgggttcctaaccgacgatcttgtatcccaagaggaaaacggtcagcaacaaaagtacctaggagtgtgtcgactgcctggacctggcaggcgacaccggagattggacattatagtagtcccctatagtgagtttgcttgtgcgctgctgtactttacggggtcagctcatttcaaccggtcaatgcgggccctggctaaaacaaaagggatgtccctatccgagcacgccttatcaactgcagtggttaggaacactcatggctgcaaagtcgggcctggcagagtgttgcctaccccaacttag

SEQ ID NO: 25744 - DNA, 1005 bp, synthetic construct
  misc_feature 1..1005: note = Description of Artificial Sequence: Synthetic coding sequence
  source 1..1005: mol_type = other DNA
atggacccccggggcatcctgaaggccttccccaagcggcagaagatccacgccgatgcatcctcaaaacccagctgcgccagtgctcttcggtgtctatgcccagagtcagacatcggcgccgattctgcatgtcctggtccagcagaatggctgtcctccctcagagcgcacgtggtgagaaccgggatcggccgcgctcgagccgagttattcgagaagcaaattgtccaacacggaggacagctgtgccccgcccagggcccaggcgtcacccacattgtggtggacgaaggcatggactatgagagggcacttagactcctgcgactgccccagctgccacccggcgcacaactggtgaaatccgcctggctctcgctgtgcctgcaagagagacgtctcgtggatgtggcaggtttctccatttttatcccgtcccgctatcttgaccaccctcaaccgagcaaggcagagcaggacgcctcaattccgcctggaacccacgaggccttgctacagaccgccctgtcacctcctcctcctcccacccgccccgtgtcaccaccccagaaggctaaggaggcccctaacacacaggcgcagcccatctccgacgacgaagcgtcggacggtgaagaaactcaggtcagcgcagccgacctcgaggcattaatcagtggccactatcctacctccctggagggtgactgcgaacctagtccggcaccagctgtgctggacaagtgggtctgtgctcaaccctcaagccagaaagcaacgaaccacaacctccacattaccgagaaactggaggtgctggcaaaagcctacagcgtccagggggataaatggagggcattggggtacgccaaagcaattaacgctctcaaaagcttccacaagcccgtgacatcctaccaggaagcctgttctatccccggcattggaaaacgcatggccgaaaagatcatcgaaatcctcgagtccggccatctaagatag

SEQ ID NO: 25745 - DNA, 657 bp, synthetic construct
  misc_feature 1..657: note = Description of Artificial Sequence: Synthetic coding sequence
  source 1..657: mol_type = other DNA
atgcaccaccagaagtacctgcagcggttcctgggcggcaagcgggaaaagaagcagaaagaagcatgcagcattccagggatcggaaagagaatggccgagaagataatcgaaatcctggaaagcggacatttgcggaagctcgaccacatttctgagagtgtgcctgtgcttgagctcttttcaaatatctggggggctggtactaaaacagcccaaatgtggtaccagcagggcttcagatctctggaggacatacggtcccaagctagcctgacaactcaacaggccatcggcctgaaacactatagtgacttcctcgagcgaatgcccagggaggaagccacagaaattgaacagacagtgcagaaggcagcccaagcctttaactctggactgctgtgtgtggcatgtggcagttatcggaggggcaaggccacatgcggtgatgtggatgtgctgattactcatcccgacggccggtcgcacagggggattttttctcggttactggatagtcttcgtcaagaggggtttctgacggatgatctcgtgtcccaagaagaaaacggacaacaacaaaagtacctcggggtgtgtagacttccgggccccgggcggcggcatagaaggctcgacatcatagtggttccctag

SEQ ID NO: 25746 - DNA, 567 bp, synthetic construct
  misc_feature 1..567: note = Description of Artificial Sequence: Synthetic coding sequence
  source 1..567: mol_type = other DNA
atggacccccggggcatcctgaaggccttccccaagcggcagaagatccatgcagatgctagctccaaagtcttggcaaagattccgaggcgagaagaaggggaggaggccgaggaatggctgtcgtcactgcgagcccatgtagtgaggaccggaatcggaagagcaagagctgagttattcgagaaacagatcgttcagcatgggggccaattatgccctgctcagggccccggagtaactcacatcgtggtggacgagggtatggattacgaacgtgccttaagattgctgcgcctgccacagctacctcctggtgcacaactggttaaatccgcctggctgagcctctgtctgcaagagagaaggctggtggatgtggccggattctctatctttatccctagtaggtacctggatcatccccagccttcgaaggctgagcaggacgcctcaataccaccgggtactcacgaggccctgttgcagactgcgctctccccgcccccccctcccacccgaccagtgtctcccccgcagaaggctaaggaggctccaaatacctag

SEQ ID NO: 25747 - DNA, 516 bp, synthetic construct
  misc_feature 1..516: note = Description of Artificial Sequence: Synthetic coding sequence
  source 1..516: mol_type = other DNA
atggactacgagcgggccctgcggctgctgcggctgccccagctgccccctggagcacagttagtgaaatccgcctggctatctctgtgcctgcaggaaaggagactggtggatgtggctgggttcagcattttcataccgagttcccccagtcttatgatgaagccagtcatgggcaaaaagcctcgactggtccaactgatttggaagccatcctcagtggccacaactcccccgcctctgcgagagatcgtctctcttgctcagcccttgcttagctggatcagcgggtctgtgcactccccccaggctaggaggcgcccaataactacaagtatttcgcagagatcttggaaattctggcccaaaccaacagtgttccgcgagacctctggcggcccttgggcaatgcccaggccctccatgccctccagggctagtatctccttgagccctaggactaggcgccctgcagttagtctgggcttaggtagtggctggctccgcaaatcctag

SEQ ID NO: 25748 - DNA, 459 bp, synthetic construct
  misc_feature 1..459: note = Description of Artificial Sequence: Synthetic coding sequence
  source 1..459: mol_type = other DNA
atggactacgagcgggccctgcggctgctgcggctgccccagctgccccctggcgcacaattagttaaatcagcatggcttagtctgtgcttgcaggagagacgcctcgtagatgtggcgggattcagcattttcatcccctcttcacccagtctgatgatgaaacctgtgatgggaaagaagccccgtctggtacaacttatttggaagccttcctcagtcgcaacaactcctcctcccctgcgcgaaatcgtctctctggcccagcctcttttaagctggattagcggcagcgtgcacagccctcaggctagaaggagacctatcactacttcgatctctcagagatcatggaagttctggccaaaaccgaccgtcttcagggagacttctggcggtccctgggctatgcccagaccttcaatgcccagcagggccagtataagcctctctccctag

SEQ ID NO: 25749 - DNA, 939 bp, synthetic construct
  misc_feature 1..939: note = Description of Artificial Sequence: Synthetic coding sequence
  source 1..939: mol_type = other DNA
atgcaccaccagaagtacctgcagcggttcctgggcggcaagcgggaaaagaagcaaaagccaatttcagacgacgaggctagcgatggagaagagactcaggaagcttgctcaatccctgggattggcaaaaggatggccgagaagatcatcgaaatactcgaaagtgggcacctgcgaaagctggatcacatctccgagagcgtgccggtgctcgagttattctccaacatctggggcgccgggacaaagacagctcaaatgtggtaccaacagggctttcggtctttagaggatataaggagccaggcctcactgaccacccagcaagccattgggctgaagcattactccgactttctcgaaagaatgccaagggaggaggcaaccgagatagagcagaccgtgcagaaagctgcccaggctttcaattctggacttttatgcgtagcctgtggaagttatcgtaggggcaaagcaacctgcggcgacgttgatgtgctgattacccatccagacggaaggagccacagaggtattttttctaggctgctcgattccctgagacaggagggtttcctgacggacgatcttgtctcacaagaggagaatgggcagcagcaaaagtatctaggagtgtgccgcttgccaggtcctggcagacggcaccgacgcctggacattattgtggtgccatatagtgagttcgcatgcgcattgttgtacttcactgggagcgctcatttcaatcgcagcatgagagcgttggccaagacgaagggaatgtccttgagcgagcacgcattgtccacggcagtcgtaaggaacacacacggatgcaaggtcggacccggacgtgtcctgccgaccccaacagagaaggatgtgttcagactcctcggtctgccttatagagagcctgcggaaagagactggtag

SEQ ID NO: 25750 - DNA, 1401 bp, synthetic construct
  misc_feature 1..1401: note = Description of Artificial Sequence: Synthetic coding sequence
  source 1..1401: mol_type = other DNA
atggccgaccagctgtacctggagaacatcgacgagttcgtgaccgaccagaacaagatcgtcacgtacaagtggctcagctacaccctgggcgttcacgtaaaccaggctaaacagatgctgtatgactacgtagagcggaagcgaaaagaaaactccggtgcccaacttcacgtcacatacctcgtgtctggcagtctgattcagaatggccacagctgtcataaggtcgcggtcgttcgggaggacaagctcgaggccgtaaagtcaaagttggcagtcactgcgtcaattcacgtttatagcatccagaaggccatgctcaaggattccggacccttatttaacactgactacgacattctcaagtccaatctgcagaattgctctaagttctctgccatccagtgtgcagctgccgtcccacgggccccggcggaatctagcagctccagtaagaagttcgagcagagtcatctgcatatgtcctcagaaacgcaagccaataacgagctgacaactaacggccatgggccccccgcctcaaagcaggtgagtcagcagccaaaagggataatgggaatgttcgcaagtaaagccgctgccaaaacacaggagaccaacaaggagaccaaaacggaggctaaggaggtcacgaatgcaagtgcagctggtaataaagccccaggaaaaggaaacatgatgagcaatttcttcggaaaagcagccatgaataaattcaaggttaacctggattctgagcaggctgtaaaagaagaaaaaatagtagaacagcccaccgtatccgtgactgagcccaaactcgcgaccccagctgggcttaagaaatcctcaaagaaagcggagccggtcaaggtattgcagaaagagaaaaaacgaggcaaacgggtggccttatctgacgacgagacaaaagagaccgaaaatatgcggaagaaacgcaggcggatcaagctgcccgagagtgattccagcgaggacgaggtgttcccagattctcccggtgcttacgaggcggaaagcccaagtccaccgcctcccccatcgccaccgctagagccagttcccaagaccgagcccgagcccccctccgttaaatctagctccggagagaataaaaggaaacgaaaaagggtgctgaagagtaaaacttacctggacggcgagggatgtattgtgaccgagaaggtgtacgaatccgagagttgtacggatagtgaggaggaactgaacatgaaaacatcgagcgtgcacaggccgccagcaatgaccgttaaaaaggaaccccgggaggagcgcaagggtcccaaaaaaggcacggccgcgttaggcaaggcaaacagacaggtgagtattaccggattctttcagcggaagtag

SEQ ID NO: 25751 - DNA, 1284 bp, synthetic construct
  misc_feature 1..1284: note = Description of Artificial Sequence: Synthetic coding sequence
  source 1..1284: mol_type = other DNA
atgctgtacgactacgtggagcggaagcggaaggagaacagcggcgctcagctgcacgttacttacctggtgtcaggtagcctcatccaaaacgggcactcctgtcataaagtagccgtggtgcgggaagataagttagaagcagtcaagagcaaactcgccgtgactgcctctattcacgtgtattccatccaaaaagccatgttgaaagactccggaccgctcttcaacactgactacgacatactgaaatctaacctgcagaattgttccaagtttagcgcaattcaatgcgcagctgcagttccacgggcaccagcggagagctcgtcgagcagcaaaaagttcgagcaaagtcacctgcacatgtcgagcgagacacaggccaacaacgagttaacgactaacggtcatggacctccagcctctaagcaggtatctcagcagccaaagggcatcatgggcatgtttgcttctaaggccgccgcaaagacccaggaaaccaataaggaaacaaaaacagaggctaaggaggttaccaacgccagtgccgcgggaaataaggctcctgggaaggggaacatgatgtccaatttcttcgggaaagctgcaatgaacaagtttaaggtgaaccttgattctgagcaggccgtcaaggaagagaaaattgttgaacagcctaccgtgtcggtcaccgagccaaaactcgcaacccccgcaggactcaagaagtcatcaaaaaaggctgaacctgtgaaagtactgcaaaaggagaagaaacgcgggaaaagggttgcactgagcgacgacgaaaccaaagaaacagagaatatgaggaagaagagacgacgcattaaactccctgagtcggactcatccgaggatgaggtctttcctgatagccctggcgcctacgaagctgaatcccctagccctcctccccctccgtccccccctctagagccagtgcccaagaccgagccagaaccacccagcgtcaagtcctcctctggagagaataagcggaagcgaaagcgagtgttaaaatccaagacatacttggatggcgagggttgtatcgtcaccgaaaaagtgtacgagtccgagtcttgcacagactccgaggaagagctcaacatgaagacttctagcgtccataggccccccgcaatgactgtcaagaaggagcctagagaggaacgaaagggccctaagaagggtaccgctgcactcggtaaggccaacaggcaagtgtctattacgggcttcttccaacgaaagtag

SEQ ID NO: 25752 - DNA, 1083 bp, synthetic construct
  misc_feature 1..1083: note = Description of Artificial Sequence: Synthetic coding sequence
  source 1..1083: mol_type = other DNA
atgctgaaggacagcggccccctgttcaacaccgactacgacatcttgaaaagcaacttacagaactgctcgaagtttagcgcaatccagtgcgctgcggccgtgcctcgagccccagccgagtcaagttcgagttctaagaagttcgagcagagccacctgcacatgtcatccgagacccaggcgaacaatgagctcaccaccaatgggcacggacccccagcctccaagcaggtgagccagcagcctaagggcatcatgggcatgtttgcatcgaaggccgccgccaagacacaggaaaccaacaaagaaacaaaaaccgaagccaaggaagtaacaaatgcgtcagctgctggaaataaggcccccggcaaaggaaacatgatgtccaatttctttggtaaagccgctatgaataagtttaaggttaacttagactctgagcaggccgtgaaagaggaaaagatcgtggaacagcccactgtatccgttaccgagccaaaactggctaccccggctggtctgaagaagtcatccaagaaggcagagcccgtgaaggtcttgcagaaggaaaagaagcgtggtaagagggtggcactgtctgacgatgaaacgaaagagacagagaatatgcgtaagaagagacgccgaatcaaactccctgaatcagactccagtgaagatgaggtgttccccgatagccctggggcctatgaggcagagagtccatcaccgcctccaccacccagcccccctctggaaccagtgcctaagaccgaacccgagccaccatcagttaaatcgagcagcggcgaaaacaagcgcaaacgcaagcgggtcctgaagtccaaaacatacctggacggcgaaggctgcatcgtcaccgaaaaggtgtacgaatccgagagttgtactgacagcgaagaggaattgaacatgaaaacatcctccgtgcacaggccgccagcaatgactgtgaagaaagagccccgagaggagcgcaagggtcccaaaaaaggaaccgccgctcttgggaaagcgaatagacaggtgtcgataactggtttcttccaacgaaagtag

SEQ ID NO: 25753 - DNA, 804 bp, synthetic construct
  misc_feature 1..804: note = Description of Artificial Sequence: Synthetic coding sequence
  source 1..804: mol_type = other DNA
atggccgaccagctgtacctggagaacatcgacgagttcgtgaccgatcaaaataaaatcgtcacgtacaaatggttgtcctacactctcggcgtgcacgttaaccaggctaaacaaatgctctacgattacgtggaacggaagcggaaggagaactctggagcccaactccacgtgacctatctggtgtccggttcattgatccagaacgggcatagctgtcacaaagtcgccgtggtcagggaagataaactcgaagccgtgaagtcaaagcttgcagtgacagcatccatacacgtgtactccatccagaaggctatgctaaaagactctgggcccttgttcaacaccgactacgatattctcaagtccaacctgcagaattgttctaaattctcggccattcagtgcgcggcggccgtgcctagggcccccgccgagagcagcagcagcagcaaaaagtttgagcaaagtcatttgcacatgtcctccgaaactcaagcgaataatgaactaacaactaatggtcacggccccccggcctccaagcaggtaagtcagcagcccaagggtattatgggaatgttcgcgtccaaagctgctgcaaagacgcaggagactaacaaagaaacaaaaacagaggcaaaagaggtgactaatgcctctgccgccggcaataaggcgccaggtaaggggaatatgatgtcaaacttttttggcaaagcggccatgaacaaatttaaggtgaacctcgattccgagcaagctgtcaaagaggaaaagatcaaagagaagaagcgttag

SEQ ID NO: 25754 - DNA, 1566 bp, synthetic construct
  misc_feature 1..1566: note = Description of Artificial Sequence: Synthetic coding sequence
  source 1..1566: mol_type = other DNA
atgggcgaggtggaggcccccggccggctgtggctggagagccccccgggcggcgcaccaccaattttcctccctagtgacggccaagctctcgtgctggggcgcggccccctgacccaagtgaccgaccgaaaatgttccaggacccaggtcgagttggtagccgacccagagacccggaccgtggcagtgaaacagctgggggtcaacccgagtactaccgggacccaggagctgaagcccggtctggaagggagtctgggagtaggtgataccctgtatttagttaacggcctgcacccactgacccttcggtgggaagagacacggactccagagtcacaaccagatacccctcctggcacgcccctcgtgagtcaggacgaaaaacgggacgccgagttaccaaagaaaaggatgcgcaaatctaaccctggatgggagaacctggaaaagctcctcgtgtttactgctgccggtgtgaaacctcagggcaaagtggcaggattcgacctcgatgggaccttgatcaccacccgctccggaaaagtgttcccaaccggcccctctgactggcgcatcctgtacccagagattccccggaagctgcgggaactggaagctgagggctataagctggtgatctttaccaatcaaatgagcattggtcgaggcaaattacccgctgaggagttcaaggcaaaagtcgaggccgtggttgagaagctcggcgttccattccaggttcttgtcgccacccacgccggcctgtacagaaagcccgtgacagggatgtgggatcacctccaggaacaggcgaacgacggaacccctattagtattggagattctatattcgttggtgatgcggcaggtcgccctgccaactgggctccaggccggaaaaagaaggacttcagctgcgccgatagactatttgcccttaatcttgggctgccattcgcgacaccagaagagttttttttgaagtggcccgcagctggattcgaattacctgccttcgatccaaggaccgtgtcaaggagtggtccactctgtctacccgaatcccgcgcattgctcagcgctagccctgaggtggtcgtcgccgtggggtttcccggcgccggaaagtcgaccttcctcaaaaagcacctggtgtctgcgggctacgtgcacgttaatcgcgacaccttagggtcctggcagcggtgcgttacaacatgcgaaaccgccttgaagcaggggaagagggttgccatagataacaccaacccagatgctgcatcccgcgctcgttacgtacagtgcgccagggctgcaggagtcccctgcaggtgcttcctgttcacggccaccctggagcaagcacggcataataacagatttagggagatgacagacagctcccacatcccggtaagtgatatggtcatgtacggataccgcaaacagttcgaagcgcccacattagccgagggattctctgccattttggaaattccattcagactgtgggttgaaccaagactcggcaggctctattgccagtttagtgaagggtag

SEQ ID NO: 25755 - DNA, 699 bp, synthetic construct
  misc_feature 1..699: note = Description of Artificial Sequence: Synthetic coding sequence
  source 1..699: mol_type = other DNA
atgctgggcgccatgttccgggccggcacccccatgccccccaacctcaacagccaaggtgggggccactacttcatagacagagacgggaaggcctttcgccacattttgaacttcctgagactgggaaggctggacctccctcgggggtatggtgaaactgcacttctgcgggccgaggccgatttctaccagatccgtcctttgttggacgccctgcgagaacttgaagctagccaaggaacgccagcacctaccgctgccctactccacgcagatgtagatgtctcaccgagactggtgcacttctcagcgcgcagagggccacaccactatgaactctcttctgttcaggtcgataccttcagagcaaacctattttgtacggacagcgagtgtttaggggccctccgggctcgttttggagtcgcgtccggcgacagagccgaaggctcccctcatttccacttagaatgggcacctcgccccgtggagcttccagaggtggagtatggccgtctgggcctgcagccattgtggaccgggggaccaggtgaaagaagggaagtggtgggaacgccttcctttctggaggaagtcctgcgcgtcgcactggaacacggcttcaggttggacagtgttttccccgatcccgaggatcttctgaacagccgttcactacgcttcgtgcgccattag

SEQ ID NO: 25756 - DNA, 5157 bp, synthetic construct
  misc_feature 1..5157: note = Description of Artificial Sequence: Synthetic coding sequence
  source 1..5157: mol_type = other DNA
atgaaccagaacaccaccgagcccgtggccgccaccgagaccctggccgaagttcccgagcatgtgctgcggggtctgcccgaggaggtgagattatttcctagtgctgtggacaagacacgaataggggtgtgggccaccaaaccgatcctgaagggcaagaagttcgggccctttgtgggcgataagaagaaacgcagccaggtcaaaaataacgtgtacatgtgggaggtctattacccgaatttggggtggatgtgcattgacgcaaccgatcccgaaaaaggcaattggcttcggtatgtcaactgggcgtgcagcggagaggagcagaacttgttccccctagagattaaccgggccatttactacaaaacgttgaaacctattgctcccggggaagaactgctagtttggtataatggcgaggacaacccagaaatcgctgcagcaatagaggaagagagggccagcgccagatcgaagcgcagttcacctaagtccaggaagggcaaaaagaagagccaggagaacaaaaataaaggtaacaaaatccaggacattcagctaaaaacctctgagcctgatttcacttctgctaatatgcgggatagcgcagagggcccaaaagaagatgaagagaaacctagcgcatctgctctcgaacagcccgcaacattgcaagaggtagcgagtcaggaggttcccccggagctcgccacaccggcgccagcctgggaaccacagcccgaacctgacgaacggctggaggctgccgcctgtgaggtgaatgacctaggcgaagaggaagaggaagaggaagaggaggatgaagaggaggaggaagatgatgacgatgatgaactggaggatgaaggcgaagaagaggcttctatgccaaatgaaaactctgtgaaggagcccgagattcgttgcgatgagaaaccagaagatctgctggaagagcccaagactacatctgaggagaccttggaggactgtagcgaagttacccctgccatgcaaatcccaagaactaaagaggaggccaatggcgatgtgtttgagacgttcatgtttccatgtcagcactgcgaaagaaagtttaccaccaagcagggcctcgaacgccacatgcacatccatattagcactgtcaaccatgccttcaaatgtaaatactgcgggaaggccttcggtacgcagattaacaggcgcaggcacgaaaggcgtcacgaggctggcctcaagcggaagccatcccagaccctgcaaccttccgaagacctggctgatgggaaggcgagcggggaaaacgtggccagtaaggatgatagcagtcctccctcactcgggcccgactgtctcattatgaactctgagaaggcctctcaggacactatcaatagtagcgtggtggaagagaacggggaagtgaaagagctgcacccttgcaagtactgcaaaaaggtctttggcacacacacaaacatgcgtcggcatcagaggagagttcatgagcgtcacttgattccgaaaggggtcagacggaaaggtggtctagaggaacctcagccccccgctgaacaggcccaggcaacacagaacgtatacgtgccaagcaccgagcccgaggaggagggagaggccgacgatgtgtacatcatggatatcagcagcaacatctctgagaacctgaactactacattgacggtaagattcagacaaataataacacaagtaactgtgacgtcatcgagatggaatccgccagcgccgacctgtatgggattaattgtctgctgactcctgtgaccgtagaaatcacccagaatattaagacaactcaggtgccagtgaccgaggatctgccaaaagagccgctgggctctaccaacagtgaggcaaagaaaagacgaaccgcttctccccccgccctgcctaagatcaaggctgagaccgatagcgatccaatggttccttcatgcagcctgtcactccctctgagtatcagcacaacagaggccgtttcattccacaaagaaaagtccgtttacttatccagtaaattgaagcagctgcttcaaacacaggataaactgacccccgctggcattagcgcgaccgagattgccaagctgggaccagtctgtgtgtcagcccccgctagcatgctgccagttaccagctcgcgattcaaaagaaggactagcagtcctccgtcatccccgcagcatagcccagccctgcgtgacttcggcaaaccctcggacggtaaggccgcctggactgatgctgggctcactagtaagaagtccaagctggaatctcactctgatagccccgcatggtctttgtcagggcgggacgagagggagacggtgtccccaccttgtttcgacgaatacaagatgagtaaggaatggactgctagcagcgcctttagcagcgtgtgtaatcagcaacctcttgatttgagcagcggggtaaaacagaaggcggagggaaccggtaaaacgcctgtgcaatgggaatccgtactagatctgtccgtgcataaaaaacattgttccgacagcgaaggaaaggaatttaaggagagtcattctgttcagccaacgtgtagtgccgtgaagaagagaaagccaaccacatgtatgctgcagaaggttttattgaatgagtacaacgggatcgacctgcccgtcgagaatcctgccgacggcacacgatctccaagtccatgcaagtctctcgaagctcagcccgacccagacctggggccaggtagtgggtttccagcccccacagtggagagtacgccagacgtgtgcccaagttcgcctgcccttcaaacgcccagcctcagctctggccagctgccaccccttttgatccctactgacccctcaagtccccccccctgtccaccagtgctgacagtagctaccccgcctcctcctctgctgcccaccgtgcccctccccgccccctcatccagcgccagccctcatccctgtcccagccccctgtccaatgcaacagctcagagccccctcccaatcctaagccctacagtctcaccttcaccctcacctatcccacctgttgagccgctgatgagcgcagcctcaccaggaccaccaactttgtcatcatcttctagtagtagtagttccagtagttcttttagctcaagctccagcagttcctcgccctctccaccacccttaagcgctatttcatctgtcgtcagcagtggcgataacctagaggcctctttgcctatgatcagctttaaacaggaggaactggagaacgagggtctgaagccgagagaggaaccacagtcagcggcagagcaggacgtggtggtgcaggagacctttaataaaaacttcgtgtgtaatgtttgtgaatctccctttctttctatcaaggaccttacaaaacacttaagcatacatgcagaagaatggcctttcaagtgtgagttttgtgtacagctttttaaggacaagactgatctcagtgagcacagattcctgctgcatggcgtgggtaacatcttcgtatgctctgtgtgtaagaaggaatttgcatttttatgcaatttacagcagcatcagagggatctgcatcctgataaagtgtgcacacatcacgaatttgaatctgggacacttcgtccacagaatttcacagacccaagcaaagcacacgtggagcatatgcagagtcttcccgaagatcccctggagacctcaaaagaggaggaggaactgaacgacagcagtgaagagctctatacaacgatcaaaatcatggctagcggtatcaaaacaaaggatcccgacgttagactgggcttaaatcaacattacccatcctttaaacctcccccattccagtatcaccacagaaaccccatgggtattggcgtgacggcaacgaacttcacaacacacaacatcccacagactttcacaaccgctatacgatgtacaaaatgcgggaagggggtcgacaacatgccagaactccacaagcacatcctggcttgcgccagtgcttctgataaaaagcgctacacccccaaaaagaacccggtacctctgaaacagaccgttcaacctaagaacggagtggtcgttctggacaattcaggcaagaacgcattcagacgcatgggccagcccaaacggctcaatttttcagtcgagctctccaaaatgtctagtaacaaacttaagctcaatgctctgaagaagaagaaccaattggtccagaaagctatcctccaaaagaacaaatctgctaagcagaaggcagacctcaaaaacgcctgcgaatctagcagtcacatttgcccgtactgtaatcgtgaattcacctatatcggctccctgaacaagcacgctgctttcagctgtcccaagaagcccctatcacccccaaagaagaaagtctcccactcaagtaaaaagggagggcattcgtcccctgctagttcagacaagaactccaactcaaatcatagacgccggacagcagatgccgagatcaaaatgcagtcgatgcagacgccactggggaaaacaagagcacggagttccgggccaactcaggtacctctgcccagttcgagcttcagaagcaagcagaatgtgaaattcgccgcgtcagtcaaatctaaaaagccctcttcatcttctctccggaattcttctccaattcgtatggccaaaattacacacgtagagggcaagaagcctaaagccgttgctaagaaccattctgctcagttatcgagtaaaacttctcggtcactccatgtacgagtgcaaaaatcaaaagctgtgctgcagagcaaatctacactggcgtctaaaaagcgaactgaccgctttaacattaagagtcgggagaggtctggcgggccagtgaccagatccttacagttggcggctgccgcagacctgtccgaaaataaaagggaggatggaagcgctaagcaggagctcaaggacttctcttacagtttgaggctggcctcccggtgcagtccccctgcagcgccatacattacgcgtcaataccgaaaggttaaagcccccgccgccgcccagtttcagggtcctttctttaaggagtag

SEQ ID NO: 25757 - DNA, 5049 bp, synthetic construct
  misc_feature 1..5049: note = Description of Artificial Sequence: Synthetic coding sequence
  source 1..5049: mol_type = other DNA
atgaaccagaacaccaccgagcccgtggccgccaccgagaccctggcagaggttcctgagcatgttctgcgaggtctaccagaggaggtgcggctctttccatccgctgtggataaaactaggatcggtgtttgggccaccaagcccatccttaaaggcaagaagtttggaccatttgtcggtgataagaagaagagaagccaggtgaaaaataacgtctatatgtgggaggtctactatcctaatctggggtggatgtgcatagatgctaccgatcctgaaaaggggaactggctgagatatgtgaactgggcttgcagtggtgaagaacagaacctgtttcccctggaaataaaccgcgcgatctattataagacattaaagccaattgcacctggagaagagctcttggtgtggtacaatggcgaggacaaccctgagatcgcagctgcgatcgaggaagagagggctagcgcacggtccaaaagatcctcaccgaaatccaggaagggtaagaagaagtctcaggaaaacaaaaacaagggaaataagatccaggacattcagcttaagacgagcgagcccgactttacgagtgccaatatgcgtgatagtgctgagggccctaaggaggatgaagagaagcccagcgcgtctgcgcttgagcagccagcgaccctccaggaagtggcgagccaggaggtgcctccggagctggccaccccagcccccgcttgggagccacagccagaaccagacgagcgcttagaggccgctgcctgcgaggtgaacgatctgggggaggaggaggaggaagaggaggaagaagacgaagaggaagaggaagacgacgatgatgatgagctagaggacgagggagaagaagaagccagcatgccaaacgaaaactcagtcaaagagcctgaaattaggtgcgatgagaagccagaagaccttctggaagagccgaaaactactagcgaagagacactggaggactgcagcgaggtgacacccgcaatgcagatcccccggacaaaagaggaggccaatggggacgtcttcgagacgtttatgttcccttgtcagcactgcgaaaggaagtttacaaccaaacaggggttggagaggcacatgcacatacatatttcgactgtgaaccatgcctttaagtgtaagtactgcggcaaggcgttcgggactcaaatcaacaggcgcaggcacgagcggagacacgaagccggattgaagagaaagccatcccagactctgcagcccagtgaagatttggccgacgggaaagcttccggagagaacgtggcctccaaagacgactcctccccacccagcctcgggccggattgtctgatcatgaattccgagaaggccagccaggacactatcaatagtagtgtcgttgaggagaacggcgaagtcaaggagctgcatccttgtaagtactgcaagaaagtgtttggcacacataccaatatgaggaggcatcaaaggcgtgtgcacgagcgacaccttatacctaaaggagtgagacggaagggaggacttgaggagccacagccacctgctgagcaggcgcaagccacacagaatgtgtatgtcccgtctacagaaccagaagaggaaggggaagctgacgacgtatacatcatggatatttcctctaatatctcagaaaacctgaattactacatcgacgggaagatccagaccaataataatacttccaactgtgacgtcatagagatggagagcgcatctgccgacttgtatggcatcaactgtctgctgacaccagtgaccgtggaaatcacccagaatattaagaccacccaagtgcccgtgaccgaggatttgccaaaggagcctctgggctccacaaactcagaggcaaaaaaaagaaggactgctagccctccagcacttcctaaaattaaagcagaaaccgacagcgaccctatggttccgagttgtagtctttctttacccctcagcattagcaccacggaggccgtatcttttcataaggaaaagtcagtgtatctttcgtcaaagttaaaacagctcttacagactcaagataaattgacacccgccggcatttcagcgacagagattgccaaactggggccagtctgcgtgtcagcaccggcttcaatgctgccagtcacttcttcccggtttaaacgtagaacaagtagcccaccttctagccctcagcactcccccgcactgagagatttcggcaaacccagtgacggaaaagccgcctggaccgatgccggcctgacatccaaaaagagtaagttggaatctcactctgactcgcccgcttggagcctgagcggacgcgacgaacgggaaactgtgagtccaccttgtttcgacgagtataagatgtcaaaggagtggactgctagtagcgctttctcatctgtgtgcaatcagcaaccgctcgatctgtcaagcggagtgaagcagaaagcagaagggacgggcaagacgcctgtgcagtgggagagcgtcctcgatctatctgttcacaaaaagcattgctcagactctgaaggcaaagagttcaaggaatctcactctgtgcagcccacatgttctgcagtgaagaaaaggaagccaactacatgcatgcttcagaaggtgctgttgaatgagtataatggaatagacctgccagttgagaatcctgcggacggaacacgttcaccctctccgtgtaagagcctcgaggcccagcctgaccccgatctcggtccaggttcaggtttccctgctcccaccgtggagtccaccccggacgtgtgcccaagcagccctgccctgcaaacccccagtctgagctcaggtcagctgcctccattactgatccccacagacccatcatctccaccaccatgccccccagtacttacagtggcaacccccccacctccccttctacccacagtgccattgcccgccccatcctcatctgctagtccgcatccctgcccctccccactgagtaatgccaccgcccagagcccattacctattctatcacctacggtgagccctagcccaagccctataccacccgttgaaccgttaatgtccgcagcttcccctggccctcctacactgtcatcgagctcttccagctcaagttcctcttcctcttttagctcctcttcttcctcaagcagcccctccccaccgcccctcagcgctatctcatccgtggtttcttccggggataacctggaggcatcccttcccatgatcagtttcaaacaagaggagctggaaaatgaagggctcaagccaagggaagagccccagtctgcagccgaacaggacgttgtagttcaggagacctttaataagaacttcgtgtgcaatgtctgcgaaagcccttttctgtccattaaagatttgacaaaacatctttctatacacgcagaggagtggccatttaaatgcgaattttgcgttcaactttttaaagacaaaacagatctgagcgagcatcgctttctgctgcacggggtcggcaacatctttgtgtgcagtgtctgtaagaaggagttcgccttcctgtgtaatctacagcagcatcagcgcgatctccatcctgacaaggtttgtactcaccatgaattcgagagcgggacactcagacctcagaactttaccgacccctcaaaggcccacgtggaacacatgcagtcactgccagaagatcccctagagacctccaaggaggaggaagaattgaatgacagttccgaagaactttatacgacaattaaaattatggctagtggcattaagactaaagatcccgatgttaggctcggactgaatcagcactatcctagtttcaagcctccaccattccagtaccaccaccgaaatcctatgggaattggtgtaactgccaccaattttactacccataacataccacagaccttcactaccgccatccgttgcacaaaatgcggtaagggtgtggacaacatgcctgagctgcacaagcacatcttagcttgcgccagcgcgtcagacaagaagaggtacacacctaagaagaatccggtgccgttgaagcagacagtgcagccaaaaaatggagtggtcgttctggacaattccggcaagaacgctttcagacgcatgggacagccaaagcgacttaacttttccgtcgagctctccaagatgtcgtcaaataaattaaaactcaatgccttgaagaaaaagaaccaactggtacagaaagctatcctccaaaaaaacaagtctgccaagcaaaaggccgacttaaaaaatgcctgtgagagcagtagccatatctgtccgtactgcaatcgagagttcacctatataggcagcctcaataagcatgcggcgttctcatgcccaaagaagcccctcagcccccctaaaaagaaggtctcccacagctccaaaaagggaggtcatagctcgccggcgtcatccgacaagaacagcaacagcaaccataggcggcgaaccgcagatgctgagatcaaaatgcaaagcatgcagactccactggggaagacacgggctcgatcgagtgggcctactcaggtgccactgccctcctcgagtttcaggtccaaacagaacgtgaaatttgccgcctctgtaaaaagtaagaagccctcttcgagcagcctccgaaatagtagcccgatacgcatggcaaaaatcacacatgtggaaggaaagaagccaaaagccgtggcaaaaaaccattctgctcagttgtcgtctaaaacttcacgatccctacatgtacgagtgcagaaaagtaaggccgtgttgcagagcaaatcgactctcgccagcaagaagcggactgaccgatttaacataaaatcccgggaacgttccggcgggcctgttactcgcagtctgcaactcgcagcagctgccgatctctctgagaataagagggaagacgggtccgctaagcaagagctgaaagattttcgaaattttctttag

SEQ ID NO: 25758 - DNA, 4446 bp, synthetic construct
  misc_feature 1..4446: note = Description of Artificial Sequence: Synthetic coding sequence
  source 1..4446: mol_type = other DNA
atgcgggacagcgccgagggccccaaggaggacgaggagaagcccagtgcttcagcactcgaacagccggccaccttgcaagaagtcgcatctcaggaagtgccccccgagcttgcgacacctgcccccgcttgggagccgcagccagaaccggacgaacgccttgaggcggctgcttgcgaagtgaatgatctcggcgaagaggaagaggaagaagaggaagaggacgaggaagaggaggaggatgacgatgatgacgagctggaggacgagggcgaggaggaagcaagcatgccaaacgaaaatagcgtcaaggaaccagaaatccgatgtgacgaaaaacctgaggatttactggaagagcctaagactacgtcagaagagacactcgaggattgctccgaagtcacgcccgctatgcagattcctaggaccaaggaagaggctaatggcgacgtctttgagacatttatgttcccatgtcagcactgcgagcgcaagtttaccacgaagcagggcttagagcgccatatgcacattcacatcagcacagtcaaccatgcgtttaaatgcaagtactgcggcaaggccttcgggacccaaataaatagacggagacacgaaagacgccatgaagccggacttaagcgaaaaccttcacagaccctgcaacccagtgaagatcttgccgatgggaaggctagtggagaaaatgttgccagcaaagacgacagttcccctccaagcctcggccccgattgcctgattatgaactcagagaaagcctcccaagacacgatcaattcctctgtggttgaggagaacggtgaggtaaaggaactgcacccatgcaagtactgtaagaaagtcttcggaactcataccaacatgcgccgtcaccagcgccgggtgcacgagagacatttgatccctaagggagtacgccggaaaggcggactggaagaaccccaacccccagccgagcaggcacaagcgacacaaaacgtctacgtgcccagcacagagcccgaggaggagggagaagcagacgacgtttatatcatggacatctcctctaacatttctgagaacctgaattattacatcgatggaaagatccagacaaataataatacaagtaactgcgatgtgatcgagatggaaagcgcctccgctgatctctacgggatcaactgtttgctgactccagtgactgtcgagattactcagaatattaaaaccacacaggttccagtgacagaggacttaccaaaggagcccctgggatccactaatagcgaagccaaaaaaaggaggacagcgtcacccccagctctgcctaaaatcaaagcagaaaccgactctgatcctatggtgccgagctgctccttgagcttgcctctgagtatatctaccacagaggcagtttcgttccacaaagaaaagtcagtttaccttagttcaaagctgaagcagttgctccagacccaggataagctcacgcccgctggtatatccgccaccgagatagccaaactggggccagtgtgtgtaagcgcacccgccagcatgctcccggtgacctcgtctcgattcaagagacggaccagttcccctccatctagtccccagcatagtccagcgctgcgcgacttcggtaaaccgtctgatgggaaggcagcctggacagatgcagggttaacctcgaaaaagtccaagctcgagtctcactcagactcacctgcctggtcattgtctggacgcgacgaacgggagactgtgtctccaccgtgttttgacgaatacaagatgtccaaggagtggactgcctcctccgcattctcctctgtttgcaatcagcagccactggacttatcatcaggtgtcaaacagaaagctgagggaactggcaaaacacctgtgcagtgggaatctgtactggacctcagtgtgcacaaaaagcattgctcagattctgaaggaaaagagttcaaggagtcccattctgtgcagcctacctgcagcgctgtcaagaagagaaaacctactacgtgcatgctgcagaaggtgctgcttaacgagtacaatggaatcgatctgcccgtcgagaaccccgctgacggaacaaggtcccctagcccctgcaagagcttggaggcccagcctgatccagacttaggaccaggtagtggcttcccggctccaacagtcgagagcaccccagatgtttgtccctcaagccccgccctgcaaactccgtctctgtcaagtggtcaactcccccctctcctgattcccactgatccgtcgagcccccccccctgtccccctgtgctaacagttgctacaccacccccgcctctgctgcctacagttcctctgccagcccccagctcaagtgcaagtccccacccctgccctagcccgctgtccaacgccactgcccaatcacccctgcccattctgtctccgaccgtttccccatcaccctcaccaatcccgcccgttgagccactcatgtcagccgcatctcccggccctcccaccctgtcttccagttcatcctcatctagctcgagcagtagtttctccagcagctcttccagctcttctccctcacctccgccactgagtgcaatttcctccgtcgtgtcaagcggagacaacctggaggcctccctgcctatgatatcctttaagcaggaggaactcgagaacgagggcctcaagcccagggaagagccacaatccgccgctgaacaggatgtagttgtccaggagacatttaataagaactttgtgtgcaatgtgtgcgaatccccgtttctgtcgataaaagatctcacaaagcatctgagcattcatgccgaggagtggccttttaaatgtgagttctgtgtgcaactgttcaaggataagactgatctctccgaacaccgattcctgcttcacggtgtaggaaacatttttgtctgcagcgtttgtaaaaaagagttcgccttcttatgcaatctccaacaacaccagcgggacctccaccccgataaagtgtgtacccatcacgaattcgagagcgggaccttgcgacctcaaaacttcaccgacccatccaaggctcacgtcgaacatatgcaatccctgccagaagatcctcttgaaacgtcgaaggaagaggaagaattaaacgattcaagcgaggagctgtataccaccattaagattatggcatcaggtatcaaaacaaaggatcctgacgtgcgcctcggtctcaatcagcactaccccagctttaagccaccacccttccaataccaccataggaatcctatggggatcggtgtgaccgcgactaacttcacaactcacaacatcccccaaaccttcactacagccattcgctgcactaaatgtgggaaaggggtcgataacatgcctgagctacacaaacacattttggcctgtgcttccgcttccgacaaaaagcggtacactcccaaaaaaaatcctgtgcctcttaaacagaccgtccagccgaaaaacggcgttgtggtactcgataacagcggcaaaaatgccttccggagaatgggtcagcctaaacgtcttaacttcagcgtcgaacttagtaaaatgagctcaaacaagctgaagctgaatgccctgaaaaagaaaaaccagctggtgcaaaaggccattttacaaaaaaataagtcagccaaacagaaggctgatctgaaaaatgcttgcgaatcctcttcacacatatgcccttattgtaatagggagttcacatatatcggaagtctgaataagcacgcagcctttagctgccccaagaagccattgagtccacccaagaaaaaagtctcccactcttcaaagaagggcggccatagctctccggcctcatccgacaagaacagcaattccaatcaccgccgtcggacggcagacgctgaaataaaaatgcaaagcatgcaaacaccgctcgggaaaacacgtgcccgctctagtgggcccacgcaggttcccctgccctcttcgtcattccgttccaaacaaaacgtgaagttcgcagcgtcagttaagtcaaaaaagccatcatcaagttcactgcggaactcttcccccatcagaatggcgaaaattactcatgttgaagggaagaagccaaaagcagtggctaaaaaccattctgcccagttgtccagcaagaccagtagatccctccacgtgcgggtccagaagagtaaggccgtgctgcagagtaaatccacactcgcctcgaaaaaaagaacggacagattcaacattaagtcgcgtgagaggtccggaggaccagtcacgaggtctttgcagcttgccgccgccgcggatctgagcgagaacaaaagagaagacggaagcgctaagcaggaattgaaagacttcaggaatttcttgtag

SEQ ID NO: 25759 - DNA, 681 bp, synthetic construct
  misc_feature 1..681: note = Description of Artificial Sequence: Synthetic coding sequence
  source 1..681: mol_type = other DNA
atgaaccagaacaccaccgagcccgtggccgccaccgagaccctggccgaagtgcccgaacatgtccttcgcgggttaccagaagaagttcgcctcttccccagcgccgtcgacaagaccagaattggggtgtgggccacgaagcctatactgaagggcaagaagttcggcccattcgtgggagacaagaagaagaggtcccaggtgaagaataacgtgtacatgtgggaggtgtattatcccaacctgggctggatgtgcattgacgcaacggatcctgagaagggaaattggctccgttacgtcaactgggcttgttccggggaagagcaaaatctcttccctctcgaaatcaaccgggccatatactacaagactctgaaaccgatcgcacccggggaggagctgttagtttggtataatggcgaggacaaccctgaaatcgctgccgcgatcgaagaggagagagcctccgctcggagcaagcgaagttcccctaagtcacgtaaggccaccgcatccgcatggaggcccgatgcattgcaccagcggccgcgaaccagccctggttccatcggaagatcgaaattgcagcttcaaccgagctcacgcgaccattctagtaagtcccgccactctggctgctcgcttacagcccccgaggtgacttggaaccagtag

SEQ ID NO: 25760 - DNA, 5049 bp, synthetic construct
  misc_feature 1..5049: note = Description of Artificial Sequence: Synthetic coding sequence
  source 1..5049: mol_type = other DNA
atgaaccagaacaccaccgagcccgtggccgccaccgagaccctggctgaggtgccagagcacgttcttagagggctcccagaggaggtcaggttatttccgtccgccgtagacaaaaccagaattggggtttgggctacgaagcccatcctgaaaggtaaaaagttcggtcctttcgtgggcgataaaaagaagaggagccaagtcaaaaataatgtttacatgtgggaagtgtactatccgaacttgggctggatgtgcatcgacgccaccgatccagaaaaaggcaattggcttagatacgtgaattgggcgtgttctggggaagagcagaacctgttcccactagagatcaacagggcaatctactataaaacacttaagcctattgctcccggagaagaactgctggtatggtataacggcgaggacaatcccgagattgcagccgccatcgaggaggagcgggcctccgccaggtccaagcggtcttctcccaaaagcaggaaaggaaagaaaaaaagccaggaaaataagaataagggtaataagatccaagacatccagctgaaaactagcgagcccgattttacctctgcaaacatgagagacagtgcagaggggcccaaggaagacgaggaaaaaccgagcgcatcagcactggagcagcccgctaccctccaggaggtggcctcacaggaggtccccccagaacttgcgaccccagcccccgcctgggagcctcagcccgagccagacgagcggctcgaggctgctgcttgcgaggtaaacgatctgggagaggaggaggaagaagaagaagaggaggacgaagaagaggaggaggacgacgacgatgatgaactggaagacgaaggcgaagaggaggcgagtatgccgaacgaaaactccgtgaaagaacctgaaatccgatgcgatgagaagccagaggacctccttgaggaaccgaagaccacctccgaggaaaccttggaagattgctccgaggtgaccccagcaatgcagattccacggaccaaagaggaggcaaacggcgatgtttttgaaacgttcatgttcccctgtcagcattgtgagcgcaagttcaccaccaaacagggactggagaggcatatgcacattcacatcagtacagtgaatcacgcgtttaaatgtaagtattgcggcaaggcattcgggacgcagataaatcggaggagacacgagcggcgacacgaagctggcttgaagcgaaagccctctcagacactgcaaccctctgaagaccttgccgatgggaaggccagtggggaaaacgtcgcgtccaaagacgactcaagtcccccatcccttggacctgactgccttattatgaatagcgaaaaagcctcccaggacaccattaacagcagcgtcgttgaagaaaatggagaagttaaggagctgcacccctgcaagtactgtaaaaaggtcttcggaacccacaccaatatgagaagacaccaaaggcgagtccatgaacgccacttgattccgaagggggtgcggcggaaaggcggtcttgaggaaccccagccaccagcggaacaggcacaggccacacagaatgtctacgtgccttccactgaacctgaagaagaaggggaggctgacgatgtgtacattatggacatttctagcaatattagcgagaacctcaattactatatcgatgggaagattcagactaataataacacgtcaaattgcgacgtgatagagatggaatcagcatccgctgatctttacggtattaattgtttgctgacccctgtaacagtggaaattactcagaacatcaaaacaacacaggtgcctgtgacagaggatctgcctaaagaacctcttggctctaccaactcagaagctaaaaaacgtcgtactgccagcccgccggccctgccgaagattaaagctgagactgattccgaccccatggtgcccagctgtagcttgtctctgcctctgagcattagtacaactgaggctgtcagcttccataaagagaagtccgtctatctgtcctcaaagctgaagcagctgctacagacacaggataagctgacacccgctgggattagcgcaacggagatagccaagctgggcccagtctgcgtgagcgccccggcaagcatgctccccgtgactagctccagatttaagcgccggaccagcagccccccaagcagccctcaacacagccccgctctacgggattttggaaagccttcagacggcaaggccgcttggaccgacgcgggattaactagcaagaagtccaagttggagagccatagcgattcccctgcctggtcgctttccggtcgcgatgaacgagagacggtctcccccccctgtttcgacgaatataagatgagtaaggaatggaccgccagcagcgcattctccagtgtctgtaaccaacaacccctagatctgtcgagcggggttaagcagaaggcggagggcacggggaagacgcccgtgcaatgggagagcgtactcgacttgtctgtgcataagaaacactgttctgactctgagggcaaagagttcaaggagagtcattctgtgcaacccacgtgctccgccgtcaagaaaaggaaacccacaacatgcatgcttcaaaaggtcctgctgaacgaatataatggaatcgacttacccgtggaaaacccggctgacggcaccagaagcccgtccccctgtaagagtctcgaggcgcaaccagaccctgatttagggcccggttccgggttccctgcccctactgtggaaagcacaccagatgtctgtccatccagcccagccctgcagaccccttcactgtctagtgggcaactgccaccacttctcataccaacggatccaagttctccccctccatgtcctcctgtgttgaccgtcgccactcctcccccccctcttctgcctactgtccccctgccagccccatcctcttcggccagcccacacccgtgccctagccccctctcaaatgcaaccgcacagagtcctctgccgatactgtccccaaccgtgtctccaagcccatcccccatccctccagtggagccacttatgtctgccgccagcccaggccccccaaccttatctagctctagctcttcaagctcatcgagctcgtcattctcctcttccagttcttcctccagcccatcacccccaccgctgagcgccataagctcagtagtgagcagtggtgataatctcgaggcctcgctgcctatgatttcatttaagcaagaggagctggaaaacgaagggttgaagccacgcgaagagccccagagtgcagcagagcaggacgtagttgtgcaagagacatttaacaaaaacttcgtgtgtaatgtgtgcgagtccccattcctgagtataaaagatctgacaaagcacctgtcaatccacgcagaagaatggccgtttaagtgcgaattttgcgtccagctgttcaaggacaaaactgacctctccgagcataggttcctcctgcatggtgtcggcaatatcttcgtctgctccgtatgcaagaaagagtttgcttttctgtgcaacttgcagcagcatcaaagagaccttcatcccgataaagtctgtacacatcatgaatttgaatctggaactctgaggccccagaactttactgacccgtccaaggctcatgtggagcacatgcagtcactgccggaggaccccctcgaaacttccaaggaggaagaagagctcaacgattctagtgaggaactgtataccactattaaaattatggctagcggcataaagacgaaagatccagacgtgcggctggggctcaatcagcactacccctccttcaaacctccccccttccagtaccaccaccggaatcctatgggaattggagtgacagccactaacttcaccactcataacatcccgcaaacattcaccactgcgatccgctgtaccaaatgcggcaagggggtggacaacatgccagagctgcataagcacatcctggcctgtgccagcgcaagtgataagaagagatatacacctaagaaaaaccctgtccctttgaaacagaccgtgcagcccaagaatggcgttgttgttttagacaactctgggaagaacgccttcaggaggatgggccagccaaagcggctcaacttttcagtagagctgagtaagatgtcctccaacaagctcaagttgaatgctttgaagaaaaaaaatcagctggtgcagaaggcaattttgcaaaagaataagagcgccaagcagaaggcggatctgaaaaatgcttgtgagtcgtcctctcatatttgcccctattgcaaccgcgagttcacctacataggaagcctcaataagcatgcagcgttttcttgtcctaaaaaacccctcagcccacctaagaagaaagtatctcacagcagcaagaagggcgggcactcatcccccgcatctagtgataaaaacagcaattcgaatcatagacgcaggacggccgatgctgagattaagatgcagagcatgcagacacccctgggtaaaactcgagcccgatctagcggcccgacacaggtaccactgccaagctcttccttcaggtctaagcagaatgtcaagtttgccgcctccgtcaagtctaaaaagccgagcagcagctcccttaggaatagctctccaattagaatggctaagattactcatgtcgagggtaagaaacctaaagcggtggccaaaaatcattctgcacagctgtctagcaaaacgagcagaagcctccacgtgagggtacagaagtccaaggccgtgttgcagagcaagtcaaccctggctagcaaaaagagaactgaccggtttaacattaagtctagagaaaggtcaggaggcccagtgacacgatccctgcagttggcagcagctgccgacctgtccgagaacaaacgcgaggatggctctgccaagcaagagctgaaggatttcagatgcttcctatag

SEQ ID NO: 25761 - DNA, 237 bp, synthetic construct
  misc_feature 1..237: note = Description of Artificial Sequence: Synthetic coding sequence
  source 1..237: mol_type = other DNA
atgcgggacagcgccgagggccccaaggaggacgaggagaagccctccgcatcggcattagaacagccagctaccctacaggaggttgctagtcaggaggtccctcccgagctggccacccccgccccagcttgggaaccccaaccagagccagacgaacgattagaagcggcggcatgcgaagtgaacgatcttggcgaagaagaagaggaggaagaagaagaagatgaggagtag

SEQ ID NO: 25762 - DNA, 4446 bp, synthetic construct
  misc_feature 1..4446: note = Description of Artificial Sequence: Synthetic coding sequence
  source 1..4446: mol_type = other DNA
atgcgggacagcgccgagggccccaaggaggacgaggagaagcccagcgccagcgccctggaacaaccagccacgctgcaggaggtggcctctcaggaggtcccaccagagctcgcaacaccagcacctgcatgggagccacagccagagcctgacgagagattagaagccgccgcctgcgaagtgaatgatctgggggaagaagaagaggaggaggaggaagaagatgaagaggaagaggaggacgatgacgatgatgagttagaggatgagggcgaggaagaagccagtatgcctaatgagaactccgtgaaagagcccgaaattcggtgcgacgagaagccggaggatctacttgaggagccaaagacaaccagcgaggaaaccctggaagactgctctgaagtaactcccgctatgcagattccgcgcacaaaggaagaagcaaatggggatgtattcgaaactttcatgttcccgtgtcagcattgtgaacgtaagttcactacaaaacaaggcttggagaggcacatgcacatacacatttccactgtgaaccacgcgtttaaatgcaagtactgtggtaaggcattcggtacgcagatcaatcgccgacggcacgagcggaggcacgaagccggcctgaagcggaagcccagtcagacattacagccatccgaagacttggccgatggtaaggcctctggcgaaaatgtcgcaagcaaggatgacagcagccccccatccctaggaccagactgtctcatcatgaactccgagaaagcttcccaagatacaataaatagctccgtcgtcgaagagaatggtgaagttaaagagttacatccctgtaagtactgcaagaaagtgttcgggacacatactaatatgagaagacaccagcggcgcgtgcacgagaggcatctgatcccaaaaggcgttcggaggaaaggcggactcgaggagcctcagcccccagccgagcaggctcaagctacccagaacgtgtacgttccctctaccgaacccgaagaagagggggaggccgatgatgtgtatatcatggatatatcgtccaatatctccgaaaatttgaactattacattgacggtaagatccagacaaacaacaacaccagcaattgcgatgttattgagatggaatcggccagcgcggatctttacggcattaactgtttgctgactcccgtgaccgtcgaaattactcaaaatatcaaaaccactcaggtgcccgttaccgaggatctgccaaaagaacccctagggagcacgaattccgaggcaaagaagaggcgcaccgcatcaccaccagcacttcccaaaatcaaagccgaaacagattccgatccaatggtccctagttgctctctcagtttgccgctgtccatctcgaccaccgaagctgtctcattccacaaggagaaaagtgtgtatctatcctccaagctgaagcagcttctgcagacgcaggataagctcacccccgctggtatctctgccaccgaaatcgccaaactgggacccgtgtgtgtgtccgcgccagcaagtatgctgcctgtgacctcttctcggtttaaaaggaggacctctagtcccccctcttcgccccaacattcacccgccctccgggactttggcaagccttccgatggcaaggcagcgtggactgatgccggtctcacttccaaaaaaagtaagctggaatctcactccgacagccctgcatggagcctcagtggccgtgatgagcgggaaactgtttcccctccgtgctttgatgaatacaaaatgtccaaggaatggactgccagctctgccttcagttccgtatgtaatcagcagcccctggatctaagttccggagtaaagcagaaagcagagggaactggaaaaacgcccgtccagtgggaatccgtattagacctgtccgtgcataagaaacactgtagtgatagcgagggtaaggaattcaaggagagccatagcgtccaacctacctgcagtgctgttaagaagcggaagccaactacctgcatgctgcagaaagtacttctgaacgagtataacgggatcgatctccccgtagagaacccagccgacggtacacgcagtcctagcccttgcaagtccctggaggctcagcccgaccccgacttaggccccgggagtggctttcctgccccaacagttgagagtacccccgatgtttgtccgtcttctccagctctgcagaccccctcactcagcagtgggcagctgcctcctctgttaatccccacagacccctcaagcccacctccatgtcctcctgtgctcacggtcgcgacgcctcctccccctctgcttccaacagttccattgcccgctccctcctcgtctgcctctccccatccctgtccttctcccttgtctaatgctaccgcccaaagcccattgcctatcctcagtcccaccgtgtccccgtcgccctcacccattcctcctgtggaacctttgatgagtgctgcttctccaggaccccccaccctctcctcatctagcagcagttcctcctcttcaagtagtttttcaagcagctcaagctccagctcgccaagtccaccacctctttctgctatcagtagcgtcgtgagcagtggcgataacctcgaggcgtctctcccaatgattagtttcaagcaggaggaattggaaaacgagggcctgaaaccacgggaagagcctcagtccgccgccgaacaggacgtggtcgtgcaggagaccttcaacaagaacttcgtttgtaatgtatgtgaatctccgtttttgagtatcaaagatttgactaaacatctgtcgattcatgccgaggaatggccgtttaaatgtgagttttgcgtccagctattcaaagacaaaaccgacctgtccgagcaccggtttttgctgcatggcgtcggtaacatcttcgtctgcagcgtgtgcaaaaaagaatttgcatttctgtgcaatctgcagcagcatcagcgcgatctgcaccccgataaagtctgcacacatcatgagtttgagtctgggacactgagaccccagaacttcacagacccctccaaggcccacgtcgaacacatgcagagcctcccagaggatcccttggagacctccaaagaagaggaggagttaaatgatagctccgaagaactgtacacgacaattaaaatcatggccagcgggataaagacaaaggaccccgatgtgaggctgggactgaatcagcactatccttccttcaagccccctcccttccaatatcatcacagaaaccccatgggcattggggtgacagcaacaaacttcactactcacaacattcctcaaacttttaccaccgctattcgctgcacaaaatgcggtaagggcgtggacaatatgcctgagctgcataaacatatccttgcgtgtgcatctgcctcggataaaaaaagatacactcccaaaaaaaacccagtgccactgaaacagaccgtgcaaccaaaaaacggcgtcgtcgtactggacaacagtgggaagaacgcttttaggagaatggggcaaccaaaacggctgaacttcagtgttgagttgagtaagatgagctctaacaaattaaagctgaatgccctcaaaaagaaaaatcagctggtacagaaggctatcctgcagaaaaacaagagcgctaagcagaaagcagatttgaaaaatgcgtgtgagtcatcttcacatatatgtccctactgcaatcgagagttcacatatattgggtcactcaacaagcacgccgccttttcctgtcccaagaaacctctgagcccgccaaagaaaaaggtgtcccactctagcaagaaaggcggccatagttcccctgcgtcctccgacaaaaattctaactctaatcatcgacgtcgcaccgctgacgcagagataaagatgcagtccatgcaaacacctctgggcaagacgcgcgcacgctcatccggaccgacccaggtgcctctgccaagttcaagttttaggtcaaagcagaacgtgaagttcgccgcttcagttaaaagcaagaaaccctcatcctcatctctgagaaactcatcccccatacgcatggccaaaataacacacgttgaggggaagaagcccaaagctgtcgctaaaaatcactcagcccaactgtcatctaaaacctctaggagtctgcacgtgcgagttcagaagtccaaggccgtcctgcagtccaaatcaaccttagcttccaagaagcggaccgatcgctttaatatcaagtctcgggagaggagcggcggtcctgtgaccaggagtctgcagctggctgcagccgctgatctgtctgagaacaagagagaggacggctctgcaaagcaggagctgaaggacttcagaaactttctgtag

SEQ ID NO: 25763 - DNA, 675 bp, synthetic construct
  misc_feature 1..675: note = Description of Artificial Sequence: Synthetic coding sequence
  source 1..675: mol_type = other DNA
atgagcagctacttcgtgaacagcaccttccccgtgaccctggcctcaggccaagagtctttcctgggccagctcccactttatagctccggctacgccgatccactaaggcattaccccgctccttatggacccggccccggacaagataaaggctttgccaccagctcatactatcccccggcgggtggcggatacgggagggccgctccctgcgattatggacccgctcctgcgttctacagagaaaaggaaagtgcctgcgctctctctggggccgacgaacagccccctttccacccagaacctcgaaaatccgattgtgctcaggataagtccgttttcggtgaaacagaggagcaaaagtgctccactcctgtctatccatggatgcagcgtatgaattcctgcaacagctcctcttttgggcccagcggccgaagaggccggcaaacatacacaagatatcaaaccttggagctcgagaaggagttccactataaccgttacctgactaggaggcgtcggatcgagatagctcatgccctctgtttgacagagaggcagattaagatctggttccaaaatagacgtatgaagtggaaaaaagagagtaaattactcagtgcatcgcagctctcagcggaagaagaggaagagaagcaagctgagtag

SEQ ID NO: 25764 - DNA, 2496 bp, synthetic construct
  misc_feature 1..2496: note = Description of Artificial Sequence: Synthetic coding sequence
  source 1..2496: mol_type = other DNA
atgaccgagctgaaggccaagggcccccgggccccccacgtggccggcggacctccttcacccgaagtcggaagccctctcctctgtagaccagccgctggtcctttccccggctcccagacgagcgacacactaccagaggtctccgctatacccatctccctggatggactgctcttccctcggccttgccagggtcaggacccaagcgatgagaaaactcaggaccaacaaagtttgagcgacgtcgagggagcttattccagggctgaggctacccgaggtgccggcggctcttcgagctcacctcccgaaaaggattctggccttctggacagcgtgctggacacgctcctggcaccctctggacctggacaatcgcaaccctccccccccgcgtgtgaagtaacatcaagctggtgcctgttcggacccgaattgccagaggatccaccagccgcacctgctacccaaagagtgctttctccgctgatgtctagatctggatgcaaggtgggtgattcttcgggaacagctgcagctcacaaggttctacccagggggctgtctcccgcacgccagctgctcctacctgctagtgagtcaccacactggtcgggcgcacccgtcaagccttcccctcaagccgccgctgtggaggtggaggaagaggatggatccgaatctgaggagtccgccggacccctactgaaaggaaagccacgggccctggggggggccgccgctggagggggggccgcagcagtgccccctggtgcagcggctggaggggtggccctggtgcccaaggaagacagcagattcagtgccccaagagtcgcactcgtagaacaggacgccccgatggctccgggtcggtcaccattggccacaacggtgatggactttatccacgtgcccatattacctctgaaccatgccctgcttgccgcacgtacccgccagctcctcgaagacgagagttacgatgggggggcgggagcagctagcgcttttgcgccaccccgctcgagcccttgcgcgagttccacacccgtggcggtgggagactttcctgactgcgcctacccccctgatgccgaacctaaagacgacgcctatccgctctattccgattttcagccccccgccctgaaaatcaaggaggaagaggagggggctgaagcaagcgcgagatctccaagatcatacctcgttgccggggcaaacccagccgcatttcctgactttccactgggacctcccccaccactgccgcctcgggcaactccgtcccgcccgggggaggctgcagttactgctgcccctgcatccgcgtctgtatcgtctgcttcatcttctggatctactttggagtgtattctgtataaagctgagggtgcccctccccagcagggaccttttgctcctccgccatgcaaagcacccggggcttctgggtgcctactcccaagggatggacttcctagcacctctgcctcggccgccgcggctggcgctgctcctgccttgtatccggctctcggactgaacgggctccctcaacttggataccaggcggccgtgcttaaagaaggactgcctcaggtataccccccttacctcaactatttgagacctgactcagaggcttcacaatcgccacagtatagctttgagagcttgccccagaagatttgtttgatctgtggcgatgaagcatcaggatgccactacggtgtccttacatgcggtagttgtaaagtcttctttaagcgggccatggaaggccagcacaactacttatgtgctggtcgcaacgactgtattgtggataagatccgcaggaagaattgtcccgcatgtagacttcgcaagtgttgtcaggcaggaatggttctgggaggctttagaaacctccatattgacgaccagatcacgttaattcaatatagctggatgagtctcatggtctttgggctggggtggcgttcctacaaacatgtttctggacaaatgctgtactttgctcctgacctgatcctgaatgagcaaaggatgaaagagtcgagtttctattcgctgtgtctgactatgtggcagattccacaagagttcgtaaaactccaggtaagccaggaagaatttctttgtatgaaagtgctcctgctgttgaatactattcccttggagggcttaagatcacagacccagtttgaggaaatgagaagctcttacatacgcgaattaatcaaagctataggtttgcgtcagaagggggtggtgagttcttcccaaaggttctatcaactcactaagctgttagacaatcttcatgacctggttaaacagctgcacctctattgcctgaatacattcatccagtccagagctctgagtgtggagttcccagagatgatgagcgaagtcattgctgcccagctcccgaagatcctcgccggcatggtgaagccccttttgttccacaagaaatag

SEQ ID NO: 25765 - DNA, 2802 bp, synthetic construct
  misc_feature 1..2802: note = Description of Artificial Sequence: Synthetic coding sequence
  source 1..2802: mol_type = other DNA
atgaccgagctgaaggccaagggcccccgggccccccacgtggccgggggccctcccagtccagaagttgggagccctctgttgtgccgtccagcagccggcccctttcccggttctcagacttcagacactctcccagaagtaagcgcaattccaatctccttggacggactgctatttccgcggccttgccagggccaggatccaagtgatgagaagacccaagaccagcagtcattgagcgacgttgaaggcgcttacagcagggccgaggccacccggggagccggtgggtcctctagctccccgcctgaaaaagattcagggctgctcgactctgtgcttgatacgctcctggccccttcgggtcccggacaatcccagccctcacctccggcctgtgaagtcactagcagttggtgcctttttggcccagaattgcctgaggatccaccagcagctcctgccacacagagggttctgtcaccattgatgagcagatccggatgcaaagtaggcgactcctctgggactgccgctgcccacaaagttttgcctcgtgggttatctccagcacgacaactcctcctccccgcctccgagtcaccccactggtccggcgctcccgttaagcccagtccacaggctgcagctgtggaagttgaagaggaggatgggagcgagtccgaggagtctgctgggccgcttctgaaaggtaagcctagggctttaggcggtgccgcagccgggggcggagccgcggcagttccccctggcgctgctgctgggggtgtagccttggtgcctaaagaggacagccgatttagtgcaccccgagtggccctggtcgaacaggacgctccgatggctcccggccggagcccacttgccactaccgtgatggatttcattcacgtgccaatactcccacttaatcacgccctgctggccgcacgcacgaggcagttgctggaggacgagtcttatgatgggggagcaggtgccgccagtgccttcgcaccaccaagatctagcccttgtgcttccagtactccagtggccgtcggggatttcccagattgcgcgtatccgcccgatgcggagcccaaagacgacgcttatcccctgtattctgattttcaacctcctgcattaaaaattaaggaggaagaggaaggggctgaagccagcgccaggtcccccaggtcgtatttagtggccggcgcaaatcccgcagccttcccggacttccctctcggaccaccgccacctctacctcctagagctaccccttctcgtcccggcgaggcagccgtaacagccgctcccgctagcgcttcagttagctcagcatcctctagcggtagtacattagagtgcatattgtataaagcagaaggagccccaccccagcagggcccatttgcacctccaccttgcaaggcccctggagctagcggctgcctgctgcccagagacggtcttccaagtacctctgctagtgcagccgccgctggggcagctcctgcactctatccagcactcggattgaacggtctaccccagctggggtatcaggctgctgtgctcaaagagggtctgccacaagtgtacccgccatatctgaactacctccgccccgattcagaagcctctcagagcccacaatatagctttgagtccctgcctcagaaaatctgcctaatctgtggcgatgaggcttcaggatgtcattacggagtgttaacctgtggaagctgcaaggtgtttttcaaacgcgcaatggagggccagcacaattacctttgtgcgggtaggaacgattgcatagtggacaagattcgtagaaagaattgccctgcttgcagactgaggaaatgttgtcaggcaggtatggtgctgggaggccgaaagtttaaaaagttcaataaggtcagagtagtccgcgctctggacgctgtggccctcccgcagccagtaggggtgcccaatgagtctcaggcactatctcaacggttcaccttttcccccggtcaggatatccagctgattccaccactaattaacctactcatgagtatcgaaccagatgtgatttacgctggccatgacaacaccaaacccgataccagcagctctcttctgacatccctcaaccagctgggggaaaggcagctgctgagtgtggtaaaatggtccaaatctctgcctggcttccgcaacctccacattgacgaccagattactctgatacagtacagttggatgagtttgatggtgttcggccttggatggagaagttataaacacgttagcggccagatgttatactttgcacctgacttaatattgaacgagcagcggatgaaagagtcatccttctacagcctctgcctgacgatgtggcagataccccaggagttcgtcaaacttcaggtctcccaagaggagttcctgtgcatgaaagttttactacttctgaatacaattccattggaaggactaaggtcacagacacagttcgaggagatgagaagctcctatatcagggagctaatcaaggccataggcttacgtcagaaaggagtcgtgtcttcgagtcaaaggttctaccagttaactaagttgcttgacaacctgcacgacctggtgaagcagcttcacctgtactgcctcaatacttttattcaaagccgcgctctgagcgttgagttccctgaaatgatgtcagaggtgatcgccgcacagcttcctaaaatcctggctgggatggtgaagcccctcttgttccacaaaaagtag

SEQ ID NO: 25766 - DNA, 2088 bp, synthetic construct
  misc_feature 1..2088: note = Description of Artificial Sequence: Synthetic coding sequence
  source 1..2088: mol_type = other DNA
atgaccgagctgaaggccaagggcccccgggccccccacgtggccggcggcccccctagcccggaggtgggtagcccactgctttgtcgaccagctgctggaccatttccagggtcgcagacaagcgatacgttacccgaggtcagcgcaattcccattagcttagacggcctgctgtttcccagaccctgtcagggacaggacccctctgacgagaagacccaggaccagcagtccctcagtgacgtcgaaggcgcttattcgagagccgaggcaacccgaggagcaggaggatcctcgtcgagtccgcctgagaaggatagtggactgctcgatagcgttctggatacactgctcgcccctagcgggccaggacagagccagccatctcccccagcctgcgaagtgacatcaagctggtgcctgttcggcccagaattgccggaggatccaccagccgcgccagcgacccagcgcgtactgtcacctctgatgagccgttccggttgcaaggtgggggactcaagcgggactgccgccgcccacaaagtgctgcccagaggactgtccccagcacgccagcttcttctgccagcgagcgaatctccccattggagtggcgcccccgtaaaaccatccccacaggccgcagcagtggaggtggaggaggaagacgggtcagaaagcgaagaatccgcggggccgttgctgaagggaaaacctagggccctcggtggagccgctgccggcgggggcgctgctgctgttcctcctggcgccgcagctggtggagtcgctctcgtgcccaaagaggattctcggttctcagcgccccgggtcgcgctggttgagcaggacgccccaatggcccctggcagaagtcctttggccacaaccgtaatggatttcatccacgtgcccattctaccccttaaccacgcattacttgccgcccggactcgccaacttctagaggacgaaagctacgacggtggggctggggctgcttcggctttcgctccccccagatcaagcccctgcgcgtcatctactccagtggccgtgggcgacttccctgattgcgcctacccgccggatgcggagcctaaagacgacgcctatccactgtacagtgattttcagccgcctgcactgaagatcaaggaagaagaggaaggagctgaggcatcggcgcgcagtccccggtcctacttagtggccggcgcaaatcctgcggccttcccggactttccacttggaccacccccccccttgcccccacgagcaacaccaagtcggccgggggaagcagccgtcacggccgctcccgcctctgcctccgtgtctagtgcttcctctagcggatccacactggaatgtatcctgtataaggccgaaggcgctccacctcagcaggggccttttgctccacccccctgtaaagctcccggggcgtcaggctgcctcctccccagggatggtctgccctctactagtgcttccgctgcggcggcgggggccgcgcctgctctctatccagcgctcggcctgaacgggcttccccagctgggctaccaggcagcggtccttaaggagggactgccacaggtctacccaccttatcttaattatctgagacctgattctgaagctagtcaatctccgcagtattcatttgagtcattgccgcagaaaatctgtctcatctgcggcgatgaagcatcaggctgccactacggggtcctcacatgcggttcctgcaaggtcttctttaagcgggccatggaggggcaacataactatctgtgtgccggaaggaacgactgcatagttgacaaaatcagacgcaaaaattgtcccgcttgccgattaaggaagtgttgccaggccggcatggttctcggtggcttcaggaacctgcacatcgacgaccaaattacgctgattcagtacagctggatgagccttatggtgtttgggctcggctggagatcctacaagcatgtctcggggcagatgctctacttcgccccagatctgatccttaacgattcctttggtcgggctacgaagtcaaatccggtgtag

SEQ ID NO: 25767 - DNA, 2295 bp, synthetic construct
  misc_feature 1..2295: note = Description of Artificial Sequence: Synthetic coding sequence
  source 1..2295: mol_type = other DNA
atgaccgagctgaaggccaagggcccccgggccccccacgtggccggcggccctccttcacccgaggtgggaagccctctgctatgccggcccgctgctggcccgttccctggctcccagacctcagatacacttcccgaggtctctgctattcccatctccctagacggactgctgtttccacgaccctgtcagggccaagatcccagcgacgagaagacccaggaccagcaatctctcagcgacgtggagggagcctatagccgagccgaagctaccaggggcgccggaggatcttcaagcagccctcctgaaaaagactcgggcttattggattcagtcctcgacacgctgctcgctccctcggggccgggacagtcacaaccttcacccccggcatgcgaggttacttcaagctggtgtctgtttgggccagagttgcctgaggacccaccggcggctccggcgactcaacgagtgctaagtccactgatgtcgcgaagcggctgcaaagtgggggattcttcaggtactgctgccgcccacaaggtcctcccaaggggactgtccccagcccgacaattactgctgccagcctctgagtcccctcattggtcaggcgccccagtgaagcccagcccacaagctgcagcggtggaggtagaagaggaggacggctcagagtccgaggagagcgccggcccgctcctgaaaggaaaacctagagccctgggcggagcagccgcggggggaggcgccgctgccgtgccaccaggagcagctgctggcggggtggcactggtgccaaaggaggatagccggttttcagcacctagggtggcgctcgtggaacaggacgcccccatggctccgggtagatctccgctcgccactactgtgatggacttcatacacgtacccatcctgcctctgaatcatgcactgctggcagccaggacacgtcagctcctggaagatgagtcatacgatggaggggccggcgctgcaagcgccttcgctccgccaaggagcagcccatgtgcatcctcgaccccagtggctgtcggtgatttccctgactgcgcgtaccccccagatgcggagccaaaagatgatgcatatcctctatattctgattttcagccccccgctttaaaaattaaagaggaggaggagggcgctgaagcctccgcacgtagcccccgaagctatttagtggctggtgctaatcctgcagccttcccagactttcctttggggcccccgccacctctgccacctagagccacaccctcaagacccggcgaggccgccgtaactgcagcccccgcaagtgcctctgttagttctgccagtagctcaggctcaactcttgagtgtattctttataaggctgaaggggcccccccacaacaaggcccattcgcccccccaccctgtaaggctcccggcgccagcggctgcctgctccctagagacggattgccatccacctcagcctctgcagctgccgctggtgccgccccagccctatacccggcactcgggctaaacggtctgccacaactcggctaccaggcagctgtgctgaaagaaggcttacctcaggtgtatcctccttatctaaactacctgcgtcccgattccgaggcttcacagtcccctcagtattccttcgagtcactgcctcagaagatatgtttgatttgcggcgatgaggctagcggctgccattacggagtcttgacgtgcggaagttgcaaggtttttttcaaaagagccatggagggcaggaagtttaagaaattcaacaaggtcagggtggtgagggctctggatgcagtcgcactgccacagccggtgggcgtgccgaatgagtctcaagctctgtctcaaaggttcacgtttagtcccggccaggacattcagctcatcccccccctaataaacctgctaatgagcatcgagcccgacgtgatttacgcaggccacgacaataccaaacctgacacttcaagcagcctgctcacatccctgaaccaattgggggagagacagcttttgtctgtggtcaagtggtccaagtcattgccaggtttccggaacttacacatagatgatcaaattacacttatccagtattcgtggatgagcctaatggtattcgggctgggatggcgcagctacaagcatgtctctggacagatgctttattttgccccagatcttatcttgaatgagtcacatcgatccttatcaagtttcaagctggccaagaaaagctccagcgtctag

SEQ ID NO: 25768 - DNA, 1020 bp, synthetic construct
  misc_feature 1..1020: note = Description of Artificial Sequence: Synthetic coding sequence
  source 1..1020: mol_type = other DNA
atggagggccagcacaactacctgtgcgccggccggaacgactgcatagtggataagatccgtaggaagaattgcccggcttgccggctgcgaaagtgctgtcaggccggcatggttctgggaggcagaaagttcaaaaagttcaacaaggtgcgggtggtgagagctctggatgccgttgctctgccccaacccgtgggggtccccaatgagtcccaggccctctcacagcgcttcacattcagtcctggacaggacattcagcttattccaccgttaattaatctgctgatgagcattgaacctgatgtgatttatgcgggacacgacaacacgaagccagatacctcatctagtctgctcacaagcttgaaccagctgggggaaagacagttgctcagcgtggtcaaatggtctaagtctctcccgggatttagaaacctccatatcgatgaccagataaccttaatccagtactcatggatgagtttaatggtattcggactgggctggcgaagttataaacatgtttccggacagatgctgtatttcgcccccgacttgatcctcaatgagcaacgcatgaaagaaagctctttctactcactctgcctgacaatgtggcagatcccccaagagtttgtcaagctgcaggtgtctcaagaggaattcctttgtatgaaggtactcttgctgctcaacaccatacctctggagggcctgaggtcccaaacccagtttgaagagatgcgttcaagctatatccgagagctgataaaagcgatcggcttaagacagaaaggagtggtttccagtagccagagattttatcagctaaccaagctcctcgataatcttcacgatctcgtaaaacagttgcacctctactgtttgaacacattcatccagagccgggccctgtcagttgagtttcctgagatgatgagcgaagtgatcgctgctcaattgcccaagatacttgctgggatggtcaaacctttgctgttccataagaaatag

SEQ ID NO: 25769 - DNA, 2412 bp, synthetic construct
  misc_feature 1..2412: note = Description of Artificial Sequence: Synthetic coding sequence
  source 1..2412: mol_type = other DNA
atgaccgagctgaaggccaagggcccccgggccccccacgtggccggcggcccaccttctcccgaggtgggctcccccctgctctgtcgtccagcagcggggcctttccctggtagtcagacttcagatacactgccagaggtaagtgctatccctatttccttagatgggttgctcttcccacggccttgtcagggacaggatccttcagacgagaagacccaggatcagcagtcgttgtccgacgtcgagggggcttatagtcgggctgaagcaactcgaggagcaggcgggtcgagttcctcaccgcccgaaaaggattctggacttttggactccgtgctagacacactccttgcgccctcaggcccaggacagtcccagccctctccaccggcatgcgaagtgaccagttcatggtgtctgtttggaccagagcttcctgaggatcccccggcggcacccgcaacccaaagagtcctgtcccccctgatgtcaagatctggttgcaaagttggcgacagttccggaaccgcagctgcacacaaagtgctgccccggggtcttagcccagccaggcagctcctgctgcctgcatcggaatccccccactggagtggggctccggtcaagccttcccctcaggctgctgccgtcgaagtcgaggaggaagacggatctgagtccgaagaatcagctggacccctactgaagggaaagccccgcgcccttggaggtgctgccgccggcggaggagccgctgccgtccccccaggcgctgctgccggcggggtggctttagtaccaaaagaggacagccgtttcagcgccccccgggtggcacttgtcgagcaagacgccccgatggccccagggcgctcaccactggctacaaccgtgatggacttcatccacgttccaattctcccgttgaatcacgccctgcttgctgcgagaactaggcagctgctggaagacgagagctatgatggcggagctggggcagcaagtgccttcgcacccccaaggtccagtccttgcgcctcttcgaccccggtcgcggttggtgatttcccagattgcgcctaccctcctgatgccgaaccgaaggatgatgcctaccctctctactctgacttccagccgccagccttaaagatcaaagaagaggaggagggcgccgaggcctccgccagaagccccagaagttatttagtcgccggggcaaatcctgctgcattccctgattttccgctagggcctccccctcctttaccccccagggctacaccatcaagaccaggcgaagctgctgtgacggccgcccccgcgtccgcctctgtcagctcagcctcgtcctccggttctacactagaatgtatcctgtataaggcggagggagccccacctcagcagggaccctttgctccacccccctgcaaagccccaggcgccagcggttgcctgctgcccagagacggtctcccaagcacctccgcgtcagctgctgcggccggcgccgcacccgcactatacccagccctgggtctgaatggcctgcctcaactcgggtatcaggctgccgtactcaaagaaggactacctcaagtgtacccaccttacctgaactacttgcgacccgattcagaagcctcgcagagcccacagtattccttcgaatcactgccacagaaaatctgcctaatttgcggagatgaggcgtcaggatgccactacggtgtcctgacctgcgggtcttgtaaagtattttttaaacgggcaatggaaggtcaacacaattacctttgcgcgggcagaaacgactgtattgtcgacaagattcgccgcaagaattgcccagcatgccgcctgcgaaagtgttgtcaggccggcatggttctggggggccgaaaatttaaaaaatttaataaggttcgggtcgtcagggcacttgacgccgtggcgctgcctcagcccgtgggagttccgaatgagtcgcaagccctgagccagcgcttcaccttcagccccggacaagacattcaacttattccccctctcataaacctgttgatgagtatagagccagacgtaatatatgctgggcacgataacacgaagccagacacttcctccagtctgttaacatctctcaaccagctgggagagcggcagttgctgtcggtcgtgaaatggtcaaagtcgctgcctggctttagaaacctgcatattgacgatcagattactctgatacagtattcttggatgtcgctgatggtgtttggactgggatggcgctcttataagcatgtgagcgggcagatgctctatttcgccccagatctgattttgaacgaaagccacaggtcactaagcagttttaaattagctaagaagtcctcctccgtgtag

SEQ ID NO: 25770 - DNA, 2073 bp, synthetic construct
  misc_feature 1..2073: note = Description of Artificial Sequence: Synthetic coding sequence
  source 1..2073: mol_type = other DNA
atgaccgagctgaaggccaagggcccccgggccccccacgtggccgggggacctccctctcctgaagtcgggtcccccctgctgtgtagaccagctgccgggcccttccctgggtcccagacgtctgacacactcccggaagtgagtgctattcctatttctctggacggcttgctgtttccgagaccctgtcagggacaagacccatctgatgaaaagactcaggatcagcagagccttagtgatgtcgagggcgcctatagtcgggctgaagctactcgcggtgctggtggcagctcatcttctcccccagaaaaggactccggtttgttagactctgtgctcgatacactcctggcaccgagcggccctggtcaaagtcagccctcacccccagcatgcgaagttaccagcagttggtgtttgttcggccctgagctcccagaagatccccccgccgcccctgctacacaacgcgtgctgagccctctgatgagcaggagcggatgcaaggtgggcgacagttctggcacggctgctgctcacaaagtcctcccgcgaggcctttcccctgcacgccaactcctcttgcccgcctctgagtctcctcattggtccggcgctccagtgaaaccatctcctcaggcagccgcggtggaggtcgaggaggaggacggatctgaatctgaggagagcgcaggcccattactgaaagggaagcctagagcgttaggcggcgctgccgctggcggcggtgctgctgcagttccaccgggggcagcagctggcggcgtggccctagtccctaaggaggattcccgctttagcgcccctagggtggccctcgtggagcaagatgcaccaatggctcccggccgctccccattagccactaccgttatggatttcattcacgtgcccattctccccctaaatcacgccctgttggcggcccgaacccggcagctgctggaagatgaatcctacgacggcggcgcaggagcagccagcgctttcgccccgccgcggtcatctccttgtgcctcttcaacgcccgtagccgtgggagattttccagattgcgcgtacccccccgatgcagagccaaaagacgatgcataccctctttacagtgatttccagcctcctgctctgaagatcaaggaagaggaggagggtgccgaagcaagtgccaggagtcctcggtcttatctcgtagccggtgcgaaccccgcagcattccctgatttcccacttggacccccccccccgctgcctcctagggctaccccaagcagacctggtgaggctgctgttactgccgctcccgcatccgcttccgtctctagtgcctctagctctggttccacgctggagtgcattttatacaaggccgagggcgccccccctcaacaaggcccgtttgccccaccaccgtgcaaggcccccggtgcctctggatgcctcctccccagggacggactgccgagcacctcagccagtgccgccgccgcaggagctgctcctgcgttataccccgctttgggactgaacggactaccccaactgggctaccaggccgcggtgctgaaggagggcctgccgcaggtgtaccctccgtacctaaactacttacggccggatagtgaggcatcccaaagcccccagtacagttttgagagtctgccccagaagatttgtctgatctgtggagatgaagcctccggttgccattacggggtccttacttgtgggtcttgcaaagtcttcttcaagagagctatggagggtcagcataattacttatgtgcagggagaaatgattgcatcgtcgataaaattaggagaaaaaactgccccgcctgtaggctgagaaaatgttgtcaggccggtatggttctggggggtttccggaacttgcacatagacgatcagattactctcattcagtatagctggatgagcctgatggtattcggtttaggatggagatcttataagcacgtgagcgggcagatgctgtatttcgcccccgatctgatactgaacgaggagtccattgtgacatcttag

SEQ ID NO: 25771 - DNA, 1410 bp, synthetic construct
  misc_feature 1..1410: note = Description of Artificial Sequence: Synthetic coding sequence
  source 1..1410: mol_type = other DNA
atggacgtggagaacgagcagatcctgaacgtgaaccccgccgaccctgataacctttcagattccctgttctccggtgacgaagagaatgcaggaaccgaggaaatcaaaaatgaaattaacgggaactggatcagtgcctcttctataaacgaggcccgtatcaacgccaaggccaaacgcagattgaggaaaaatagttcccgagattccggaaggggagactctgtatccgattcagggagtgacgctctcagatctggtttgaccgtacctacgtcacccaaaggcaggctgctggatcggcgcagtagatctggaaaaggcaggggcttgcccaaaaagggcggcgctggcggcaagggggtctggggtacgccaggccaagtatacgatgtagaagaagtggacgtgaaagaccccaattatgatgacgaccaggagaattgtgtttatgaaaccgttgtcctgcctttagacgagcgggccttcgaaaaaactctgaccccgataatccaggagtatttcgagcatggggacaccaatgaagtggcggagatgctgcgtgaccttaacctgggagaaatgaaatccggggtccctgtgctcgctgtgagtcttgcgctggagggcaaagccagccacagggagatgacttctaaactcctcagcgacctgtgtggcactgtcatgagcactaccgatgtggaaaaatcctttgacaagctccttaaggatctgcctgaacttgccttggacaccccgcgagcaccacagctcgtgggacagtttattgcccgcgccgtgggtgacggcatactgtgcaacacatacatcgactcttataagggcacagtggactgcgttcaagctagggccgcgctggacaaagccacagtcctgttgtccatgtcgaagggaggcaaacgaaaagatagtgtttggggcagcggtgggggccaacaaagcgtgaaccacctggtcaaggaaatcgatatgctcttaaaagagtatcttctatcaggtgatatttcagaggcagaacattgcctgaaggagctggaagtgccacatttccaccacgagttagtttacgaagccattatcatggtgctggagagtactggagagtctacatttaagatgattctcgatctgctcaagtcattgtggaaaagctccacgattaccgtggaccagatgaagcgcggctacgagagaatatacaatgagataccagacattaaccttgatgttccacacagttattctgtccttgaacgttttgtggaggagtgctttcaggccggcattataagcaaacagcttcgggacctgtgtccgtcccgaggcaggaaacgcttcgtcagtgaaggagacgggggtcggctaaaacctgagagctattag

SEQ ID NO: 25772 - DNA, 1377 bp, synthetic construct
  misc_feature 1..1377: note = Description of Artificial Sequence: Synthetic coding sequence
  source 1..1377: mol_type = other DNA
atgaccaagtaccccgacaacctgagcgacagcctgttcagcggcgacgaggagaacgcagggactgaggagatcaaaaacgagatcaatgggaattggatttctgcaagtagtatcaatgaagcccgcattaacgcgaaagccaagaggaggctccgaaaaaacagttctagggatagtggacggggagacagcgtatccgattccggatccgacgcattgcgttcaggcctgactgtgcctaccagcccaaaaggccgcctgctggaccgccgttcacgctctggcaagggccgaggcctgccaaaaaaaggtggagccggaggtaagggcgtgtgggggacgcccggtcaggtgtacgatgtggaggaagtggatgttaaggaccccaactacgacgatgaccaggaaaactgcgtctacgagactgttgttcttcctctggacgagagagctttcgagaagacactgactcccataatccaggaatatttcgaacacggggacactaatgaggtggcagaaatgttacgcgacctgaacctcggcgagatgaaatccggcgtccctgttctggctgtgtctctggccctcgaaggcaaagcctcacatcgcgagatgacctccaagcttctgagcgacttgtgtggcaccgttatgtccaccaccgatgtcgaaaagtctttcgacaagctactgaaggatctgcctgaacttgctctcgacacccccagggcccctcagctggttggccaatttattgccagagcagtgggggacgggatcctgtgcaacacttacatcgattcatacaaaggcactgtagattgcgtacaggctagggctgccctcgacaaggcaactgtgttgctgtcaatgtccaaggggggcaaaagaaaggacagcgtgtgggggtctggagggggccagcagtccgttaatcacctggtcaaagagatcgatatgctgttaaaagaatatttactcagtggagacatctccgaggcagagcactgtcttaaagaattagaagtcccccactttcaccatgaacttgtgtatgaagctatcatcatggtactggaaagcaccggggaatctacattcaaaatgatactggatctgcttaaaagcctctggaaatcatccacaataaccgtcgaccaaatgaagcgcggatatgagcgaatttacaatgaaatcccggatattaatctggatgtgccacactcctattccgttctggagcgatttgtcgaagaatgcttccaggctggcataatttctaaacagctgagggacctgtgcccatctcggggtagaaagcgattcgtctccgagggcgacgggggacggctcaagcctgaatcctactag

SEQ ID NO: 25773 - DNA, 696 bp, synthetic construct
  misc_feature 1..696: note = Description of Artificial Sequence: Synthetic coding sequence
  source 1..696: mol_type = other DNA
atggacgtggagaacgagcagatcctgaacgtgaaccccgccgagaatgccggtacagaagagattaaaaatgagataaacggcaattggattagcgcctcctccattaatgaagccagaattaatgccaaagccaaacgccgccttcggaagaactccagcagagactccggtcgtggcgatagcgtgtccgatagcggatcagacgcgctgagatccggcctgacggtccccaccagccctaaggggcgactcctggaccggagatcacgttccggcaaagggcgggggctccctaaaaaagggggtgccggtgggaagggcgtgtgggggacccctgggcaggtgtatgatgtcgaggaggtagacgtgaaggaccctaattacgacgacgaccaggaaaactgcgtgtatgaaacggtggttttgcctctggatgaaagggcatttgagaaaacactgactcctattatccaagagtattttgaacatggggacaccaatgaagttgccgaaatgctcagagaccttaacctcggagaaatgaagagcggagtccccgtgttggccgtctctctggcactcgagggaaaagcaagccaccgcgagatgactagcaaacttctgtcagacttgtgtgggactgtgatgagcacgaccgatgttgaaaaatcattcgacaaactgctaaaatag

SEQ ID NO: 25774 - DNA, 786 bp, synthetic construct
  misc_feature 1..786: note = Description of Artificial Sequence: Synthetic coding sequence
  source 1..786: mol_type = other DNA
atgttcgaggcccggctggtgcagggcagcatcctgaagaaggtgctcgaggctctcaaagatttgattaatgaagcgtgctgggacatcagctcttccggcgtgaatctacaatcaatggactcatcacatgtgtccctggtacaattgacactgcggtctgaggggtttgacacctacaggtgtgaccgcaatctcgccatgggggtaaatctgacatcaatgagtaaaatcctcaagtgcgccggcaacgaagatattattacactgcgtgctgaggataatgctgacactctcgctctggtgttcgaggctccgaatcaggaaaaagtctctgactacgagatgaaacttatggaccttgacgtggagcagctgggtatacctgaacaggaatactcctgcgtggtgaagatgcccagtggagaatttgcccgtatctgcagagatctgtcccatattggtgatgctgttgtgattagctgcgctaaggacggcgttaagtttagcgcatctggcgaattagggaatggcaacattaagctgagtcaaaccagtaatgtcgacaaagaagaagaggcagttacaatagagatgaacgagccggtgcaattgacattcgcattaagatacctgaatttttttacaaaagctacgccattatcatctaccgttaccctctccatgagcgccgacgttcccttagtcgtcgagtataagattgccgacatgggacatctgaagtattatctcgccccgaagatcgaggatgaagaaggatcctag

SEQ ID NO: 25775 - DNA, 786 bp, synthetic construct
  misc_feature 1..786: note = Description of Artificial Sequence: Synthetic coding sequence
  source 1..786: mol_type = other DNA
atgttcgaggcccggctggtgcagggcagcatcctgaagaaggtgctggaagctctaaaggatttgataaacgaggcctgctgggacatcagttcaagcggcgtgaacttgcagagcatggacagttcccacgtatctctggtgcagcttacactgagaagtgagggcttcgacacctaccgttgtgataggaacctggcgatgggcgtcaatttgactagtatgtcaaagatactgaaatgtgccggaaacgaagacataattaccctgcgggctgaagataacgccgacaccctggctctagtgtttgaagctccgaaccaggagaaagtgtctgattacgaaatgaaactgatggacctggatgtggagcaactcggcattcccgagcaggaatattcctgcgtcgtcaaaatgccgagcggtgaattcgctaggatctgcagggacttatcccacataggcgacgccgtcgtgatttcatgcgcaaaggatggggtcaaattctcggcttcgggcgagctggggaacggaaatataaaactgagccagacctccaacgtagacaaggaagaggaggccgtgacgattgagatgaatgagcccgttcaactgacatttgccttgcgctacttaaacttctttactaaggcgacaccgttgagctctaccgttacactgtccatgagcgctgacgtccctctagtggtcgagtataagatcgctgatatgggtcatttgaagtattacttagctccaaagattgaagatgaagaaggatcatag

SEQ ID NO: 25776 - DNA, 1140 bp, synthetic construct
  misc_feature 1..1140: note = Description of Artificial Sequence: Synthetic coding sequence
  source 1..1140: mol_type = other DNA
atgagcagccccagcctgagcgacctgggcaagcgggagcccgccgccgcagcagatgaaaggggcacacaacaacgccgcgcctgcgccaatgcaacttggaacagcattcataacggtgtaatcgcagtattccagcgtaagggcctgcccgatcaagagttattttctctcaatgagggagtgcgccagttgcttaagacagagctggggagcttttttactgaatacttgcagaatcagttgttgaccaagggaatggtaatcctcagagacaaaattcgtttctatgaagggcagaaattgctcgactcacttgccgaaacttgggattttttttttagcgatgtgctgcccatgttgcaggccatcttctatcccgtgcagggcaaggagccttcagtgaggcagttggctcttcttcattttagaaacgcgatcacactgtctgtcaaattggaggatgccctggctcgcgcccatgccagggttccacccgcaatcgtgcagatgttactggtgttgcagggagttcatgagtctcgaggagttacagaggattatcttagacttgagaccttggtgcagaaggtggtgtccccatacttaggaacgtatggcctgcactccagcgagggccctttcactcattcatgtattttagagaaacgtcttctgcggaggtcccggtctggagacgtcctggctaaaaaccccgttgtgcgatcaaagtcttacaatactcccctgctcaacccggtgcaggaacacgaggctgagggcgccgccgctggcggaacatccattcggcggcattccgtttcggaaatgacgagctgcccagaaccccagggattctccgatcctcccggccagggaccaacgggcacattcagaagctcccctgcaccacattctgggccctgtcctagcaggctgtacccaactacgcagcccccggaacagggtcttgatccgactcgctcaagtctcccgaggtcctcccctgagaacctcgtcgatcagatcctggagtccgtggactccgacagtgagggcatctttatcgactttgggcgaggtcggggaagcggcatgagtgacctcgaagggagcggcggccgccagagtgtcgtgtag

SEQ ID NO: 25777 - DNA, 1167 bp, synthetic construct
  misc_feature 1..1167: note = Description of Artificial Sequence: Synthetic coding sequence
  source 1..1167: mol_type = other DNA
atgcggaccctgcggcggctgaagttcatgagcagccccagcctgtctgatcttggtaagcgagagccggcagctgctgccgacgagagagggacccagcagcgcagagcttgcgctaacgctacctggaattccattcacaacggggtgatcgcagtgttccagcggaagggcctgcccgatcaggagctcttttcgctgaacgagggagtcagacaacttttgaaaaccgaactgggatcgttctttacggaatacctgcaaaatcagctcctgaccaaaggtatggtcattctccgcgacaaaatccggttctacgaaggacagaagcttttagatagtctggccgagacttgggacttcttttttagcgatgtgctaccaatgctgcaggccatcttttaccctgtgcaggggaaagagcccagcgtgcggcagctcgctcttctgcattttcgaaacgctatcactctgtctgtgaagctcgaagatgcccttgctcgcgctcacgcccgtgtccctcctgccatcgttcagatgttgttagttctacagggagtgcacgaaagcagaggtgtgactgaagactacctgaggttggaaaccctagttcagaaggtggtcagcccttatttaggaacctacggcctccattccagcgagggaccattcacccattcttgtatcctggaaaagaggttattacgtagatcaagaagcggagacgtgctggccaaaaaccccgtcgtcaggtcgaagtcttataatactccactcctcaaccctgtgcaagaacacgaagcagaaggggctgccgctggaggcacgtcaatcagacgtcactccgtcagcgagatgacctcgtgtcctgaacctcagggcttcagcgacccaccagggcaaggaccaactggcacattccgatcttcacccgcaccgcatagcggaccttgccccagcagactgtatcccaccactcagcctcctgagcagggcctggacccgacgaggtccagccttccccggtcgtccccagagaacttagtggaccagattctagaatccgtcgactcagattctgagggcatctttatcgactttggtagaggaagggggtcaggaatgtctgatctcgagggcagtggcgggaggcaaagcgtggtttag

SEQ ID NO: 25778 - DNA, 804 bp, synthetic construct
  misc_feature 1..804: note = Description of Artificial Sequence: Synthetic coding sequence
  source 1..804: mol_type = other DNA
atgagcagccccagcctgagcgacctgggcaagcgggagcccgccgcagccgctgatgagaggggcactcagcagcggcgggcgtgtgctaacgccacctggaacagcatccataatggcgtgattgcggtctttcagcgcaaaggccttcccgaccaagaactgtttagccttaacgagggggtccgacagcttcttaagacggaactgggatccttttttactgagtacctgcagaaccagctgctgaccaaaggcatggtaatcctacgcgacaaaatccgattctacgaaggccagaaattactggactccctggctgaaacatgggacttctttttttcagatgtcctccccatgctacaggcaattttctacccagtgcagggaaaagagcctagcgtgcgccagctggcacttctgcacttccggaatgccattacactctcagtcaagctggaggacgccctcgcacgagcacatgctcgtgtgccgcccgccattgtacagatgctgcttgtattgcaaggcgtgcatgagtcacgaggagtgaccgaggattaccttcggctggagaccttagtacagaaggtagtgagtccctatctggggacttacggtctacatagcagcgaagggcccttcactcacagttgtattctggaaaagagacttttaaggcgttcaagatccggtgatgtgcttgccaagaacccggtcgtgcggagcaagtcttataataccccactgctaaacccggtccaggagcacgaggctgagggcgccgctgcaggtggtacctag

SEQ ID NO: 25779 - DNA, 681 bp, synthetic construct
  misc_feature 1..681: note = Description of Artificial Sequence: Synthetic coding sequence
  source 1..681: mol_type = other DNA
atgagcagccccagcctgagcgacctgggcaagcgggagcccgccgccgccgccgatgaacgcgggacgcagcagcgacgcgcttgcgccaatgccacatggaattcaatccataatggtgtgatcgctgttttccaacgaaagggactgcctgaccaggaactgttttctttaaacgaaggtgtacggcagctgctgaaaacggaattaggaagcttttttacagaatatctccagaatcagctgctgacaaagggaatggtgatcctgcgggacaaaattcgtttttatgaagggcagaaactgctggatagcctggccgagacctgggatttcttcttcagcgatgtcttgccaatgctacaggcaattttctacccagtgcagggtaaagaaccgtctgtacggcagttggccttgttgcattttcggaacgccataacgttgagtgttaaattggaggatgccctggcccgagcccatgcccgcgtgccacctgcaatagtgcagatgcttctagttttacagggcgtccatgagtcccgtggcgttactgaggactacttgcggctggagaccctcgtgcagaaggtcgtgtctccctatcttggaacttacggcctgcactcctccgaaggcccatttacgcactcctgtattctggagaagcgcctgttgtag

SEQ ID NO: 25780 - DNA, 1236 bp, synthetic construct
  misc_feature 1..1236: note = Description of Artificial Sequence: Synthetic coding sequence
  source 1..1236: mol_type = other DNA
atggtgtgcctggagctgagccagcgggaggcctggggcagcggctctccagaaaaaatgcccgcacagcccgagggcttgtatcgactgaaattcatgagctcaccctccctcagcgatctgggaaaaagggagcccgccgccgctgccgatgagcgcggcacccagcaacgaagggcatgcgcgaatgccacttggaattctattcacaacggggtgattgctgtgttccagagaaaaggtctgcccgaccaggagctattcagcctaaatgagggggtaagacagctgcttaaaacagagttgggctccttcttcacggagtacctgcagaaccagctgctcaccaaaggcatggtgattctccgggataaaatacggttttacgaaggacagaagctgctggacagcctagccgaaacgtgggacttctttttctctgacgtgctgcctatgcttcaagccatcttctacccagtgcagggtaaagaaccatccgtgcggcagttggccttgcttcattttcgcaacgctatcacactcagtgtgaagctggaggacgcacttgcccgcgctcatgctcgtgtgccacctgctatagttcagatgttgctcgtcctgcagggagtacatgaaagcaggggagttacagaagattaccttcggttggagacccttgtgcagaaggtcgtgtcaccttacctcggtacctatggactgcatagcagcgagggccccttcacacactcttgtatccttgagaaaaggctgttgagacgctccaggtctggtgacgttttagcgaagaatcccgtggtgagatccaagtcttacaacactcctctgctgaatcctgtgcaagaacatgaggctgaaggggctgccgcaggtgggactagcatccgaaggcactcggtaagcgagatgacatcatgtccagagccacagggattttctgaccctccaggccaggggcccacgggcactttcaggtcatcccccgctcctcactccgggccttgcccatcgcggctctacccaacgacccaaccccccgaacaaggcctcgatcctacacgctcctctctgccccggtcatcgccggagaacctcgtagaccagatccttgaatccgtggactcagacagcgaagggatcttcatcgactttggaagggggaggggttccggaatgagcgacttggaaggctctggtggccgccagagcgtggtgtag

SEQ ID NO: 25781 - DNA, 2649 bp, synthetic construct
  misc_feature 1..2649: note = Description of Artificial Sequence: Synthetic coding sequence
  source 1..2649: mol_type = other DNA
atggagcccgcccccgcccggagcccccggccccagcaggaccccgcacggcctcaggagccaaccatgccacctcccgagactcccagtgaagggcgccaaccttcgccatctccaagcccaaccgaacgagcccctgcctcagaagaagagtttcagttcctcagatgtcaacagtgtcaggctgaggcaaagtgccctaagctgctaccctgcctgcacacactttgtagcggctgcttagaagcttccggtatgcagtgcccgatttgtcaggcaccttggcccctgggcgccgatactccagcactggataacgtcttctttgaatctctccagaggcgactgtcagtctaccggcagattgtggacgcccaggctgtgtgtaccaggtgcaaagagtcagctgatttttggtgtttcgagtgcgaacaattactgtgcgcgaagtgtttcgaggcacatcagtggtttctgaaacatgaggcccggcccctggctgagcttagaaaccagtcagtgcgcgagtttctggacgggaccagaaaaacaaataacattttctgttccaacccgaatcaccggacacctacgttaacatctatctactgtcggggctgcagcaagcccctttgctgttcatgcgcgctcctagactctagtcattccgaactgaagtgcgacatctccgcagaaatccagcaacgacaagaagaactggatgctatgacccaggcgctgcaagaacaggatagcgctttcggcgccgtgcatgcacagatgcacgcagctgtgggccaactggggagagctcgagccgaaactgaagagttgatccgagagcgggtaagacaagtcgtggcccacgtgagagctcaagagcgggaattgctcgaggccgttgacgctaggtaccagcgcgactatgaggagatggcttcaaggttgggccggcttgatgccgtcctgcaaaggatccgcaccggctcagctctcgtacagcgcatgaagtgttacgcgagtgatcaggaagtgttggacatgcacggtttcctgcggcaggctttgtgccgccttcgacaggaggaaccccagagcttgcaggctgcagtccgtactgacggattcgatgaattcaaggtgcggctgcaagacctcagctcatgcatcactcaggggaaagacgcagccgtaagtaagaaggcgagccctgaagctgcttctactcctagagaccccattgacgttgacctaccagaggaggccgagagagtcaaagcccaagtgcaggcattagggctggccgaggcccaacccatggccgtcgtccaaagcgttcctggagctcatccggtccccgtgtacgccttttctattaagggcccttcttacggtgaggacgttagcaatacaacgacagcccagaaacgcaagtgctctcaaactcagtgtccgcggaaggtcattaaaatggaaagtgaggaggggaaagaagcccgcttggcaagaagctctcccgagcagcctcggcctagcactagtaaagctgtctcaccacctcacctggacggacctcccagccctaggagccccgtgattggcagcgaggtatttctccccaattccaatcatgtcgcatccggtgccggcgaagccgaagagagagtggtcgtgatctcgagcagcgaagactccgatgccgaaaactctagctctcgggagctcgatgactcttcgtctgaaagctccgacctgcagctggagggccctagcactctgagagtactcgacgagaatctcgcagacccccaggcggaggacagacccctggtgttttttgatctgaaaatagataacgagacgcagaaaatcagtcaacttgctgctgtcaatcgagaatcgaagttcagagtggtgatccagcctgaagccttcttttcaatatactccaaggctgtgagcttagaagtcgggctacagcactttttgtcatttctgtcctccatgcgacgtcccatcctggcctgttacaaattatggggccctggcctgcctaattttttccgcgccctggaggatattaaccgcctttgggaatttcaggaggccatttccgggtttctcgcagccctcccgttaatccgtgaaagagttcccggtgcttcgagttttaaactgaagaatttggcccagacttatctggcccgcaacatgagtgagcggtccgccatggcggccgtgcttgcaatgagggacctctgtagactgctagaggtgtcaccaggcccccagctggcacaacacgtgtacccattcagtagtctacagtgttttgcgagcctgcagccactggtgcaggcagccgtgctccccagggcggaggcccgcctcttggctctgcacaacgtgagcttcatggagctgctgtctgcacacaggcgggatcggcaaggcggccttaagaaatatagcaggtacctttctcttcagactactaccctgcccccagcgcagcccgctttcaatttgcaggcactgggtacctacttcgaggggctgctcgaaggaccagcactggcaagagccgaaggagtgagtaccccactcgcgggccgcggattggctgaaagggcctctcaacagtcctag

SEQ ID NO: 25782 - DNA, 2490 bp, synthetic construct
  misc_feature 1..2490: note = Description of Artificial Sequence: Synthetic coding sequence
  source 1..2490: mol_type = other DNA
atggagcccgcccccgcccggagcccccggccccagcaggaccccgctagaccacaggagcccaccatgcctcctcccgagactccaagcgaggggcgccaaccttcccccagtcccagcccaactgagagggctccagcttcagaagaggagttccagttccttagatgccagcagtgccaggcagaggccaaatgtccaaagttgttgccttgcctgcatacactatgcagcggctgtcttgaggccagcggaatgcagtgtccaatctgccaggccccctggcccctgggggcagacacccccgcactcgacaacgtgttcttcgagagtctgcagaggcgcctgtccgtctacagacagatcgtggacgcccaggccgtatgtaccagatgcaaagagtccgcagacttttggtgctttgaatgtgagcaactactatgtgccaaatgctttgaggctcaccagtggtttctgaaacatgaggcccgtccgctcgctgagctccgaaaccagagtgtcagggagttcctggatggcacgcggaaaaccaacaacattttctgcagcaatcctaatcaccgcacccctaccttgacatctatctactgccgaggctgctccaagcctttgtgttgctcttgtgcactgctagactcctcccacagtgaactgaaatgcgatatttcagccgaaatccaacagagacaggaggagctggacgcaatgacccaggccctgcaggagcaggattccgcctttggagccgtgcatgctcaaatgcatgctgcagttgggcagctgggccgagcgagagcagagactgaggagctcatccgagagcgtgtgcggcaggttgttgcgcatgtcagggcccaagagcgagagttgctggaagcagtggatgccagataccaacgggattatgaggaaatggcttcaagactgggcagactcgacgccgttctccagagaattcgaaccgggagcgcacttgtacaacggatgaagtgctatgctagcgatcaggaagtccttgatatgcacggttttctgcggcaggcgctctgccgactgcgccaggaggagccccagtctctgcaggccgccgtacgaaccgacgggtttgatgagtttaaggtcagactgcaagatctgagcagctgtattacccaaggcaaagacgcggctgtttccaaaaaggcctcacctgaggccgcttccaccccacgggacccgatcgacgttgacttgcctgaggaggccgagcgcgttaaggcccaagtgcaagccttgggcttagctgaggcgcaacctatggcagtcgtccaatccgttccgggtgcacaccctgtccccgtctacgccttttcaatcaagggtccctcgtacggtgaggatgtgtccaataccactaccgcacagaaacgcaagtgcagccagactcagtgcccacggaaagtcataaaaatggagagcgaagaaggtaaagaggctcggctggcacgatccagccccgagcaaccacggccgtctacctccaaggccgtgagtcctccccacttggatggacccccatcaccccgctcccccgtgattgggagcgaagtctttttgcccaacagtaaccacgtggcctcaggcgcaggagaggcagaagagcgagtggtagtgatttcctcctccgaagattctgacgcggagaatagctgcatggagcccatggagaccgccgagcctcagagttccccggcccatagtagcccagcccactcgtcacctgcacacagctcacctgtgcagagtttgctcagagcacaaggtgctagttcccttccatgtggtacctatcatccccctgcttggccaccgcatcagccggccgagcaggctgctacaccggatgccgagccacattctgaaccgccagatcaccaagaacggccggcagtgcaccgaggaattaggtacttactgtatcgtgcccagcgcgctatcagactcaggcacgccctgagactccaccctcagctgcacagggcccccatccgaacttggtcaccacacgtagtgcaagcctcaacccccgcaattaccggacctctaaatcatccagctaacgctcaagaacacccggctcagctgcagaggggcatttccccgccccacaggattcgtggggccgtccggagccgcagcaggagtttacggggctccagtcacctcagtcagtggctgaataacttctttgctctgcctttctcaagcatggcttctcagcttgacatgtccagtgtcgttggggccggggaatcacgggcccagacacttggtgcaggtgtacctccaggtgactcagtccgcggctctatggaggcttcccaggtgcaagttcccctcgaggcgtcacccataacctttcctcccccttgtgcacccgagcgtccacccatctctcctgtgccgggagctcggcaggctggtttgtag

SEQ ID NO: 25783 - DNA, 2346 bp, synthetic construct
  misc_feature 1..2346: note = Description of Artificial Sequence: Synthetic coding sequence
  source 1..2346: mol_type = other DNA
atggagcccgcccccgcccggagcccccggccccagcaggaccccgctcgcccgcaggagccaaccatgccacctccagaaactccatcggaaggccggcaacctagcccctctcctagcccgacggagcgagctccagcgagtgaagaagaattccagttcttgcgctgccagcaatgtcaagcagaggccaaatgtccgaagttgttgccctgtctgcatacactctgctctggctgtttggaagcctctggaatgcagtgccctatctgccaggcaccctggcccttgggagccgatacacccgccttagacaacgtcttctttgaaagcttacagcggagactgtccgtgtatcgtcagattgttgatgcgcaagctgtatgcacgaggtgtaaggagtcagctgatttttggtgttttgagtgcgagcaactgctgtgtgctaaatgcttcgaagcgcatcagtggtttctgaagcacgaggccaggcctctggcagaactgcggaatcaaagcgtgagagagttccttgatggtacgaggaagacgaataacatcttttgctctaatccaaaccatagaacccctacactgaccagcatctactgtcgcggatgctccaagccattgtgttgtagttgtgccctactggatagcagtcactcagagcttaagtgcgacatctctgctgaaattcagcagaggcaggaagagctggatgccatgacacaggcacttcaggaacaggatagcgcattcggagctgttcatgcacagatgcatgcagcagtcgggcagctgggccgggctagggccgaaacagaggaactcatccgcgaaagggtgaggcaggtggttgcgcatgtgagggcacaagagcgcgagctcctagaagcagttgatgcacgataccagagggattatgaggagatggcttctcgtttgggccggctggacgcggtgctccagcggatacgcaccggaagcgcacttgtccagaggatgaagtgctacgctagcgatcaggaagtcctggatatgcatgggtttttgaggcaggctctgtgccgcctccgccaggaggagccgcaatctctgcaagccgccgtgcgcaccgatgggttcgacgaattcaaggttcggctccaggacttgagcagctgcatcacccagggcaaagatgctgccgtctctaaaaaggcttctccagaagcagctagcaccccgagagaccctatcgatgtagacctcgatgtctccaacacaactactgctcagaagcggaagtgctcccagacacagtgcccacggaaagttataaagatggaaagcgaggaggggaaagaagctcggctagctagatcctctcccgaacaaccacgcccttccacaagcaaggcggtgagcccccctcacctagacgggcctccctctccccggtcacccgtcatcggatccgaggtatttctgcccaacagtaaccatgtggcaagtggggccggagaggctgaggagagagtggtcgtgattagtagttcagaagactctgatgcagaaaattcctgtatggaacccatggagacagcagagccccagtcttcacctgcccattcttcaccagcccatagctcacctgcccatagctccccggttcagtcgctacttagagcgcaaggagcttccagccttccctgcgggacatatcaccctcctgcctggcccccccatcagcctgccgagcaggctgcaactcccgacgcagagcctcacagtgaacccccagaccaccaggagaggcccgctgtacatcggggaattagatatctgctgtacagagctcagcgcgctatccgcttgagacatgccctcagacttcatcctcagctgcatagagccccaattcgcacatggagcccacacgtcgtccaagcgtctacccctgcgatcactggccctttgaatcaccctgccaatgcacaggagcatcctgctcagcttcaacgagggatcagccccccacataggatacgcggggctgtgcgtagcagatcaagatccctacgggggagctcccacctatcccaatggctcaacaacttcttcgcactccctttctcctccatggcctcccagctggatatgtcctccgttgtgggggcaggagaaagtagagctcagacactcggggctggagtccctcctggtgattcagtgcgaggttcaatggaggcctcccaggtgcaggtgccgctggaggccagccccatcacatttccaccgccgtgcgcgcccgaaagaccccccatcagccctgttcctggcgctcggcaagccgggttgtag

SEQ ID NO: 25784 - DNA, 1272 bp, synthetic construct
  misc_feature 1..1272: note = Description of Artificial Sequence: Synthetic coding sequence
  source 1..1272: mol_type = other DNA
atggagcccgcccccgcccggagcccccggccccagcaggaccccgctagaccgcaggagccaacaatgccaccaccggagactccgtccgaggggcgccagccatccccttcccccagccccactgagcgggctccggcctctgaggaggaatttcaattcctccgctgtcagcagtgccaagcagaggcaaagtgccctaaactactgccctgccttcatactttgtgttccggatgcctggaagctagtggtatgcagtgccctatttgccaggcaccctggccccttggcgccgatacacccgcactggataatgtcttctttgaaagtctgcaacggagactgagtgtttaccggcaaattgtcgacgcccaggcggtgtgcacccggtgcaaagagtccgccgatttctggtgttttgagtgcgaacaattgctctgtgccaagtgctttgaggctcaccagtggttcctcaaacacgaggcacgtccactggcagaactgagaaatcagtcagtccgcgaattcctggacgggacccgcaagactaacaacattttttgttcaaatcctaaccacagaacccctacccttacctccatttactgccggggatgctctaaaccactttgctgttcctgcgctctcctggacagctctcactccgagctcaaatgtgatattagcgccgagatccagcagagacaggaggaacttgatgcgatgacccaggccctccaggaacaggacagtgcattcggagcggtgcacgcacaaatgcacgctgctgtcggccagctaggccgggctcgagcggagactgaggagttgattcgggaacgtgtgcgccaagtggtagctcacgtgcgcgcacaggaaagagagcttctggaagctgtcgacgcaagatatcaaagggactatgaagagatggcctccaggctgggtcgcctagacgccgtgcttcagagaatccgcaccggttccgcgctcgttcaaagaatgaagtgttatgcaagcgatcaggaagtccttgatatgcacgggtttcttcgacaggccctctgccgcctgagacaagaggaacctcagagcctgcaagcagcagtccgcactgatgggtttgatgagtttaaagtgcgcttgcaggatctgtcttcatgtatcacacaggggaaggacgccgctgtgtctaaaaaagcttctccggaggcagcaagtacaccacgtgacccgatcgatgtggacctcaggaacgccctgtggtag

SEQ ID NO: 25785 - DNA, 1308 bp, synthetic construct
  misc_feature 1..1308: note = Description of Artificial Sequence: Synthetic coding sequence
  source 1..1308: mol_type = other DNA
atggagcccgcccccgcccggagcccccggccccagcaggaccccgcacggccccaagagccaacaatgccaccacccgaaactccgagcgaggggagacagccctccccctccccatctccaaccgagcgggcaccagcaagcgaagaagagttccagtttctgaggtgtcagcagtgccaggctgaagcaaagtgccctaagctcctcccctgtcttcacacactatgttccgggtgtctggaagccagcggtatgcagtgcccaatttgtcaagcgccctggcctctcggagctgatactcccgcgctcgacaatgttttcttcgagtctctgcaacggcgcctaagcgtgtaccgtcagattgtggatgcccaggcagtatgcacacggtgtaaggaatcagccgacttttggtgctttgagtgtgagcagcttctctgcgctaagtgcttcgaagctcatcaatggtttctgaagcacgaagcgagaccactggcggagctgaggaaccaatccgtcagggaatttctggatggaaccagaaaaaccaataacattttctgctccaatcccaaccataggacccccaccctgacgtccatttattgtcgtggatgtagcaagcctctttgctgcagctgcgcactcctcgattcttcccacagcgagctcaagtgtgacatctccgctgaaatccaacaacggcaggaagagctggacgccatgacccaggccctccaggaacaggacagcgcgttcggagccgtccatgcccagatgcacgctgccgtgggtcagttaggcagggcccgcgctgagactgaagagctaattagagagagggtgaggcaagtggtggcccacgtgcgtgcccaggaacgcgaattgctggaagccgtggatgccagataccagcgggattacgaggaaatggccagccgtctgggtcgcctggacgcagtgctgcaacgtataagaactggctccgccttagttcagagaatgaagtgttatgctagtgatcaggaagtgctggacatgcacggattcttaagacaggcgctatgtcggctgcggcaagaagagccccaaagcctgcaggctgcggtgaggaccgatggttttgacgagttcaaggttagacttcaggacctgtcaagttgtattacccagggcaaggacgccgccgtgagcaaaaaggcttcccccgaagccgcctcaaccccgcgcgatcctatagatgtggatctgctgcctcccccggctcatgccttgaccggacccgcccagagcagcacccactag

SEQ ID NO: 25786 - DNA, 1902 bp, synthetic construct
  misc_feature 1..1902: note = Description of Artificial Sequence: Synthetic coding sequence
  source 1..1902: mol_type = other DNA
atggagcccgcccccgcccggagcccccggccccagcaggaccccgctcggcctcaagagcctaccatgcctcccccggaaacaccctcagaagggaggcagccgagcccctctcctagtcccactgaacgtgcaccagcctctgaagaagagtttcagtttttacgatgtcagcagtgtcaggctgaagctaaatgccccaagctcttgccctgtctacatacactgtgctccggatgccttgaggcgtctggcatgcagtgccccatttgtcaggccccgtggccactgggcgctgacacacctgctctggacaatgtattcttcgagagtctgcagcgccgactatcggtctacagacagattgtcgatgcgcaggctgtgtgcacccgttgtaaggagtccgccgacttctggtgttttgaatgcgagcaattgctctgtgcaaagtgttttgaagctcaccagtggttccttaaacatgaagcaaggcccttggcggagttgaggaatcaatcagtgcgcgagtttctcgatggaaccaggaaaaccaacaatatcttttgctcgaatccgaaccatcgaacaccaactctcacatccatttactgccggggatgctctaagcccctgtgttgcagctgtgccctgctcgattccagtcatagcgagttgaaatgtgacatttcggcagagattcagcaaagacaggaagagctcgacgccatgacccaagctctccaggagcaggactccgctttcggagctgttcatgcgcagatgcatgccgcggtggggcagctcggtcgggccagagctgagaccgaagagctcatacgcgagcgagtgcgtcaggtggtcgcccatgtccgggcacaggagcgcgagctgttggaggccgtggacgctaggtaccagagagattacgaggagatggccagcagacttgggagattggatgctgtccttcaaagaataaggaccggttctgccttagtgcagaggatgaagtgctatgcctccgaccaggaggtgctggatatgcacggattcctgcggcaggccctgtgccgcttaaggcaagaagaacctcaatctctccaggctgcggtgagaactgatggcttcgatgagtttaaggttcgactacaggacctctcaagctgcattacacagggcaaagatgctgccgtgtctaagaaggcctcaccggaagcggcgtctacacccagagatccgatcgatgttgacctccccgaagaagctgagcgggtgaaggcgcaggtgcaggcccttggtctggcggaggcccaacccatggctgtggtgcagtcagtgccaggagcccatccggttcctgtgtatgccttctctataaagggaccctcttacggggaagatgtaagtaacaccacaacagcccaaaagcgcaagtgcagccagactcagtgtccccgcaaggtcataaaaatggaaagcgaggagggcaaggaggctaggctggcccgaagctcccctgaacagccgcggccgagcaccagcaaggctgttagccctccccatcttgatggcccacctagtcctaggtcaccagtgataggcagtgaggtatttctcccaaacagcaaccacgtggcatctggagctggcgaagctgaagagcgggttgtggttatctcaagctccgaggattcagacgctgagaattcctctagtagggaactggatgatagttcaagtgaatcctcagatctccagctcgaaggtcccagcactttgcgagtgcttgatgagaacttggcggacccccaggccgaggacaggcctttagtattcttcgacctcaaaattgataacgagagcggcttctcttgggggtacccacacccttttctgatttag

SEQ ID NO: 25787 - DNA, 1332 bp, synthetic construct
  misc_feature 1..1332: note = Description of Artificial Sequence: Synthetic coding sequence
  source 1..1332: mol_type = other DNA
atggccgtggtgcagagcgtgcccggcgcccaccccgtgcccgtgtacgccttctctatcaagggccccagctacggtgaagatgtgtctaacacaacaacggcacaaaagcgcaagtgcagtcagacccaatgtcctagaaaagtcatcaagatggagagtgaggaaggcaaagaagcgagactcgctagatcctcacccgaacagcctaggccatctacatcaaaagccgtcagcccgccccatcttgatggtccgccatcccctcgatctccagtcattggatccgaggtctttctgcccaattcaaatcacgtggcctcaggagccggtgaggctgaggagcgtgtagtagtgatcagcagtagtgaagacagcgatgcagagaacagctcctccagagagctcgatgactccagttcagagtcctcagatctgcagctagagggccccagcacattgagggtgttggatgagaacttagcagatccacaagcagaggatcggcccctggtgtttttcgacctgaaaatagacaacgaaacacagaagattagtcagctggcggctgttaacagagagtcaaagtttcgcgtggtcatccagccagaggccttctttagcatttattccaaggcagtgtcactggaagtgggattgcagcactttctgagttttctctccagtatgcggcgacctatccttgcctgctataagctgtgggggcccggcttgcctaacttcttcagggctttggaagacattaaccgcctttgggagttccaggaggccatctcgggatttctggccgcactccccctaatccgggagcgggtgcccggcgcctccagctttaagctgaagaatctcgctcaaacttatctggcccgcaacatgagcgaacgctccgcgatggctgcggtgcttgccatgagagatctttgccgactgctcgaggtgagtcctgggccccagctggcccaacacgtgtaccccttctccagtctgcagtgcttcgcaagcctccagccgcttgtccaggcagctgtcctccctcgcgctgaggctcgactgctagcgctgcacaatgtgtcattcatggagctcctgtccgcccatagaagggaccggcagggcgggctgaagaaatactcaagatatctgtccctgcaaactacgactttaccgccagcccagcctgcttttaacctccaggcccttggcacttactttgaaggcctccttgaagggcccgccttagccagggccgagggagtttccacccccctggctggacgcggacttgctgagagggcttctcaacagagttag

SEQ ID NO: 25788 - DNA, 2598 bp, synthetic construct
  misc_feature 1..2598: note = Description of Artificial Sequence: Synthetic coding sequence
  source 1..2598: mol_type = other DNA
atggagcccgcccccgcccggagcccccggccccagcaggaccccgctaggcctcaagaacccactatgcctcctccagagacaccaagcgagggcaggcagccgagtcccagcccgagccccactgagagggcacccgcatcagaagaagagttccagttcctacggtgccagcaatgtcaagccgaagctaagtgtccaaagctactcccatgtctccacacactctgtagcggctgtttagaggcctccggtatgcagtgtcctatctgccaggcaccctggccccttggtgcggacactccggcccttgacaacgtcttctttgagtctttgcaacgcaggctaagtgtgtacagacaaatcgtggatgctcaagcagtctgcactcgctgtaaagagagtgccgacttttggtgcttcgaatgcgagcagctgttatgtgccaagtgttttgaggctcaccaatggtttctgaagcacgaagctaggcctctagctgaattacgaaaccaaagcgtcagggagttcctagacggaactcgaaagacaaacaacattttttgttctaaccccaatcaccggacccccacactgaccagcatttattgcagagggtgctccaagcctctttgttgttcatgcgccctgctggacagctcacatagcgagctgaaatgtgatatctcggccgagatccaacagcggcaagaagaactggatgccatgacgcaagccctgcaggagcaggattcagctttcggggctgtccatgctcaaatgcatgccgccgtcggccagttgggcagagcccgcgccgaaactgaggaacttatccgcgagagagtcaggcaggtggtcgcccacgtgcgagcccaggagagggaactgcttgaggctgtggacgcaaggtatcaacgggattatgaggagatggctagcagactagggcggctcgatgccgtgctccaaaggatccggaccggatcagccctggttcaaaggatgaagtgctatgcatcagaccaggaagtcttggacatgcacgggtttctacggcaggcactgtgtcggctccggcaggaagaaccccagtcattgcaagccgctgtgcgcactgacggattcgacgagttcaaggtgcgattgcaggatctgtctagttgcatcacacagggaaaggacgcagcagtgtcaaagaaggccagccccgaagccgcctcgactcctcgggaccctattgacgtggacctgcccgaggaggctgagcgagtgaaagcgcaggtgcaggctctcggcttagccgaagctcaaccgatggccgtggttcagtctgtacctggagcccacccagtaccggtctatgcctttagcatcaaagggccctcctacggcgaggacgtctctaacacaactactgcgcagaagaggaaatgctctcagacgcaatgtccgcgcaaggtcattaaaatggagtctgaggaggggaaagaggcacgcctcgcaaggagctctcctgaacagcctaggccaagtacaagcaaggcagtcagtcctccacacctcgatgggccaccctcccctaggtcccctgtgattgggtcagaagtattcctgcctaactcaaaccacgtggccagtggcgcgggtgaagccgaagaacgagtggtggtgatatctagctctgaggacagcgacgcagaaaattcatcctcacgagaactggacgatagttcttccgaaagctcagacctgcagctggagggccccagtacacttcgggtgttggacgaaaatttggcagacccccaggctgaggacagaccgcttgttttctttgatctgaaaatcgataacgaaactcagaagataagtcagctggctgccgtaaatcgcgaaagcaagttcagagtcgtgatccaaccggaggccttttttagcttcctgtcctctatgcgtcggccaatcctggcttgttacaaactatggggcccaggcctcccgaacttttttcgggctttggaggacatcaaccggctctgggaatttcaggaagccatcagcgggtttctcgccgccctccccctgataagagagcgagtacctggcgcttcctcctttaaattaaaaaatctcgcacagacttatctggctcggaacatgtctgagaggtcagcaatggcggccgtactggctatgagagatctttgccgactgctggaggtttcccccggcccccaactagcccagcacgtgtatccattttcctccctgcagtgttttgcctcactgcagccattggtacaggctgcggtgctcccccgggccgaggctaggctgcttgcccttcacaacgtgtcattcatggagttgctctccgcccatcgaagagatcggcagggcggcctgaagaagtattcccgctacctttctctgcagacaacaacactgcctccagctcagcccgccttcaacctccaagccctgggcacatacttcgagggtctccttgagggcccagctttggcaagggccgagggggtgagcacccccctggccggcaggggcctcgccgagcgggccagccagcagagttag

SEQ ID NO: 25789 - DNA, 1836 bp, synthetic construct
  misc_feature 1..1836: note = Description of Artificial Sequence: Synthetic coding sequence
  source 1..1836: mol_type = other DNA
atggagcccgcccccgcccggagcccccggccccagcaggaccccgcccggccccaggagccgactatgcctcctcctgagactccgtccgaggggagacagcctagcccatctccgagtccaactgagagggcccctgcctcggaggaggagttccaatttctgcgctgccagcagtgtcaggctgaggcaaagtgtcctaaactgctgccatgtctgcacaccttgtgttctggttgcctggaggcgtctgggatgcagtgccccatctgccaggcaccatggcccctgggagccgacacgccagcgctcgataacgtctttttcgagtcgttgcagaggcggttgtccgtgtatagacagattgttgatgcgcaggccgtatgtactcgatgtaaagagtctgccgacttttggtgcttcgaatgcgagcagctcctctgtgctaagtgcttcgaggcccaccagtggtttttgaagcacgaggccagacccctggccgagctgcggaaccagtctgtgcgcgaatttttggatgggaccaggaagacgaataacatattctgctctaatcctaatcatcggactcctacactgacttcaatctactgtcgtggttgcagcaagccactatgctgctcatgtgccctcctggactcaagtcattcagaactaaaatgcgacatatctgccgagattcagcaacggcaggaagaactcgatgctatgacccaggctctgcaggaacaagattcagctttcggggctgtccatgcccagatgcacgctgccgtcggccagttggggagggcccgggctgagaccgaggagttgataagagagagggtgcgacaagtggttgcccacgtgagggcccaggaaagagagcttctggaagcggtggacgccagatatcagcgggattacgaggaaatggccagtcgattgggaagactggacgctgtgctgcaacgaataaggacagggtcagctctggtacagcgcatgaagtgttacgcatccgatcaggaggtcttggatatgcacggcttccttagacaagctctgtgcagactgcgtcaggaggaaccccagtcactccaggctgctgtacgaacagatggtttcgatgaattcaaagtccgcctgcaggatctttctagctgtataacccagggcaaagacgctgcagtgtccaaaaaagcctcccctgaggccgcatccacacctcgtgatccgattgatgtggacctacccgaggaagccgagagggttaaggctcaggttcaggctctgggcctggccgaggcccaacccatggcagtggttcaatcagtaccgggagctcatcccgttccggtgtatgcgttcagcataaaaggtccctcttacggtgaggatgtgtcaaatacaaccacagcgcagaaaagaaagtgtagtcagacgcagtgtcctcgtaaagtcatcaaaatggaaagtgaggaagggaaggaggctcgtctagcccgcagctctccagagcagccccgtccttccacctcgaaggcggttagtccaccacacttggatggtcccccatcccccaggtcacctgtcatcggatctgaagtgttcctgccaaactccaaccacgtggcgagtggagccggcgaggctgaggaacgcgtcgtggttatttcatcttcggaagactccgatgcggagaactctgtttctggacctgaggtacagccacggactccagcttcacctcacttccgctcccagggagcgcagccgcaacaagtgacccttaggcttgcactgaggctcggaaactttccagtgcgccactag

SEQ ID NO: 25790 - DNA, 1683 bp, synthetic construct
  misc_feature 1..1683: note = Description of Artificial Sequence: Synthetic coding sequence
  source 1..1683: mol_type = other DNA
atggagcccgcccccgcccggagcccccggccccagcaggaccccgccaggccccaggagcctaccatgcctcctccagagaccccttccgaagggagacagccatccccaagcccatcccctacagagagggcacctgctagcgaggaggaatttcaattcttgcgctgtcagcaatgtcaggcggaggctaaatgcccaaagttgctgccctgccttcatactctatgttccggatgcctggaggcatctggcatgcagtgtcctatttgccaggcaccttggccactgggcgcagatactccagccctggacaacgtcttcttcgagagtctacaacgtcggctcagtgtgtatcgacaaattgtcgacgcacaggcagtgtgtaccaggtgcaaagagagcgccgatttttggtgcttcgaatgtgagcagctcctgtgcgcgaaatgcttcgaagctcaccagtggtttctgaagcacgaggcccgccctcttgccgaactgcgtaatcagtcagttagggagtttcttgatggaacccgtaaaacaaacaacatcttctgctcaaaccctaatcaccggacacctacgctgactagtatctactgccgcggctgctctaagcctttatgttgctcctgcgccctgcttgatagctcacactcggaattaaaatgcgatatcagtgccgaaattcaacagaggcaggaggagctggatgccatgacgcaagctttgcaggaacaagattcggcattcggcgcagtgcacgcgcagatgcatgctgccgtgggccagcttggccgtgcacgggctgagacagaggagctgattcgcgagagagtgcgtcaagtagtcgcccatgtgcgcgcacaggaaagggagcttctggaggcagtggacgcacgttaccaaagagattatgaggaaatggctagcaggctgggtcggttagatgccgtgctgcagagaatccggactgggtccgctcttgtgcaacgaatgaagtgttatgcttctgatcaggaggttctggacatgcatggtttcctgcgccaagccctgtgtcggttgcggcaggaagaaccacaatcattacaggcagcggtaagaactgacggatttgacgaatttaaagttaggctccaggacctctcctcatgcattacccagggaaaagacgcggccgtgtccaagaaggccagccccgaagccgcatctactccaagggatcctatcgacgtggatttaccagaggaagcggagagggtgaaagcacaggtccaggccctcggactggccgaagcacagccgatggcagtagtccagagcgtgcccggagctcatccagttccagtttatgctttttcaatcaagggaccaagctacggcgaggatgtgagtaataccaccacggctcagaaacggaaatgcagccaaacacagtgtcctcgaaaggttatcaagatggaatccgaggaagggaaagaagcgaggttggcgcggagctctcccgagcagccacgaccaagtacctccaaggcagtctctcctccccatctggacggcccacctagccccagaagcccggtaattgggagcgaggttttcctgcctaactccaatcacgtggcctctggcgccggggaggccgggagggaacggaatgcactctggtag

SEQ ID NO: 25791 - DNA, 1758 bp, synthetic construct
  misc_feature 1..1758: note = Description of Artificial Sequence: Synthetic coding sequence
  source 1..1758: mol_type = other DNA
atggagcccgcccccgcccggagcccccggccccagcaggaccccgcaagaccacaggagcccacgatgccacctcctgaaaccccatcagaggggaggcagccttctccctccccatcccccacagaacgggctccagcatctgaggaagagtttcagtttctgcgatgtcagcaatgtcaggcagaggccaagtgtcccaaactcctgccctgcctgcataccctgtgctccggctgtctcgaggcatctggtatgcagtgtccaatttgccaggctccttggccactgggggctgacactcctgctctggacaacgtgttctttgagtctcttcagcgaagattgagcgtttacagacagattgtcgatgcacaggcagtctgtacacggtgtaaagagagcgctgacttctggtgtttcgagtgtgagcagttgctgtgtgccaagtgcttcgaggcccaccagtggttcttgaaacacgaagctcgtccactggccgaacttagaaaccaaagcgtccgtgagttcctagatgggacaagaaaaaccaataacattttttgcagtaacccgaatcatcgcacccccaccctcaccagtatatactgcaggggctgctccaagcctttgtgctgttcttgtgctctccttgattcatcgcattcagagctgaagtgcgatatctctgcagagattcagcaacgccaagaggagcttgacgccatgacgcaggctctacaggagcaagacagcgcctttggtgcggtgcatgctcagatgcatgccgcagtcggccagctcggaagagctcgggctgagacagaggagctgatccgagagagggtccgacaggtggtggcccacgtacgggctcaggaaagagaactgctcgaggccgtcgatgcgagatatcagcgggactatgaagagatggctagtcgactgggacgtctcgacgccgtcctccagcgaataaggacgggaagcgcattagtacagaggatgaagtgctatgcctctgatcaggaggtgctagatatgcatggctttttgcgccaggcactttgtcgcctccggcaggaggagcctcagagcctgcaagctgcagtgcgaacagatggcttcgacgagttcaaagtgcgccttcaggatctgtccagttgcattactcaaggaaaagacgccgcagtctctaagaaggccagtccagaggccgcgtccactccacgcgacccgatcgatgtggacctcgatgtcagcaacacaacaacggcccagaagcgaaaatgctcccagacgcagtgccctaggaaagtgatcaaaatggaaagcgaggagggtaaggaggctcggctggccagaagcagcccagagcaaccgaggccctccaccagcaaagccgtgagtccaccacacctggacggcccaccctccccacggtctccagtgatcggaagcgaagttttcctgccgaacagtaatcatgtggcgtccggtgctggcgaggctgaagaacgggtcgtcgtcattagcagttccgaggacagcgatgccgagaacagctcttcaagagagctcgacgattcatcaagcgagagcagcgacctgcagctcgaggggccaagtaccttgcgcgtcctcgatgaaaatttagccgatccacaagccgaggaccgacctctggtgttcttcgacctgaagatagataatgagagcggatttagttggggatatccacaccctttcctgatctag

SEQ ID NO: 25792 - DNA, 483 bp, synthetic construct
  misc_feature 1..483: note = Description of Artificial Sequence: Synthetic coding sequence
  source 1..483: mol_type = other DNA
atgcagcccgccagcgccaagtggtacgaccggcgggactacgtgtttatcgaattttgcgtggaggattcaaaagacgtgaacgtgaacttcgagaagagcaagttgaccttctcatgcctgggcggtagcgataattttaagcatctgaatgagatcgacttgttccactgtattgatcctaatgattctaagcataagcgcacggacagaagcatcctgtgctgcctgcgtaagggagaaagtggccagtcctggcctagactgaccaaggagcgggccaagctcaactggctttccgttgatttcaataactggaaagactgggaggacgactcagacgaagatatgtccaattttgacagattcagtgagatgatgaacaacatgggcggtgacgaggacgtcgatttacctgaagtggatggcgccgacgatgattcccaggattcagacgatgagaaaatgcccgatctcgaatag

SEQ ID NO: 25793 - DNA, 3141 bp, synthetic construct
  misc_feature 1..3141: note = Description of Artificial Sequence: Synthetic coding sequence
  source 1..3141: mol_type = other DNA
atgcagaagcccagcggcctgaagccccccggccggggcggcaagcactcctctccaatgggaaggaccagcacaggaagcgcctcaagcagcgcagcagtcgcagcatccagtaaggagggcagtccattacacaaacagagcagcggcccatcttcctctccagccgccgcggccgcaccagagaagccgggccctaaagcagcagaggtaggagatgactttctgggcgacttcgtcgtgggggagagagtctgggtgaatggcgtgaaaccgggcgtcgtgcaataccttggagagacccagttcgcgccagggcaatgggcaggcgttgtgctagatgatccagtggggaaaaacgacggggcagtgggcggtgtccgatacttcgagtgcccagctcttcagggaatttttactcgcccttcgaagctcacaaggcaaccaacagctgagggttcaggttcagacgcccactctgtggagtccctgaccgcgcagaacctgtccctgcatagcggcacagccacaccaccactgacctctcgggttatcccgctacgagagagcgtgctcaactcatccgtaaagactggaaatgagagtggttctaacctgagcgattcgggctcagttaagaggggagagaaagaccttaggcttggagaccgcgtgctggtgggcggcaccaagactggagtcgttcggtacgtgggagaaacggactttgccaaaggtgaatggtgtggggtggaacttgacgaaccgctgggaaaaaacgacggtgccgtagccggcacacgatattttcagtgccctccaaagttcggcctctttgctcctatccacaaggtgatccggataggtttcccctccactagccctgccaaagcaaaaaaaacaaaacggatggccatgggggtgtctgcactgactcatagtccttccagtagttcaatatcttccgttagctctgtggcctcgagcgtagggggccggccttctagatccggcctactcacggagacgtcctctaggtacgcacgaaagatctcgggcacaaccgccctgcaggaggccttaaaggagaaacagcagcacatcgaacagcttctggccgaaagggatctagaacgagccgaagtggccaaggccacttctcatatatgtgaagtcgaaaaggagatagctctcctcaaggcccaacatgagcaatatgtggcagaagcggaggaaaagctacagcgagctaggctgctcgtggagtccgtgcggaaggaaaaggtggacctgtctaatcagttggaagaggagaggaggaaggtggaggatcttcaatttcgggtggaggaggaatccataacaaagggggatttagagacacagacccagttagagcacgcacgaatcggcgaattggagcagtccctcttgctggaaaaggctcaggccgagaggctgttgcgcgaactggctgacaacaggctcacgaccgtggcagaaaagtcgcgggtcctgcagctggaggaagaacttactctgagaaggggagagatcgaagaactccagcagtgcttgttgcactctggccctccacctcccgatcatccagacgcggcggagatcctgagactccgggaaagactgctatccgcctctaaggagcatcaaagggaaagtggggtgctgagggacaagtacgagaaagcactgaaagcataccaggcggaagtggacaagctccgcgccgcgaacgaaaagtatgcgcaagaagtcgccggtcttaaggacaaagtgcagcaggctacttcggagaatatgggccttatggataactggaaatccaagctggactctctagcctccgaccaccaaaagtcactggaggacctgaaggcgacattgaatagcgggcctggagctcaacagaaagaaatcggggagttaaaggcagtgatggaagggatcaaaatggagcatcagctcgaactgggcaacttgcaagccaagcatgacctggagacggctatgcacgtaaaggagaaagaggccctgagagagaagctgcaagaggcacaggaggaactggcaggtctgcaaaggcactggagggcccagttggaagtgcaggcgagccagcaccggttagaattgcaggaagcacaggatcagcggcgggatgcggaactccgagttcacgaactggagaaactagacgtggaatacagaggacaggcgcaggctatcgagtttctaaaagaacagattagcttggcggagaagaagatgctagattacgagagactgcagcgtgcagaggcacaaggaaaacaggaggtcgagtccctgcgagagaaactgctggtggccgaaaaccgcctgcaggcagtcgaagccttgtgtagcagtcaacacactcatatgattgagagcaatgatatcagtgaggaaaccatcagaacaaaagagacagtcgagggcttacaggataaacttaataaacgggataaagaggtcacagctttaacctctcagactgaaatgcttagggctcaggtcagtgctttggaatcaaaatgcaagagcggggagaagaaggtcgacgcactgctgaaggaaaaaaggagactggaggccgagctggaaaccgtttcccggaagactcacgacgccagtggccaactagtgctcatatctcaggaactgcttagaaaggaacgcagcctcaacgaattgagagtgcttctactcgaagcaaacagacacagtccaggacccgagagggacctttcacgcgaggtgcataaggcagagtggagaattaaggagcaaaagctcaaggatgacatccgaggcctgcgtgagaaattaacaggtcttgataaagagaagagtcttagcgatcagagaagatattccctgattgacaggtcctctgctccagaactcttgcgtctgcagcaccagttgatgtcaaccgaggatgcactgagagacgccctcgaccaggctcagcaggtggagaagttaatggaggctatgcgctcttgtcccgataaggcacagaccatcggcaactccggatctgccaacggtattcaccagcaggacaaggctcagaagcaggaggacaaacactag

SEQ ID NO: 25794 - DNA, 1800 bp, synthetic construct
  misc_feature 1..1800: note = Description of Artificial Sequence: Synthetic coding sequence
  source 1..1800: mol_type = other DNA
atgagccggagcctgctgctgtggttcctgctgttcctgctgctgctgccaccattgccagtgctcctagcagatcctggcgctccaactccagtgaacccttgctgctactatccctgtcagcatcagggaatctgcgtgcgcttcgggctggacagatatcagtgcgactgcacgaggacaggatattcagggcccaattgtaccattccgggcctgtggacatggctgagaaacagcttacgaccgagtccaagtttcacccacttcctgcttactcacggacggtggttctgggaattcgtgaatgcgacctttatcagggaaatgctgatgcgcctggtgttaacagtacgcagcaacctgatccccagtccccccacatacaactccgctcacgactacatctcctgggagagcttctccaatgtgagctactatacgagaattttaccctccgtgccaaaggattgtcctaccccgatgggtaccaagggcaaaaaacaactcccagacgcccaactgttggcgcgcagattcttactccgtcgcaaatttatcccagacccccagggaaccaacctcatgtttgcattttttgcccagcacttcacacaccaattcttcaagacctcagggaagatgggtccaggttttactaaggcccttggtcacggggtagatctaggccatatctacggtgataaccttgaaaggcaataccagctgcgcctgtttaaagacgggaaattgaaataccaggtactggacggggaaatgtatccacctagcgtggaagaggcccccgtgttgatgcattaccccagagggatccctccccagagccagatggcagttggccaggaagtctttgggctcctccctggcctgatgctgtacgcaactttgtggctgcgagagcacaatcgcgtctgcgacttattgaaggctgaacatcccacctggggagacgagcaactcttccagaccacaagattgatattgatcggtgagactatcaagattgtgatagaggagtacgttcaacagctctccggatattttctgcagctgaagtttgatcccgaattactgttcggtgtgcagtttcagtacaggaaccgcatcgctatggaattcaaccatctgtatcattggcatcctctaatgccagattccttcaaggtggggagccaggaatactcttacgagcaatttttattcaatacttctatgctcgtggactacggtgttgaggccctggttgatgctttcagccgccagatcgcaggcaggattggcggaggccgaaacatggaccatcacatcttacatgtggcagtggacgtgatccgagaatcccgagagatgcgtctgcaaccatttaacgagtaccgcaaaaggttcggaatgaaaccttatacaagctttcaggaacttgtgggcgagaaagaaatggccgctgagttggaagaactatatggcgatatcgatgcactggaattctatcctgggcttcttctcgagaagtgtcatcccaactcaatctttggtgaatctatgatcgagattggggcccctttctccctgaaggggctgctggggaaccctatttgtagtcctgagtattggaaacctagcacatttggaggagaggtgggctttaatatagtgaaaacagctacgctgaagaaattggtgtgtctcaacactaagacatgcccctatgtctctttcagagtgccggacgcgtcacaggatgacggccccgccgttgagcggccctcaacagagctttag

SEQ ID NO: 25795 - DNA, 1473 bp, synthetic construct
  misc_feature 1..1473: note = Description of Artificial Sequence: Synthetic coding sequence
  source 1..1473: mol_type = other DNA
atgctgatgcggctggtgctgaccgtgcggagcaacctgatcccctcccctcccacgtacaatagcgcccacgactatatttcttgggagtcattctcaaacgtaagttactatacccgcatcctgccgtctgtccctaaggattgtccgaccccaatgggcaccaaaggcaagaagcagctgcctgatgcacaattgcttgcacgccgttttctgctcaggagaaagttcattcccgacccccagggaacaaatttgatgttcgccttctttgctcagcactttactcatcagttctttaaaacgtctggcaagatggggccggggttcaccaaggccctgggccacggggttgatcttggccatatctacggagacaacctggagcgacagtatcagctccgcctgtttaaggatgggaagctaaagtatcaggtgcttgacggtgagatgtatcctccttccgtggaggaagcgccagtgctcatgcactacccccggggtattcccccacagagccagatggccgttggtcaggaggtcttcggcttgctccccggtctgatgctctacgctacattgtggctgcgggaacataaccgggtctgcgatttgctgaaggccgagcatcctacttggggggacgagcagctgttccagaccaccaggctgatcttgataggtgaaaccataaagattgtgatcgaagaatatgtgcagcaactgagcggatactttttgcagctcaaattcgatccagagctgttgtttggagtgcaattccaatacagaaatcgtattgccatggagttcaaccacctgtaccactggcatcccttaatgcccgatagttttaaagtcggttcccaggagtatagttacgaacagtttctgttcaatacatctatgctggtggactacggggtggaagcactcgtcgacgctttcagtcgacagatagcaggccgcatcggaggaggccgaaacatggatcaccacattctgcacgtggcggtagacgtgatacgcgagtcccgcgagatgaggctacagcccttcaacgaatatcggaaacgctttggcatgaaaccctacaccagctttcaggaactcgtgggagaaaaagagatggctgcagagttagaggaactttacggcgacatcgacgctctggagttctaccctggtctgttgctcgaaaagtgccatcccaattcaatcttcggggagagtatgatcgaaattggcgcacccttcagtttaaaaggtttactgggaaacccaatctgtagccctgagtactggaagcccagcacgttcggtggcgaggtagggttcaacatcgtgaagactgcgactttgaagaagcttgtgtgtcttaatacaaagacatgtccctacgtctctttcagggtcccggacgcaagtcaggacgatgggcctgctgttgaaaggcccagcacagaactctag

SEQ ID NO: 25796 - DNA, 471 bp, synthetic construct
  misc_feature 1..471: note = Description of Artificial Sequence: Synthetic coding sequence
  source 1..471: mol_type = other DNA
agcctgctgctgtggttcctgctgttcctgctgctgctgccccccctgcccgttctcctagccgatcctggggctccaacgcccgccggactgtggacctggctgaggaatagcctcagaccgtccccgtcttttacgcacttcctactcactcatgggaggtggttctgggagtttgtgaacgccacctttatcagggaaatgcttatgcgcttagtactgaccgttcgcagcaatctgattccatccccccccacctataattcagcccacgactacatctcctgggagagcttcagtaacttcttcaagactagtggtaagatggggcccggttttactaaggctctgggccacggtgtcgacctaggacatatctatggcgacaatctcgaaaggcagtaccagctgagactgttcaaggatggaaagttaaagtaccaggtgctggacggcgaaatgtatccctag

SEQ ID NO: 25797 - DNA, 1614 bp, synthetic construct
  misc_feature 1..1614: note = Description of Artificial Sequence: Synthetic coding sequence
  source 1..1614: mol_type = other DNA
atgcggaagccccggctgatgaacccctgctgctactacccctgccaacatcaggggatctgcgtaagatttggactggatcgatatcaatgtgactgcacccgtactggatattcaggacccaactgtactatccctgggctctggacgtggctgcggaattcattgagacccagtccgtccttcacccactttctcctaacacatggcaggtggttctgggaatttgtgaacgcaacttttatccgcgagatgcttatgaggcttgtgctaactgttaggagtaatctgatcccctcccccccaacctataacagcgcacacgactacattagttgggaaagcttctctaacgtcagctattacaccagaattctgcccagcgttccgaaggactgccctacaccaatggggaccaaaggaaagaaacagctgcctgacgctcagttactggcacgccgctttttacttcgccgaaaatttatccctgacccccaaggtacaaacttgatgtttgcttttttcgcccagcattttactcatcaattttttaagacctcggggaagatgggacctggatttaccaaagccctgggccacggcgtggacctcggccacatctacggcgacaatcttgagcgccagtaccagcttcggttatttaaggatggaaagctcaaataccaggtgttggatggagaaatgtacccaccatctgtggaagaggctcctgtgctgatgcattaccccagaggcataccgccccagtcccaaatggctgtgggtcaggaggttttcgggttactccccggtttgatgctgtacgccactctgtggctgagggagcacaatcgagtctgcgacctactgaaggctgaacatcccacctggggcgacgaacagctcttccagacgacgaggcttattctgattggagagaccatcaagatcgtgattgaagaatacgtacagcagttaagcgggtacttccttcagcttaagttcgacccagaactgctttttggtgtgcagttccaataccggaatcggattgctatggaattcaatcatctatatcattggcacccacttatgcccgattcattcaaaatcgggggtggccgcaatatggatcaccatattctgcacgtggctgtcgacgttatccgagagtctcgcgaaatgaggctgcaaccattcaacgagtatcgcaagcgtttcggtatgaaaccttacacctcattccaagagcttgtcggtgagaaggagatggccgccgaactggaggagctttatggggatatcgacgccctggagttttaccccgggttgcttctggagaagtgccatccaaattcaattttcggtgagtcaatgatcgaaattggtgcccctttctctctgaagggactgctaggcaaccctatttgcagccccgagtattggaagccctccacattcgggggggaggttggattcaatatcgtgaagaccgctactctcaagaaactcgtgtgtcttaatactaaaacttgcccatatgttagcttccgcgtgcccgacgccagccaggacgatggacctgccgtggagcggccttctacagagctgtag

SEQ ID NO: 25798 - DNA, 1815 bp, synthetic construct
  misc_feature 1..1815: note = Description of Artificial Sequence: Synthetic coding sequence
  source 1..1815: mol_type = other DNA
atgctggcccgggccctgctgctgtgcgccgtgctggccctgagccacactgccaatccctgctgttcacatccttgccagaatcgcggcgtgtgtatgagcgtcgggttcgaccagtataagtgcgactgcaccagaaccgggttttacggagagaactgctcgacacctgagtttttaacccgaatcaagctttttcttaaacccactcccaacacagtacattacattctcactcatttcaaggggttctggaatgtcgttaataatatcccatttctcaggaatgctattatgtcttacgtcctgacctctcgaagccacctgatcgatagtccccccacctacaatgcagattatggatataagtcttgggaagcttttagtaacttgtcctattatacacgggccttacctccggttcctgacgactgcccgacacctctgggcgtgaagggtaagaaacagctgccggactccaatgagatcgtagagaagctgttacttagaaggaaattcattccggacccccagggcagcaatatgatgtttgcttttttcgcacagcacttcactcaccaattcttcaagacagaccataaacgaggtcccgctttcaccaacggcctgggtcacggcgtagacttgaatcatatctatggcgagaccctggcaagacagagaaagctgcggttgttcaaggacggtaagatgaagtaccagattatcgatggggagatgtatccccccactgtgaaagacactcaggctgagatgatctatccgccccaggttcccgagcatcttaggtttgcagtggggcaggaagtgttcggacttgttcccggacttatgatgtacgccacaatttggctgcgggagcataaccgagtctgtgacgtgttaaaacaggaacaccctgagtggggagacgagcagttatttcaaaccagtcgcctcatcctgatcggagaaaccattaagatcgttatagaggactacgtgcagcacctgtcaggttaccactttaagctaaagtttgatcccgagcttctgttcaataagcagtttcaatatcagaaccggatcgctgccgagtttaatacactttaccactggcatccgcttctccctgatactttccaaatacacgaccagaaatacaactatcagcagttcatttacaataattcgatactgctggaacatggcataacacaatttgtggagtctttcacaaggcagattgccggcagagtcgctggcggaagaaacgtgcctcccgctgtgcaaaaagtctcccaagccagcattgaccagtcgcgccagatgaagtaccaaagctttaatgaatatagaaagaggttcatgttgaagccatatgaaagctttgaagaactgaccggggagaaggagatgagtgctgagttagaggcactctacggggatattgatgcggtggaactgtacccagcattgctggtggagaaacctaggcccgacgctatctttggagaaactatggttgaggtgggagctccatttagtctgaaaggcctgatgggtaacgtcatctgtagccctgcatattggaagccaagcaccttcggtggcgaggtggggtttcagataataaatacagccagtattcaatccttaatctgtaacaatgtgaagggttgccccttcacttccttctcagtccctgatcccgagctcatcaagaccgtcaccatcaacgcttcttcaagccgcagcggccttgatgacattaatccaactgtgcttctgaaagagcgttcaacagagctgtag

SEQ ID NO: 25799 - DNA, 1614 bp, synthetic construct
  misc_feature 1..1614: note = Description of Artificial Sequence: Synthetic coding sequence
  source 1..1614: mol_type = other DNA
agcctggtgcccgccaccaactacatctacacccccctgaaccagttaaagggaggtaccattgtcaacgtttatggtgtcgtgaagtttttcaagccaccctacttgagcaaaggaacggactactgcagtgtggtcaccatcgtggatcagaccaacgtgaaattgacttgcctcttgttctcaggcaactatgaagccctccccataatctacaagaatggggatattgtacggttccaccggttgaagatacaagtctacaaaaaggaaacccaggggatcacaagctccggattcgcttctctgaccttcgagggaaccttaggtgcacccatcatacctcggacctctagcaaatactttaatttcaccacagaggatcacaagatggttgaggctttgcgcgtgtgggcttccacacacatgagcccctcttggaccctgctgaaactatgtgacgtacagccaatgcagtactttgacctgacttgtcaactgctgggcaaagcagaggtggatggtgcaagttttctgttaaaagtatgggatggcacccgaacccccttcccatcctggagggtcttgatccaggacttagtgcttgaaggagatttatctcatatccaccggctgcagaacctaactattgatattctggtgtatgacaatcacgtccacgtggctagatcactcaaggtgggctcatttcttaggatctattctctgcacaccaagttgcaatcgatgaacagtgaaaaccagacaatgctgagcctggagttccacctccacgggggcacaagttatgggaggggtataagggttctacccgaaagtaattctgatgtagaccagctgaaaaaggatttggagtccgcaaacctaaccgctaatcaacatagcgacgtgatctgtcagagcgaaccagatgacagttttccttcctcggggtctgtgagtctgtacgaggtcgaacgatgccagcagttgagcgcaaccatcctcaccgaccatcagtatctcgagagaacgccactgtgtgctatactgaagcaaaaggctccacagcagtacagaattcgtgcaaaactacgcagctacaaaccccggcggctctttcagagtgttaagctgcactgtcctaagtgccacctcttacaggaagtgccccatgagggggatctagacatcatcttccaagatggcgccactaaaacgcccgatgtgaagcttcagaacaccagtctgtacgattcaaagatctggaccactaagaaccagaaaggtcgaaaggtagccgtacactttgtaaagaacaacgggatccttcccctttccaatgagtgtctcctcttgatcgaaggcgggactctgagcgagatctgtaagctgagtaacaaattcaattccgtgattcccgtgagaagtgggcacgaggacttggagctcctggatctctctgcgccttttctaatacaaggaacaatccaccactatgggtgtaaacagtgctcctctttgcgcagcatacagaatctcaatagcttggtggacaagacttcctggatcccatcatcagtggccgaggagctggacatcgtactgcagtag

SEQ ID NO: 25800 - DNA, 1905 bp, synthetic construct
  misc_feature 1..1905: note = Description of Artificial Sequence: Synthetic coding sequence
  source 1..1905: mol_type = other DNA
atgagcctggtgcccgccaccaactacatctacacccccctgaaccagttgaagggtggcacaatcgtgaacgtctatggggtggtcaagttttttaagcccccctacctatctaagggcactgactactgctctgttgtgaccattgtggaccaaacgaacgtaaaattgacttgcctgctgttcagtggcaattatgaagccttgcctataatttataaaaatggagacatcgtgaggttccacagactcaagattcaagtgtacaagaaggagacccagggcatcaccagctcgggatttgctagcctgaccttcgagggtactctgggtgctccaatcatacccagaacctcttccaaatactttaatttcaccactgaggatcacaaaatggtggaggcattacgtgtctgggcgtctacccatatgagccctagttggactctgctaaagttgtgcgatgttcagcctatgcaatacttcgatctcacatgtcagctcctgggtaaggccgaggtcgacggcgcatccttcctccttaaggtctgggatggcacacgcaccccattcccaagctggcgagttcttattcaagacctagtcctggagggggatctttcacacatccaccggcttcaaaatctgacaatagacatacttgtatatgacaatcacgtgcatgtagctaggagccttaaagttggatcgttcctccgcatttattctctccataccaagttgcagtcaatgaactcggagaatcagaccatgctatccctggagtttcacctgcatgggggaacaagttatggacgtggcatccgcgtgctccccgaatcaaacagtgatgttgaccagctgaagaaggatttagagagcgccaatttgacagcgaatcaacattctgacgtgatatgtcagtccgaaccagatgacagcttcccatcatctgggtccgtaagtctgtacgaagttgaaagatgtcagcagctcagcgcaactatactaaccgaccaccagtacttagaacgaactcctctctgtgccattttgaaacagaaagccccccagcagtatagaatcagagctaaactcagatcctacaaacctcggagactgttccagtcagtcaaactgcattgccccaagtgtcacctgctgcaggaggttccccacgaaggagatttggatatcatttttcaggacggggcaactaagacacctgacgttaagttgcagaatacttctctttatgactccaagatctggacaactaagaaccagaaaggtaggaaagtggccgtacacttcgtgaaaaataacggtatcctgccattgagtaacgagtgtctgttacttatcgaaggcggcactttatcagaaatctgtaagctcagtaataagttcaatagcgtgatccccgtgcgatcagggcatgaagacttagaactgttagacctgagtgctccgttcctgatacaggggacaattcatcactatggttgtaagcagtgcagtagtttaagaagcatacagaacttgaacagtctcgttgacaaaacgagctggatccccagttcagttgccgaggcccttgggattgtgccgctgcagtatgtgttcgtcatgacattcacactggacgatggaacgggcgtgctcgaagcatatcttatggacagcgataagttttttcagattcccgctagcgaggtgttaatggacgatgacttgcaaaaatccgtggacatgatcatggatatgttttgccccccaggaattaaaattgatgcatatccctggctggagtgttttattaagtcctataacgtgactaatggtactgacaaccagatatgttatcagattttcgatacgacagttgccgaagacgtcatttag

SEQ ID NO: 25801 - DNA, 1023 bp, synthetic construct
  misc_feature 1..1023: note = Description of Artificial Sequence: Synthetic coding sequence
  source 1..1023: mol_type = other DNA
ctgagcctggtgcccgccaccaactacatctacacccccctgaaccagctgaaaggaggcactatcgtgaacgtgtatggtgtggtgaagttttttaaacctccttacctctcgaaagggactgactactgctctgtggtgacaatcgtggatcaaactaacgtcaaactaacctgtctgttgttttctggcaattacgaggcactgccgattatctataaaaatggcgatatcgtaaggttccatcgattgaagatacaagtttataagaaggaaactcaggggataacttcgtctggtttcgctagcctcaccttcgagggtacactgggagcacccattatccctcggacttcatctaagtactttaacttcaccacagaagaccacaaaatggtggaggccctcagggtctgggccagcacgcacatgtcaccaagttggaccctcctgaagctttgcgacgtccaacctatgcagtatttcgaccttacgtgccagttactgggcaaggccgaggtggacggggctagcttcctcctcaaggtttgggatggcactcgtaccccattcccttcttggagagtcctaattcaggacctcgtgctggaaggggatctgagccacatccatcgcctgcagaatctcacgatagacatccttgtttacgacaaccacgtgcacgtcgctcggagcctaaaggtaggatcctttctaaggatctattccctgcacaccaaactgcagtcaatgaacagcgagaaccaaactatgctgagcctcgagttccacctgcatggtgggaccagttatggcagaggcattagagtcctaccagaatccaacagcgacgtcgaccaattgaaaaaggatctggaatcggccaatctcacagccaaccagcactctgatgtgatctgtcagagcgagccagacgactccttcccaaacggagtgtccctccgcccgcccggatggtcctccgtggcaagaagtcggctcatcgctgcctctacttcctag

SEQ ID NO: 25802 - DNA, 1512 bp, synthetic construct
  misc_feature 1..1512: note = Description of Artificial Sequence: Synthetic coding sequence
  source 1..1512: mol_type = other DNA
atggtggaggccctgcgggtgtgggccagcacccacatgagcccctcatggacattattaaagttatgcgatgtccagccaatgcagtacttcgacctcacttgtcagttattgggcaaggctgaagttgatggagcctcattcctgcttaaagtctgggatgggaccaggaccccattccccagctggcgggtccttatacaagatctcgtcttggaaggcgacctgtctcacatccatcgcttacagaacttgactatcgacatcctcgtttatgataatcacgtccatgttgcaaggagcctgaaggtagggtcctttctccgaatttatagcctccatactaaactgcagtcaatgaacagtgagaatcagacaatgttaagcctggagttccacttgcatggaggcacatcatacggcaggggaattagagtgctccccgagtccaacagtgatgtcgatcaactcaaaaaagacttggaatccgcgaacctgaccgcaaatcagcactcagacgtgatctgtcagagcgagccagatgacagcttcccgagctcaggatcagtgagtttatacgaggtggaaagatgccagcagttatctgctacaattttaactgatcaccagtatctggagcgcaccccgctttgcgctatcctgaagcagaaggcccctcaacagtacagaattcgagcaaaactgagatcatacaaaccaagacggctgttccagagcgtgaagttgcactgccccaagtgccatctactgcaggaagttcctcacgagggcgaccttgacatcatcttccaggacggggcaacaaagacaccagatgtgaagctccagaacacatcattgtacgatagtaagatttggacgacaaaaaaccagaaggggaggaaagtggccgtgcacttcgtcaaaaataacggaatcctccctctgagcaatgagtgtctactgctgattgagggcgggactctaagcgaaatctgtaagctgagcaacaagttcaactccgtgattcctgttcgttccggacatgaagacctcgaactacttgacttatctgcaccattcctaatccagggaacgattcatcattatggctgtaagcagtgtagttcgcttcgctcaattcagaacctcaatagcctggttgataaaactagctggattccttcgagtgtcgcagaggctttgggaatagttccgctgcagtatgtgtttgtgatgacatttaccctggatgacggtaccggagtgttggaggcctacctgatggattctgacaagttcttccagattcccgctagcgaagtgctcatggacgacgacctccagaaatccgtcgacatgatcatggacatgttctgtccccctggtatcaaaattgacgcttatccatggctagagtgctttattaagagttacaatgtgacaaatgggaccgataatcagatctgctaccagatcttcgatacaacagtagctgaggacgtaatatag

SEQ ID NO: 25803 - DNA, 1380 bp, synthetic construct
  misc_feature 1..1380: note = Description of Artificial Sequence: Synthetic coding sequence
  source 1..1380: mol_type = other DNA
ctgagcctggtgcccgccaccaactacatctacacccccctgaaccagctgaaagggggtacgatcgttaatgtttacggtgttgtcaagttcttcaagcccccttatctgtctaaggggacagattactgctccgtggttaccatcgtggatcagacgaacgttaagcttacttgcttactgttcagcgggaactacgaggccttgcctattatctacaagaacggcgatatcgtccggttccaccgcctgaaaatccaagtctataagaaagagactcagggtattaccagttccggcttcgcctctctgacattcgagggcaccctgggcgctccaatcatccctcgaacttcaagcaaatactttaactttacaacagaggatcataagatggtggaggccctgcgagtgtgggcctccacgcatatgtctccctcatggacactacttaaactgtgtgatgtgcaacctatgcagtactttgacttaacctgccagctgttgggaaaggctgaagtggatggcgcgtcattcctgctgaaagtgtgggatggaactaggacccccttcccaagctggcgggtgctcatacaggatctggtgctggagggtgatctttctcacattcaccgcttgcagaaccttaccattgacattctagtgtacgacaatcacgtgcacgtggcgagaagtctgaaggtcggaagctttcttaggatttacagtctgcacacaaagctgcagtccatgaattctgaaaaccagacaatgctgagtttagaattccacctgcacggaggcacatcctatggccgcggcattcgggtcctgcctgaaagcaactctgacgtggatcagctaaagaaagacctagaaagcgcaaacctaacggcgaatcaacattctgacgtgatctgccaaagtgagcctgacgacagcttcccttcatccggcagtgttagtctgtacgaggtggagcgttgtcagcagctgtccgcgactatcttgacagatcaccagtatctagaacgtactcctctctgcgccatattaaagcagaaagctcctcagcagtaccgaattagggcgaagctgcggagctataagcctagaaggttgttccagagcgtgaagcttcactgccccaaatgtcacctattacaagaagtgccgcatgagggagacctggatatcatctttcaagacggcgccacgaagacccccgacgtaaagctgcagaacacttctctctacgactccaagatttggaccactaagaaccaaaaggggcggaaggtagccgtacacttcgttaagaacaatgggatactcccattaagcaatgagtgtctactgctcatcgaagtgttgctatag

SEQ ID NO: 25804 - DNA, 249 bp, synthetic construct
  misc_feature 1..249: note = Description of Artificial Sequence: Synthetic coding sequence
  source 1..249: mol_type = other DNA
atgagcctggtgcccgccaccaactacatctacacccccctgaaccagctgaaggggggcactatcgtgaacgtctacggcgtagtcaagttttttaaacctccttatctgagtaaaggcacggattactgctcagtagtgaccatagtggaccagactaatgtcaaactcacgtgcttgctgtttagtggcaactacgaggccttgcccatcatttataagaatggagacatcgtgaggttccactag

SEQ ID NO: 25805 - DNA, 1557 bp, synthetic construct
  misc_feature 1..1557: note = Description of Artificial Sequence: Synthetic coding sequence
  source 1..1557: mol_type = other DNA
ctgagcctggtgcccgccaccaactacatctacacccccctgaaccagctgaaaggaggaacgatcgtcaacgtttacggagtggtcaaattcttcaagcctccgtacctgtctaaaggcaccgactactgctccgtggtgaccatcgtcgatcagacaaatgtcaaacttacctgtctcttattttccggtaactacgaggcgctgcccatcatctataagaacggtgacattgtcagatttcataggctcaagatccaggtgtacaagaaggagacacaaggaataacgagctccggattcgctagcctcaccttcgaaggcaccttgggagcacccatcatcccccggaccagcagtaaatacttcaatttcaccacggaagatcacaaaatggtcgaggctctaagagtttgggctagtactcacatgtctccatcctggactcttctgaagctctgtgacgttcaacctatgcagtacttcgacctgacctgccagctcctgggcaaagccgaggtagacggggcttcctttctcctgaaagtgtgggacggcacccggactccttttccatcttggagggtgctgatccaggatctcgtgctcgagggtgacttgagccatatccacaggctgcaaaacctgacgattgacatcctcgtgtacgataatcatgttcatgtggcccgaagccttaaagtcggcagtttccttcggatttactcccttcacacgaagctccagtcaatgaatagcgaaaaccagaccatgctctcactagaatttcacttacatggtggtacttcctacgggagggggatccgagtattacccgagagtaatagtgacgtcgatcagctgaagaaagacctcgaaagcgccaacctcacagcgaaccaacattccgacgtgatttgtcagtccgagccagatgatagcttcccatccagcgggagtgtcagtctgtacgaggtagaacggtgtcagcagttatccgcaaccattttaaccgaccatcaatatctcgaaaggacccccctgtgcgcgatcctgaagcagaaagccccccagcagtatcgcattagagccaaactgagaagctacaagccacgaagactcttccaatcggtgaaactgcattgccccaaatgtcacctgctgcaagaggtcccgcatgaaggagatctcgacattatctttcaggacggtgccacgaagaccccagacgtgaaactccaaaatacatccctgtacgacagcaaaatttggaccacaaagaaccaaaaggggcgaaaagtcgcggtccatttcgtaaaaaacaacggcatccttccactgagcaacgagtgcttactgctgatcgaggggggtaccctctccgagatatgtaagctctccaacaagttcaattctgtgatccctgtgcgctcaggccacgaagatctggagctgctggatttatctgcacccttcctcattcaggggacaattcaccactatgggacgggctactgtaccccaccaatctgtgtgtgttatgacctgtatacctag

SEQ ID NO: 25806 - DNA, 1374 bp, synthetic construct
  misc_feature 1..1374: note = Description of Artificial Sequence: Synthetic coding sequence
  source 1..1374: mol_type = other DNA
agccccgaggacccccggagcaagcacaagttcaagatccacacctacggatctcctactttctgtgaccactgcggttctttactgtatggcttgatacaccagggcatgaaatgtgacacctgcgacatgaacgtccacaaacagtgtgtcattaatgtgccaagtctctgtggcatggaccacactgagaaacgaggacgcatctaccttaaagccgaagttgctgacgaaaagctgcatgtcaccgttcgcgatgccaagaatcttatccctatggatcccaatggactcagtgatccctacgtcaagcttaaacttatccccgacccaaagaacgagagcaaacaaaagaccaaaactattcggtccaccctgaatccacagtggaatgaatctttcacttttaagctgaaaccctcggataaggatcggcggctcagtgtggaaatctgggattgggatcgcaccaccagaaatgactttatgggatctctctcttttggggtgtctgaacttatgaaaatgcctgcaagcggttggtacaagttgttgaatcaagaagagggggaatactacaatgtcccaattcctgagggcgatgaggaaggcaatatggaactgaggcagaaatttgagaaagcaaaactgggccccgctgggaataaagtcatcagcccgtcagaagaccgtaaacagccctccaacaacctcgatagagttaaactgacagactttaactttctcatggtactcggcaagggcagttttggaaaggtgatgctggcagaccgcaaaggcaccgaggagctctacgctattaagatccttaagaaagacgtggtaatccaggacgacgatgtggaatgtactatggtggagaagagagttctagccttactcgacaaaccgccctttctcacgcagcttcattcgtgctttcagaccgtggatcgactgtactttgtgatggaatacgtcaatggaggcgacctgatgtaccatattcaacaagtgggtaagtttaaggaaccgcaggctgtgttttatgctgccgaaatttcaatcggcttattttttcttcataagagagggattatctacagagacctcaagctcgacaacgtgatgctcgattccgaagggcatattaagatcgcagatttcggtatgtgtaaagagcatatgatggatggcgtgaccaccagaaccttctgtggcactcctgattacatcgctcccgaaattatcgcttaccaaccttacgggaagtccgtagattggtgggcctacggggtcctgttgtacgagatgttggctgggcaggtgatgttttgttacatctttatgttcgtatattgctgcgtgatgtag

SEQ ID NO: 25807 - DNA, 2019 bp, synthetic construct
  misc_feature 1..2019: note = Description of Artificial Sequence: Synthetic coding sequence
  source 1..2019: mol_type = other DNA
atggccgacgtgttccccggcaacgacagcaccgccagccaggacgttgccaatcggttcgcacgtaagggagcactgagacagaaaaacgtacacgaggttaaggaccacaaatttatagcacgattctttaagcagcccaccttttgctctcactgtactgactttatctggggcttcgggaagcaaggcttccagtgtcaggtgtgttgcttcgttgtgcataaaagatgtcacgagttcgtgactttttcttgtcctggtgctgataaggggccagatactgatgatccacggagcaaacacaaatttaagattcacacctacgggtcaccaactttttgtgatcattgtgggagccttctttacggcctcattcaccaggggatgaaatgtgacacctgtgatatgaacgtccacaagcaatgtgtgattaacgtaccctctctatgcggcatggatcatacggaaaagaggggccgtatttacttgaaagcagaagtcgccgatgagaaactacatgttacagtcagagacgcaaaaaatctgattcctatggatccgaatggactgtccgacccatacgtgaaattgaaattgataccagatccaaagaacgagtccaagcagaagactaagacaattagatccaccctcaaccctcagtggaacgaaagttttaccttcaaacttaaacctagtgataaggacagacggctgagtgtggaaatctgggattgggaccggactacacgtaatgattttatggggtcattgtcttttggcgtgagcgagctcatgaagatgcctgcttcaggatggtataagctgctgaaccaggaggaaggcgagtattacaacgtcccaatccccgaaggagatgaagaggggaatatggagctgcgtcagaaatttgagaaagctaagctcggaccagcaggtaataaagtgatcagcccctctgaggatcgaaagcaaccctctaataacttagaccgggtcaagttaaccgacttcaacttccttatggtattgggcaagggttcattcggcaaagtgatgctggctgaccggaaaggaacagaagagctgtacgctatcaaaatcctgaaaaaggatgtggtcatccaggatgacgatgttgaatgcacaatggtcgagaagagagtgcttgccctgttggacaagcctccatttttgacacaactacacagctgttttcagacagttgatcggctttatttcgtgatggaatatgtaaatggtggggatttgatgtatcacattcaacaggtcggaaaattcaaagagcctcaggcagtcttttacgctgccgagatctccatcggactcttcttcttgcacaagagggggatcatctatcgtgatttgaagctcgataatgttatgcttgatagcgagggtcacataaagatcgccgacttcggaatgtgtaaagagcacatgatggatggtgtgaccacacgtaccttctgcgggactcccgactacatagctccagagatcatagcctatcaaccttatggcaaatccgtggactggtgggcctatggggtcctgctctacgagatgctggcaggacagccgccattcgacggcgaggatgaagacgagctattccagagcattatggagcataatgtgagttatccaaaatccctgagcaaggaagccgtcagcgtctgcaagggcttgatgaccaagcatcccgctaagaggctgggctgcggcccggagggtgaaagggatgtcagagagcacgcctttttcaggcgtatcgattgggaaaaactggaaaatcgtgagatccagccgccattcaagcccaaggtgtgtggcaagggagcggagaacttcgataaattcttcacccgcggccagcccgtgctcacccccccagatcaactcgtaattgctaatatcgatcaatctgatttcgaggggtttagttacgtcaacccccaattcgtacatcccattttgcagagcgcggtttag

SEQ ID NO: 25808 - DNA, 2022 bp, synthetic construct
  misc_feature 1..2022: note = Description of Artificial Sequence: Synthetic coding sequence
  source 1..2022: mol_type = other DNA
atggccgaccccgccgccggccccccccccagcgagggcgaggagagtaccgttcggttcgctaggaagggggcactgaggcagaagaacgttcacgaagtgaagaaccacaaatttacagctaggttctttaaacaacctaccttctgttcccattgtaccgatttcatctggggctttggcaaacagggctttcagtgtcaagtttgctgcttcgttgtgcataagcgctgccacgaatttgtcacattcagttgtcctggcgcagacaagggtccagccagtgatgatccacggtcaaagcacaaattcaagatccacacttactctagtcccaccttttgcgatcactgtggatccctactctacggcctgattcatcagggtatgaaatgtgacacttgtatgatgaatgtgcacaaaagatgcgtcatgaacgtgcctagtctgtgtggtactgatcacactgaaaggagagggaggatctatatccaggcacacatcgacagagatgtattgattgtcttggttagggatgctaagaatttggttcccatggatcctaacggactgtcagacccatacgtcaaactcaaattaattcctgatccgaagtcggagagcaagcagaaaacaaaaactattaagtgcagcttgaatcctgagtggaacgaaacttttaggttccaactcaaggaaagcgacaaagatcgccgactctccgttgagatctgggactgggacctgacttccagaaacgatttcatggggtccctcagcttcgggatatccgagttgcagaaagctagtgtagatggatggttcaagctgctctcacaggaagagggtgaatactttaatgtgccggtgccgcctgagggaagcgaggccaatgaagagctgaggcaaaagtttgagcgggcaaaaatcagccaagggacaaaggtgccggaagagaagaccaccaacacagtctcaaagttcgataataatgggaatcgtgaccggatgaagttgactgactttaacttcttaatggtgcttggcaaagggtcatttgggaaggtaatgcttagtgaacgtaagggtacagacgaactctacgcggtcaagatcctgaagaaagacgtggttatacaagatgacgacgtagaatgtacaatggtggagaagcgagtgctggctttacccgggaagccgccctttctcacacagctgcattcttgctttcagaccatggaccgtctgtacttcgtaatggaatatgttaatggaggtgacctgatgtatcacatacaacaggtgggccgtttcaaggagcctcacgcagtcttctatgccgccgagatcgcaatcggcctgtttttcctgcagagcaaagggattatttatagagatttgaaactcgataatgtgatgctggacagcgaaggacacatcaaaatcgcagacttcggcatgtgtaaagagaacatatgggacggcgttaccactaaaacgttttgcggcactcccgactacattgctccggaaattattgcctaccagccctacggcaagagcgtggactggtgggctttcggcgtgttactgtacgagatgctcgcaggacaggccccttttgaaggcgaggacgaagatgaattattccagtctatcatggagcataatgtagcctaccccaaatcgatgtccaaagaagcagtggcgatctgcaaaggcctgatgactaagcaccctgggaaacggcttggctgcggccctgagggtgagagggatattaaggaacatgccttcttccggtatatcgattgggaaaaactggagagaaaagaaattcagcccccttacaagcccaaagcctgcgggcgaaatgccgagaacttcgataggttttttaccaggcaccctcctgtgttgacacccccggaccaggaagtgatccgaaacattgatcagagcgagtttgaaggattctcatttgtgaatagcgagttcctgaaacctgaggtgaagtcctag

SEQ ID NO: 25809 - DNA, 2016 bp, synthetic construct
  misc_feature 1..2016: note = Description of Artificial Sequence: Synthetic coding sequence
  source 1..2016: mol_type = other DNA
atggccgaccccgccgccggccccccccccagcgagggcgaggagtccacggttcgcttcgccaggaagggagccctgagacagaaaaacgtgcacgaggtgaaaaatcacaaatttactgctaggtttttcaaacaaccaaccttttgcagccactgtacagactttatatgggggtttggtaagcagggctttcagtgtcaggtatgttgcttcgtagtgcataaacggtgccatgagtttgtgacgttcagctgtccaggcgctgacaaaggacccgctagtgatgacccccgctctaagcacaagttcaagatccacacttactccagtccaactttctgcgaccactgcggcagcctactatacgggctgattcatcaggggatgaaatgtgacacatgtatgatgaacgtgcacaagcgctgcgtaatgaacgtacccagtttgtgtgggacggatcatacggagagaagagggagaatttacattcaggcccatattgatagggatgtgttgatcgtgttagtgagggatgcaaaaaaccttgtgcccatggaccccaatggcctctccgacccatacgtaaaattgaagctaatcccagatcccaaatccgagagcaaacagaaaactaagacgatcaagtgttcattaaacccagagtggaatgaaactttccgcttccaactgaaagagagcgacaaggacagacggctatcagtggagatctgggactgggatctgacgtcaaggaacgactttatggggagcctgtctttcggcattagcgaactgcagaaggcaagtgtcgatggatggttcaagctcctcagccaggaggagggcgagtatttcaacgtgccagtccctccagaagggagcgaagccaacgaggaactcagacagaaattcgagagagccaagatctcccagggcaccaaagtgcctgaagagaagacaaccaacacagtgtcgaagttcgacaataacggaaatcgcgatcgaatgaagttgaccgactttaactttttaatggtcttgggtaaaggatcattcggtaaggttatgctctcagaacggaagggaacagatgaactgtatgccgttaagatcctcaagaaagatgtggtgattcaagatgatgacgttgagtgtacgatggtggagaagagagtgctggccctgccgggaaagcctcctttcctcacccagctccactcctgctttcaaaccatggaccgactctatttcgttatggagtatgtgaatgggggggatctcatgtaccatatccaacaggttgggcggtttaaggagcctcatgccgtgttttacgctgccgaaattgccatcggcctgtttttcttacagagtaagggcatcatctaccgcgatttgaagctggacaatgtgatgttagactccgaaggacacatcaaaatagctgattttggaatgtgcaaggaaaacatttgggatggggtcaccactaagactttttgtggcactcctgactacattgccccagagattatcgcctaccaaccatatggcaagagcgtagattggtgggcgttcggcgtacttctgtatgagatgctggccggacaggctcccttcgagggcgaggacgaggacgagctgtttcagtctattatggaacacaatgtggcgtacccaaagagcatgtctaaagaagctgttgccatctgtaaaggccttatgacaaagcaccctggaaaaaggctgggctgtggtcctgagggggagcgtgatatcaaagaacatgccttctttaggtacatcgactgggagaaattggaaaggaaagagatccagcccccctacaagcccaaagcgcgagacaaacgggatacctctaattttgacaaagagtttactcggcagcccgtggagctgacacccacagacaagctgtttatcatgaatcttgaccagaacgagttcgccgggttctcctacaccaaccccgagttcgttattaatgtctag

SEQ ID NO: 25810 - DNA, 786 bp, synthetic construct
  misc_feature 1..786: note = Description of Artificial Sequence: Synthetic coding sequence
  source 1..786: mol_type = other DNA
atgcgggagagcgccctggagcggggccccgtgcccgaggcccccgccggaggaccggtacatgcggtgaccgtggtcactttgttggaaaagctggcatctatgctggagaccctgcgggagcgccaggggggtcttgccaggaggcagggtggtctggccggcagcgtcaggaggattcagagtggactgggggcgctgagcagatcgcatgacaccacttcgaatactctcgcacagctgcttgcaaaggccgagagagtctctagccacgctaatgcagcccaggagcgagcagtgcgccgggccgcgcaggtgcagagattagaggcgaaccacggcttgttagtcgctagggggaagctgcatgtactgctgttcaaggaggagggcgaagtaccggcatcagccttccagaaggccccagaaccactcggacctgccgatcagagcgagcttggtccggagcagctggaagccgaggttggcgagtcttccgacgaggaaccagttgagtcacgggcccagcgactcagacgtacgggtcttcaaaaagttcagtcgctaaggcgcgccctctccgggcgcaaagggcccgcggccccaccccccacacctgttaagccaccccggctcggtcctggccgtagcgcggaagcacagcctgaagcacaacctgccttggagccaactcttgagcctgagccaccgcaggacacggaggaggatcccggccgccctggagctgctgaagaggcgctgcttcagatggaatccgttgcatag

SEQ ID NO: 25811 - DNA, 2214 bp, synthetic construct
  misc_feature 1..2214: note = Description of Artificial Sequence: Synthetic coding sequence
  source 1..2214: mol_type = other DNA
atggtggtgttcaacggcctgctgaagatcaagatctgcgaggccgtctctctgaaacccacagcctggtccttacgacacgcagttggcccccgcccacagactttcctccttgatccatacattgcactgaatgttgatgacagcaggatcgggcaaaccgctacaaaacaaaaaacgaattcacctgcctggcacgacgaattcgtcaccgacgtctgtaatggccgtaaaatcgaactggccgtgttccatgatgcccccataggctacgatgacttcgtggcaaattgcaccattcagttcgaggagcttctgcagaacggcagccgtcacttcgaagattggattgatttggagcctgaaggaagggtgtacgtgataattgacctgagcgggtcctccggggaggctcccaaggacaacgaagaaagggtcttccgcgagcggatgagaccacggaagcgacaaggggcggttcggcggcgggtccatcaagtgaacggtcacaaatttatggcaacctacctgaggcagccaacctattgttcccactgtcgggacttcatatggggtgtgattggtaagcagggttaccagtgccaggtctgtacctgtgttgttcacaagagatgtcacgagctgattattacgaaatgcgcgggcctgaagaagcaagagactccggatcaggttggatcccaacgttttagtgtaaatatgccgcacaaattcggcatccataattataaagtgcctacgttctgtgatcactgcggttccctattgtgggggctgttacggcagggcttgcagtgtaaggtctgcaagatgaacgtgcatcgtcgatgtgagacaaacgttgccccaaattgcggggtcgatgccaggggcatcgcgaaagtgctggcagatctgggcgtcacccccgataagattacaaattcgggacagcggcgtaagaagcttattgcgggcgctgagtccccccagcctgcgtctggaagttccccgagtgaggaggacagatccaagagtgcccccacctctccctgtgatcaggaaatcaaagaactcgaaaataacatccggaaggcgctttcattcgacaatcgtggtgaagaacatcgggcagcaagtagtccagacggccaattgatgagtcccggtgagaatggcgaggttcggcagggacaagcaaaaagactgggactggatgagtttaatttcataaaggttctcggcaagggatcattcggtaaagtcatgttggcggagttaaaaggcaaggacgaggtgtacgcggtcaaggtgctgaagaaggatgtgattctgcaggatgacgacgttgattgcaccatgaccgagaagcggatcttagccctggcccgcaagcatccctatttaactcagctatactgttgctttcagacaaaagataggctgtttttcgtcatggaatatgttaatggaggggatctgatgtttcaaattcagagatctcgcaagttcgacgaaccaagaagcagattttatgcagccgaggtcactagtgctcttatgttcttgcaccagcacggcgtgatataccgcgacctaaagctggataacattttgctggatgcagaagggcattgtaaactagcagacttcggcatgtgcaaagaggggatcttaaacggtgtaacaaccacaactttttgcggcaccccagactacatcgctcctgaaatccttcaggaactggagtacggaccctccgtggattggtgggctctgggtgtgctcatgtacgagatgatggctggccagccaccctttgaagccgataacgaagacgatctcttcgagagcatcttacacgacgatgtcttataccccgtgtggcttagcaaggaggctgtctccatcctcaaagcattcatgactaaaaatcctcacaagaggttgggttgcgttgcaagccagaatggcgaagatgcaatcaaacaacatccattttttaaagagattgattgggtgttgctggagcagaagaaaatcaaaccacctttcaagccaaggattaagactaagcgcgacgtaaacaactttgaccaagatttcacccgcgaagagccagtgctgacactggtggacgaggcaatcgtgaagcagatcaaccaggaagagttcaaggggttttcttactttggggaggatcttatgccctag

SEQ ID NO: 25812 - DNA, 384 bp, synthetic construct
  misc_feature 1..384: note = Description of Artificial Sequence: Synthetic coding sequence
  source 1..384: mol_type = other DNA
atggtggtgttcaacggcctgctgaagatcaagatctgcgaggccgtgtcgttgaaaccaaccgcatggtcgctgaggcacgctgtcgggccacggccgcagacattcttactcgatccctatatagccctgaacgtggacgattcaagaatcggtcagacagctacaaagcagaagaccaacagcccagcttggcatgatgaattcgttaccgatgtgtgcaacgggcgaaagattgaactcgcagtatttcatgatgcacctatcggttatgacgactttgtcgctaactgtaccattcagttcgaagagctgctgcagaacggaagcaggcactttgaggattggattgacttggaacccgaagggagggtgtatgtctag

SEQ ID NO: 25813 - DNA, 2094 bp, synthetic construct
  misc_feature 1..2094: note = Description of Artificial Sequence: Synthetic coding sequence
  source 1..2094: mol_type = other DNA
atggccggcctgggccccggcgtgggcgacagcgagggcggccccaggccacttttttgccgcaaaggagctctcaggcagaaggtcgtccatgaagtgaagtcacataagtttaccgccagattcttcaaacagcccacattttgcagccactgtaccgatttcatctgggggattggcaagcagggcctccagtgccaggtttgcagctttgtggtgcacagacgctgccacgagttcgtgacattcgagtgtccgggtgcagggaaagggcctcagaccgacgacccacggaacaaacacaagttccgacttcattcatactcgtctcctactttctgtgatcactgtggctctctgctctacggattggtccaccaaggaatgaagtgtagctgctgtgaaatgaacgtgcatcggcggtgtgtaaggagcgtgccgtccctgtgcggggtggaccataccgagcgaagagggaggctgcagctcgagataagagccccaaccgccgacgaaatacatgtgaccgtgggggaagctcgaaatctgatcccgatggatcccaacggattatccgacccgtacgtgaaactcaaattaatcccagatcccaggaacctgactaagcagaaaacaaggacagtgaaagccactctgaatccagtctggaacgagactttcgtattcaatctgaaacccggcgacgttgagaggagacttagtgtagaagtgtgggactgggatcggacctcccgcaatgacttcatgggcgccatgagcttcggtgtgtccgagctgctgaaagcgcccgtcgatggctggtataagctgcttaaccaagaagagggagagtactataacgtccctgttgcagatgcagataattgctctttgcttcagaaattcgaagcctgtaattatcccttagaactctatgagcgagtaaggatgggtccttcctcatcccctattccctctcccagccccagcccaactgacccaaaaagatgcttctttggggcatcacccggccgtctccacatctccgattttagcttcctcatggtgttagggaaggggtcatttggaaaagtcatgctcgcagagagaagagggtccgatgagctgtacgccattaaaatcttgaaaaaggacgtcatcgtgcaagatgatgacgtagattgtaccctggtggagaaacgagtgctcgccctcggcgggaggggtccaggcggacggccgcacttcttaactcaattacactcaacgttccaaacccccgataggctgtactttgtgatggagtacgtgaccgggggcgacctaatgtaccatatccagcagctgggcaagtttaaagagccccatgctgccttctacgcagcagagatcgccatcggcctcttctttctccacaatcaagggattatatacagggacctcaagttggacaacgtcatgctcgatgccgagggacacatcaagatcaccgatttcggaatgtgtaaggagaacgtgtttccgggaactaccactcgcaccttttgcggaacccctgattatatcgcaccagaaatcatcgcctatcagccgtatggcaagagcgttgattggtggagcttcggggtgttgctctatgaaatgttggcggggcagcccccatttgatggagaggacgaagaggagctcttccaggctatcatggaacaaaccgtgacctaccccaagagcctctcgcgggaagctgttgctatctgtaagggatttctcactaaacaccccggaaagcgcctagggtctggccctgacggcgaacctacgattagggcacacggcttctttaggtggattgattgggagagactggagagattggagataccgccgccttttcggcctagaccttgtgggcgctcaggggaaaactttgataaatttttcacccgtgcagcccctgcactgactccccccgatcgtcttgtactggcctcaatcgaccaggcagatttccagggattcacttatgtgaacccggacttcgtgcatcccgatgcccggtccccaacgagcccagtcccggtgccagtgatgtag

SEQ ID NO: 25814 - DNA, 984 bp, synthetic construct
  misc_feature 1..984: note = Description of Artificial Sequence: Synthetic coding sequence
  source 1..984: mol_type = other DNA
atggccggcctgggccccggcgtgggcgacagcgagggcggccccaggcccctcttctgccggaagggggcacttcggcaaaaagtggtgcacgaagtaaaatctcacaagtttactgccaggtttttcaaacaacccacattttgcagccattgtaccgatttcatatggggcatcgggaagcaggggcttcaatgccaggtgtgttctttcgtggtgcataggcggtgtcacgagttcgtgacctttgaatgtcctggcgccggtaagggcccccaaacagatgatccaaggaacaagcacaagtttcggctccacagttacagcagtcccacattttgcgaccactgtggttccctgctttatgggctagtccatcaagggatgaagtgcagctgttgtgagatgaatgtgcatcgcaggtgcgttcgcagcgttcctagcctctgcggggtggaccacacagagcgacggggtcgcctgcaactcgagattcgcgctccaaccgccgatgagatccacgtgaccgttggtgaggccagaaatctgatccccatggatcccaacggcctgtcagatccctacgtcaagttgaaactcatacctgacccccgcaatctaacaaagcagaaaacccgaaccgtgaaggccacactgaacccggtctggaatgagaccttcgtcttcaatctgaagcctggagacgtggagcggagactatccgtcgaggtatgggactgggataggacttccagaaatgacttcatgggagctatgtccttcggggtgtccgaacttctgaaggcacccgtagacggttggttggttactacgccatggaattgtatgagcgggtgcggctgggcccccctgcctttgccctccccaccgttgcccctggtgcctcccacacctagtgcagcctctagcgggagggtccaggacgcctgcaccagcccaacgtcggcatcatcctggttctag

SEQ ID NO: 25815 - DNA, 2133 bp, synthetic construct
  misc_feature 1..2133: note = Description of Artificial Sequence: Synthetic coding sequence
  source 1..2133: mol_type = other DNA
atggccggcctgggccccggcgtgggcgacagcgagggcggccccagacctctgttttgtcgaaaaggtgcacttaggcaaaaggttgttcatgaggtgaagagccataaattcaccgcaaggttcttcaagcagccgacattctgctcccactgcactgacttcatctggggcatcggcaaacagggcctccagtgccaagtctgctctttcgtagtgcaccgccgctgtcatgagttcgtgaccttcgaatgtccaggagccggcaagggtccacagaccgacgatccgagaaataagcacaaatttcgattgcactcttatagctctcctacgttctgcgaccattgcggttctctcctgtatggattggtccaccagggcatgaagtgctcctgctgtgagatgaacgtgcaccgacgatgtgtgcgttccgtgccaagtttgtgcggagtggaccacaccgagcgtagaggtcgcctgcaactggagattagggcccccactgcagacgagattcacgtaaccgtgggagaggcgagaaatctgatccctatggaccccaacggcctctccgacccatacgtcaagctgaaactgatccctgacccgagaaatctcaccaagcagaaaacacggaccgtcaaggctacgctgaatcctgtatggaacgaaactttcgtattcaatttgaaacctggcgacgtagagcgacggctctctgttgaggtctgggactgggatagaaccagtcgaaatgactttatgggcgctatgtccttcggggtcagcgagttgttaaaggctcctgtggatgggtggtacaagctcttgaatcaggaggagggggagtattataatgtacctgtcgccgatgctgataattgttccttgctccagaaatttgaagcatgcaactatcccctggaattatatgaacgagtgagaatggggcctagcagcagcccaattcccagccctagcccctcacctaccgatcctaaaagatgtttcttcggggcatcacctggccgtctacatattagcgatttttcattcttgatggtactgggcaagggcagttttgggaaagtgatgctggccgagcggagaggttcagacgagctgtacgcaatcaagattctgaaaaaggatgtgatcgtgcaggacgatgatgttgactgcacactcgtggaaaagcgcgtgttggctcttggaggccgcggacctggagggcgtccccactttctaactcagctccatagcacctttcaaaccccagataggttgtactttgtgatggagtacgtgaccggaggtgatctgatgtatcatattcagcagctgggcaagtttaaggaaccccatgcagcattttatgctgccgagatcgcaattggtctgttcttcctgcacaaccagggaattatttatcgagacctgaagttagacaacgtgatgcttgacgccgagggtcacataaagatcacggattttggtatgtgcaaggagaacgtttttccggggaccaccaccaggactttttgcggtactcccgactatatcgcacccgagatcatcgcatatcaaccctacggcaaatccgttgactggtggagctttggagtgctcctgtacgaaatgttagccggtcagcctcctttcgatggggaagacgaagaagagcttttccaggcgatcatggaacagaccgtgacttatccaaagagcctcagtagggaggccgtggcgatttgtaaaggtttcctgactaagcaccctggcaaaagactggggtctggtcccgacggtgagcctacaatcagagctcacggtttcttccggtggatcgactgggaacggttggagcggctcgaaatcccccctcccttcagacccagaccgtgtggccggagtggtgaaaattttgataagttctttactcgcgcagctcccgcccttacacccccagaccgcctggtcttagcctccatcgaccaagcggatttccaaggcttcacctacgtgaatccagatttcgttcatccagatgcccgttcaccaacctcaccagtgcccgtccctgtcattagttgtacacctgccttccagctttgccctaggggtttctag

SEQ ID NO: 25816 - DNA, 1647 bp, synthetic construct
  misc_feature 1..1647: note = Description of Artificial Sequence: Synthetic coding sequence
  source 1..1647: mol_type = other DNA
atgccccggatctgcgacctgcgggtgagccggcggtgggagggccctcccgacggacggtgtgagatgaatgtgcaccgtcgatgtgtgcgcagtgtcccgagcctatgtggggtagaccatactgaacgacggggcaggttacagctggagattagagctccgacagcggatgagatccacgttactgtgggagaggcaagaaatctcatacccatggaccccaatggactgagtgacccatacgtgaagctgaaactcattcctgatccaagaaatctgacaaaacaaaagaccagaactgtcaaagcaacactgaacccagtgtggaacgaaacattcgtttttaatttaaagcctggggacgtggaacgcagactgtcagtcgaagtgtgggactgggatcgaaccagtagaaatgacttcatgggggccatgtctttcggtgtctctgagctgttgaaagctcctgttgacgggtggtataagttactgaaccaagaggagggagagtattacaatgtgcctgttgcagacgccgataattgcagcttgttgcaaaagttcgaagcctgcaattacccgctggaactatacgagagagttagaatgggtccatccagctcacccatcccatctccgagcccatccccgaccgacccaaaaagatgcttcttcggcgctagcccaggtcggctgcacatctctgatttttcattcctgatggtgctcggcaaaggttcttttggaaaggtaatgttggccgaacggagaggcagcgatgagttgtatgcaatcaaaatcctgaagaaagatgtgatcgtgcaggacgatgacgtggattgcacactggtcgagaagagggtgctcgcacttgggggtcgtgggcctggcggcagacctcacttccttactcaattgcattcaactttccagacccctgaccgcctgtattttgtaatggaatatgtgactggcggcgatcttatgtatcatattcagcagctcggcaagttcaaggagccacacgctgctttctacgctgctgagatagcgattggattgttcttcctgcataaccagggaattatttatagagacctgaagttggacaatgtcatgctggatgccgaagggcacatcaaaatcacggattttggaatgtgtaaagaaaatgtctttcccgggaccacaacacgtactttttgtggcacccccgactacatcgcccccgaaattatcgcttatcagccgtatggcaagagcgtggattggtggagctttggcgtcctgctatacgaaatgcttgctggacagttcctgacaaagcacccaggcaaaagattaggctcgggcccagatggggagccgacaatcagagcgcatgggttcttcaggtggatagactgggagcgcctggagagactcgaaattcctccaccctttagacctcgcccctgtggccgctctggcgagaattttgacaaattttttacaagggctgccccagccctgacaccaccggatagattagtccttgcttcaatagatcaagccgactttcagggcttcacctacgtaaaccccgacttcgtgcatcctgacgcccgaagccctaccagccctgtgccggtccccgtcatgtag

SEQ ID NO: 25817 - DNA, 1779 bp, synthetic construct
  misc_feature 1..1779: note = Description of Artificial Sequence: Synthetic coding sequence
  source 1..1779: mol_type = other DNA
atgcccagccggaccggccccaagatggagggcagcggcggccgggtacgcctcaaagctcactacggaggcgacatcttcataacgtcagtggacgcagcaacaactttcgaagaactgtgcgaggaggtacgggacatgtgccgtctgcatcagcagcatccgctcacacttaagtgggtcgactctgagggcgatccttgtactgtcagtagccagatggaactggaagaagcctttcggctggccaggcagtgcagggacgagggcctgattatccacgtcttcccttctacacctgaacagcccgggctgccatgcccgggtgaagacaaaagcatttatcggagaggggctcgcagatggagaaaactgtaccgtgctaacggtcacctttttcaggctaaacgcttcaaccgtagggcgtattgtggacagtgctccgaacggatttggggccttgctcgccagggttatcggtgcataaactgcaagcttctcgtccacaaacgctgccatggactcgttccactcacgtgtcgtaagcatatggattctgtgatgcccagccaggagcctcctgtcgatgacaaaaatgaggatgccgatctgccgagcgaagagaccgacgggatcgcgtacatcagctcctctaggaaacacgatagcattaaagatgacagcgaagacctaaaaccagtgatcgacggtatggatggcattaagatctcacagggcctaggcctccaggactttgatctgattagggtgatcggcagagggtcttacgcaaaggtcttactggtacgtctgaagaagaacgaccaaatctacgcgatgaaggtggtcaaaaaggagctagtgcacgacgacgaagacatcgattgggtccaaaccgaaaagcatgtatttgaacaggctagctcaaatccctttctggttggcctgcactcgtgcttccagacaacatctcgcttgttcctcgtaattgagtacgtaaacggcggcgacctgatgttccacatgcaaagacagagaaagttgcccgaagagcatgcccgtttttatgccgctgagatttgtattgccctgaattttctccacgaacgcggcatcatttatagagacctgaagcttgacaacgttctgttagatgccgacggtcatattaaacttaccgactacggaatgtgtaaggaaggcctcgggcctggagacactacgtccaccttctgtgggactcctaattatattgcacctgagatactccgaggcgaggaatatggcttctcagtggactggtgggcattgggcgtcctcatgtttgagatgatggctgggcgttccccctttgacataattacggacaaccccgatatgaacaccgaggattacctgttccaggtcattctggaaaaacctattcgaataccccgctttctttccgttaaagcttctcatgtgcttaagggcttcctgaacaaggatcctaaagagcgcctggggtgcaggccccagacagggttcagcgacataaagagccacgcatttttccgatcaattgattgggatttgcttgaaaaaaagcaggctctcccaccatttcaaccccaaattactgacgattatgggctggacaactttgatacgcagtttacgtctgagcccgtgcagcttactcctgatgacgaggatgcaatcaagagaatagatcagtcggaattcgagggcttcgaatatattaatcctttgctgctgagtaccgaggagtctgtgtag

SEQ ID NO: 25818 - DNA, 1230 bp, synthetic construct
  misc_feature 1..1230: note = Description of Artificial Sequence: Synthetic coding sequence
  source 1..1230: mol_type = other DNA
atggacagcgtgatgcccagccaggagccccccgtggacgacaagaatgaggacgctgatctacctagcgaggagacagacggtatcgcttatataagctcatctaggaagcacgacagtattaaggatgattctgaagatcttaagcccgtgattgacggaatggacggtatcaagatcagccaaggcctcggcctacaggattttgacctgatccgagtaataggcaggggaagctacgccaaagtgctcctggtgagactgaagaagaacgaccagatatacgcgatgaaggtggtgaaaaaagaactagtacatgatgatgaggatatcgactgggtacaaacggaaaaacacgtctttgagcaggctagctctaacccatttctggtgggtctgcattcctgcttccagaccacctcccgcctgttcctggttattgagtatgtcaatggcggagacttgatgttccacatgcaacggcagaggaagttgcctgaagagcatgcaagattttatgccgccgagatctgtatcgccctgaactttctgcatgagagaggaatcatctaccgggacctcaaactcgataacgtgctgctggatgccgatggacatattaaactgactgactatgggatgtgcaaagagggactcgggcctggggacaccacgtctacattttgcggaactccgaactatatcgcccccgagattctccgcggagaagagtatggtttttcagtggactggtgggccctgggcgtcctgatgttcgaaatgatggccgggagaagcccctttgacatcatcactgacaatcctgatatgaacaccgaggactacctgttccaggtgattctcgagaagcctattcgcattccaagattcctatccgtgaaggctagtcacgtgcttaagggcttcttaaacaaggaccccaaggaacgactgggatgcaggccacagacaggcttttcggatataaaaagtcacgctttctttagatctatagactgggatctgctcgagaaaaagcaggctctccccccctttcagccgcagataaccgacgattatggactggataactttgacactcagttcaccagcgaaccagttcagctcacacctgatgatgaagacgccattaaaagaattgatcagagcgaattcgagggctttgagtacataaaccctctcctgctttcaacagaagaatccgtttag

SEQ ID NO: 25819 - DNA, 1230 bp, synthetic construct
  misc_feature 1..1230: note = Description of Artificial Sequence: Synthetic coding sequence
  source 1..1230: mol_type = other DNA
atggacagcgtgatgcccagccaggagccccccgtggacgacaagaacgaggacgcagatctcccgtcagaagagactgacggcattgcatatatctccagttctagaaaacacgatagtataaaagacgactcagaggaccttaagccggtcatcgatggtatggacgggattaagatctcacaggggctcggacttcaggatttcgacttaatcagagttattggccggggcagctacgccaaagttctgctcgtgaggctcaaaaagaacgatcaaatttatgcaatgaaagttgttaagaaggagctcgtccatgacgatgaggacatcgattgggtccaaactgagaaacatgtatttgagcaagcgagcagtaatccctttctggtgggattacattcttgttttcagactaccagccgactgttcctcgtgatcgaatacgtgaacgggggagacctaatgttccatatgcagagacagcggaaacttcctgaggagcatgccaggttctatgctgccgagatttgcattgccttgaattttttgcatgagagagggattatctatagggacctgaaactggacaatgtgcttctggatgctgacggccacatcaaactcaccgactatggcatgtgcaaggagggtctgggaccaggggacaccactagtacattctgtggaacacccaactacatcgcgccagaaatcctccgcggcgaggagtatgggtttagcgtggattggtgggctctcggggtgctaatgtttgaaatgatggcaggccgctcgcctttcgacatcataactgacaaccccgatatgaatacagaggattacctgtttcaggtgattctcgagaagcccattcggattcctagatttctgagcgtgaaggcatcccacgttctcaagggtttcctaaataaggaccctaaggagagactgggctgtagacctcagacgggatttagcgacatcaaaagtcacgccttctttagatccattgactgggatttgctggagaagaaacaggctcttcccccctttcaacctcagatcaccgacgattatggtttggacaacttcgatacacagtttacctccgagcccgtgcagctcacccccgatgacgaggacgccatcaaaaggatagaccagagcgaattcgagggcttcgagtatatcaatcccttgctgctgagcacagaggaatccgtttag

SEQ ID NO: 25820 - DNA, 1467 bp, synthetic construct
  misc_feature 1..1467: note = Description of Artificial Sequence: Synthetic coding sequence
  source 1..1467: mol_type = other DNA
atgctgaccccccggaccgacgagagcatctaccggcggggcgccaggagatggcgcaagttataccgagcgaacggtcacctgttccaggctaagcggtttaatagacgggcctactgcggccagtgttcagaacgcatatggggcctggcccgtcaggggtatcgctgtatcaattgtaagctgctcgttcacaaacgatgccatggactagtgcctctgacttgtcggaagcatatggatagtgtcatgccctcacaggagccccccgtggacgataagaacgaggatgccgacctcccttctgaagaaaccgatggcatcgcatatatttccagcagccgaaaacacgattccattaaagacgacagtgaggacctgaaacctgtgattgacgggatggacgggatcaaaatttcacaaggattgggattgcaggacttcgacttgattagagtcatagggcgtggctcctatgccaaggtccttctcgttaggctgaagaagaatgatcaaatttacgcaatgaaagtcgtgaagaaagaacttgtccacgacgacgaagatattgattgggtgcagactgaaaagcacgtttttgagcaggcatcaagcaacccattcctggtcgggctgcactcgtgttttcaaacaacttctaggctctttctggtaatcgagtatgtgaatggtggcgatctaatgttccacatgcaacgccaacgaaaacttcctgaggagcatgccagattttatgctgcagaaatctgcatcgccctgaattttctgcacgagcggggaatcatctatcgtgacctgaagctggacaatgtccttctggatgccgacggacacattaaattgaccgattacgggatgtgcaaggaaggcctggggccaggagatacgacctcaacattctgtggaacacctaactatatagctccagagatacttcgaggagaagagtacgggttctccgtggactggtgggcccttggcgtgttgatgttcgagatgatggctggccgcagcccattcgacatcatcacggataaccccgacatgaacactgaggactatctctttcaggtaattcttgagaagccaatcagaataccacgattcctttcagtcaaagcctctcatgtgctgaagggatttttgaacaaagatccaaaggagcggcttggttgccgtcctcagactggtttcagtgacattaagtcgcacgccttctttcgcagcatcgattgggatctccttgaaaagaagcaggcactaccacctttccagccccagattacagacgactacggtttagataactttgacacacagtttaccagtgagcccgtgcagctgacccctgacgatgaagatgccattaaacgaatcgaccagagcgaattcgagggtttcgagtacattaacccactgctgctgagcaccgaagagtccgtttag

SEQ ID NO: 25821 - DNA, 78 bp, synthetic construct
  misc_feature 1..78: note = Description of Artificial Sequence: Synthetic coding sequence
  source 1..78: mol_type = other DNA
atggacagcgtgatgcccagccaggagccccccgtggacgacaagaatgaggatgctgatctgccttccgaggagtag

SEQ ID NO: 25822 - DNA, 249 bp, synthetic construct
  misc_feature 1..249: note = Description of Artificial Sequence: Synthetic coding sequence
  source 1..249: mol_type = other DNA
atggacagcgtgatgcccagccaggagccccccgtggacgacaagaatgaggacgctgacctcccttctgaggaaacagacggtattgcctacatttcttcatctcggaaacatgactcgattaaggacgattccgaagacctcaagcccgtgattgatggaatggacggcatcaaaataagccagggtttaggtttgcaagattttgatctcataagagtgattggccgggggtcctacgctaagtag

SEQ ID NO: 25823 - DNA, 297 bp, synthetic construct
  misc_feature 1..297: note = Description of Artificial Sequence: Synthetic coding sequence
  source 1..297: mol_type = other DNA
atggacagcgtgatgcccagccaggagccccccgtggacgacaagaatgaagacgctgacttgccttccgaggagacagatggcatcgcttacataagcagctctaggaagcacgattccatcaaggacgatagcgaggacttaaaacccgtgattgatgggatggacggcataaaaatctcccagggcctgggcctgcaagactttgaccttatccgcgtcattggcaggggcagttatgccaaggttctgttagtccgcctcaagaagaatgaccagatctatgccatgaaatag

SEQ ID NO: 25824 - DNA, 330 bp, synthetic construct
  misc_feature 1..330: note = Description of Artificial Sequence: Synthetic coding sequence
  source 1..330: mol_type = other DNA
atggacagcgtgatgcccagccaggagccccccgtggacgacaagaatgaagacgctgatctgccatctgaagagacagatgggatcgcctatatctcttcctcacggaagcatgactcaatcaaagacgactcggaggacttgaaacctgtcattgacggtatggacggaattaagatatctcaagggctggggctgcaggacttcgatctgataagagtgattgggcggggctcatacgccaaggttctgttggtccgccttaagaagaatgaccaaatttacgccatgaaggtggtgaagaaagaactggtacatgacgacgagtag

SEQ ID NO: 25825 - DNA, 141 bp, synthetic construct
  misc_feature 1..141: note = Description of Artificial Sequence: Synthetic coding sequence
  source 1..141: mol_type = other DNA
atggacagcgtgatgcccagccaggagccccccgtggacgacaagaacgaagatgcagatttgccatccgaggagactgatggcattgcatacattagctcatcccgaaaacacgactcaattaaggacgatagcgagtag

SEQ ID NO: 25826 - DNA, 222 bp, synthetic construct
  misc_feature 1..222: note = Description of Artificial Sequence: Synthetic coding sequence
  source 1..222: mol_type = other DNA
atggacagcgtgatgcccagccaggagccccccgtggacgacaagaacgaagacgccgatctcccttcggaagagacagatggtatagcatacatttcgtcatctcgcaagcatgacagcataaaggatgacagcgaagatctcaaaccagtgatcgacggtatggatggtattaagatcagtcagggactcgggctccaagacttcgatcttatccgatag

SEQ ID NO: 25827 - DNA, 66 bp, synthetic construct
  misc_feature 1..66: note = Description of Artificial Sequence: Synthetic coding sequence
  source 1..66: mol_type = other DNA
atggacagcgtgatgcccagccaggagccccccgtggacgacaagaacgaagacgcagatctatag

SEQ ID NO: 25828 - DNA, 216 bp, synthetic construct
  misc_feature 1..216: note = Description of Artificial Sequence: Synthetic coding sequence
  source 1..216: mol_type = other DNA
atggacagcgtgatgcccagccaggagccccccgtggacgacaagaatgaggacgccgacttaccaagtgaggagaccgatggcatagcctacatttcctcctctagaaaacacgattccatcaaagatgattctgaggatctgaaaccagtgatcgatggcatggatggtattaaaatttcacagggccttggattgcaggatttcgatctgtag

SEQ ID NO: 25829 - DNA, 417 bp, synthetic construct
  misc_feature 1..417: note = Description of Artificial Sequence: Synthetic coding sequence
  source 1..417: mol_type = other DNA
atgatcagcctgaccgacacccagaagatcggcatgggcctgaccggattcggcgtgtttttcctgtttttcggcatgatcctctttttcgacaaggcactcctagccataggtaatgtgttattcgtggcaggcttggctttcgtaatagggctggagagaacttttagatttttttttcagaagcacaagatgaaggccacaggattcttcctcggcggcgttttcgttgtcctaatcggctggccactgatcggcatgatttttgaaatttatggttttttcctgctctttcgcggctttttcccagttgttgtgggctttattcggcgcgtccctgtgctggggagtctccttaacctgcccggcatccggtcctttgttgacaaggtgggcgaaagtaataatatggtttag

SEQ ID NO: 25830 - DNA, 702 bp, synthetic construct
  misc_feature 1..702: note = Description of Artificial Sequence: Synthetic coding sequence
  source 1..702: mol_type = other DNA
atggacagccccgaggacgccgacctgttccacagcgaggagatcaaggcgcccgagaaggaggaatttcttgcttggcagcatgacctggaagtcaacgataaggcgccagctcaggctcgtcccactgtttttagatggacaggaggaggaaaggaggtgtatctttctgggtcattcaataactggagtaagctcccattaacaagaagtcataacaactttgtcgccattctcgacctgcccgagggagagcaccagtataagttcttcgttgacggccagtggactcacgaccccagtgaaccgatcgttacatcacagctgggtaccgtgaataatattatccaggtcaagaagaccgattttgaagtatttgacgcgctgatggtcgacagccagaagtgttcggacgtctctgagctatccagcagcccaccaggcccatatcaccaggagccttacgtttgcaagccggaagaacgcttccgcgccccacccatacttccccctcacctgcttcaggtaattctcaacaaggatactggaatcagctgtgaccctgccctcctgcctgagcctaatcacgttatgttgaaccacctgtacgccctgagtattaaagatggcgtgatggtgctctccgcgacccaccggtataagaaaaaatacgtgactaccctcttgtacaagcccatttag

SEQ ID NO: 25831 - DNA, 813 bp, synthetic construct
  misc_feature 1..813: note = Description of Artificial Sequence: Synthetic coding sequence
  source 1..813: mol_type = other DNA
atgggcaacaccagcagcgagcgggccgccctggagcggcacggcggtcacaaaacaccaagacgggatagctcagggggaacgaaagacggcgaccgaccaaagattctgatggacagcccagaggacgctgacctcttccatagtgaggaaattaaggcgccagagaaggaggagttcttggcttggcagcacgacctcgaggtcaacgataaagctcccgcacaggcccgcccaaccgtcttccggtggacagggggcggtaaagaagtgtacctttcaggatcctttaataattggagcaagctccccctgacccggtcacacaacaatttcgtggcaatcctcgacctgcccgagggtgagcaccagtacaaattctttgtcgatggccaatggacacacgatccaagcgaacccatcgtgacatctcaactcggcaccgtgaacaacatcattcaggtgaaaaaaacggacttcgaggtgttcgatgcactgatggttgacagccagaagtgctctgacgtatcagagctcagttcctcgccgcccgggccctatcatcaggaaccctatgtgtgcaaaccagaagagagattcagagccccccccattctcccaccacacctcctgcaagtgatactcaacaaagatactggaatcagctgtgaccctgccctactgcctgagcccaatcatgttatgctgaaccacctttacgccctgtctattaaggatggggtgatggtgttgtctgctacccatcggtacaagaagaagtacgtcaccacacttctgtataaacccatttag

SEQ ID NO: 25832 - DNA, 12384 bp, synthetic construct
  misc_feature 1..12384: note = Description of Artificial Sequence: Synthetic coding sequence
  source 1..12384: mol_type = other DNA
atggccggcagcggcgccggcgtgcggtgcagcctgctgcggctgcaggaaaccctgtcggcagcggatagatgcggagctgctctcgcaggccaccagctcattcggggactggggcaagagtgtgtactgtctagtagccccgcagtcctggccctgcagacctctttggtgttttcacgtgatttcggattgctggtcttcgtgaggaagagcctgaactccatcgagttcagggagtgtcgggaggaaattttgaagttcctgtgcatctttttggaaaaaatgggccaaaagatcgccccttattccgtcgaaattaagaatacctgtacttcagtctacaccaaggatcgcgctgctaaatgcaagattccggccctggacctgttgattaagctgctgcaaactttcagatcgtctcggctgatggatgaattcaaaattggagaactgttttctaagttctatggtgagctggcactgaaaaagaaaatccccgacactgtgttggagaaggtgtacgagttactagggctgttgggcgaggtgcatccaagtgagatgattaacaacgcagagaacctgtttcgggcttttctgggcgaactgaagactcagatgaccagcgctgtgcgagaacccaagctgcccgtgctggcaggatgtctgaagggcctgtcttctctcctgtgcaatttcactaagtccatggaggaagacccccagaccagcagggagatcttcaactttgttttaaaggctattcggcctcagattgacttgaaaaggtacgctgtaccatcagccggactccggttgtttgccctgcatgcatcacagttctcgacgtgcctgcttgacaattatgtgtctctttttgaggttctcctgaagtggtgcgcccacacaaacgtagagctaaagaaggctgctctgagtgctttggagagtttccttaagcaagtgagcaatatggtggctaagaacgctgaaatgcacaaaaacaaactgcagtacttcatggagcaattttatggcatcatacggaatgtggatagtaacaataaggaactctcaatcgctatccggggctatggcttatttgccgggccttgtaaggttatcaatgccaaggatgtggatttcatgtatgtggagttgatacagagatgcaaacagatgttcctcacccagactgatactggagatgacagggtttatcagatgcccagcttcttacagtctgtggcttctgtcctgctctacctggacaccgtgcctgaggtctatacccctgtcctggagcatctggtagtgatgcagatagactcgttccctcagtactcaccaaagatgcagctggtgtgttgccgggctatcgtgaaagtgttcctcgctctggcggcaaaaggacccgtgcttaggaactgtatatccaccgtagttcaccaaggtctgattaggatatgttcaaaaccagtggtcttgccaaaaggacccgagtcagagagtgaggaccacagggcctctggcgaagtgcgcaccgggaaatggaaggttcccacctataaagactatgtggaccttttccgtcatctgctgtcttcggaccaaatgatggacagcatcctggcagacgaagcatttttcagtgttaatagcagctccgagagcttgaatcacctgttgtatgatgagttcgtcaagagtgttctaaaaattgttgaaaagttagacctgacacttgagatccaaaccgtcggagagcaggaaaacggcgatgaggcgcccggggtttggatgatccccacctcggaccccgctgctaatctgcatccggctaagcccaaagacttttctgccttcattaatttggtggagttttgcagagaaatcttgccagaaaagcaggctgagttcttcgagccgtgggtgtactctttttcctatgagctcatcctccagtccacccggctcccgctcataagtgggttctataagctcctatcaattacggtgcgaaatgccaagaagataaagtactttgagggggtgtccccaaaatccctgaaacactcacctgaggacccagagaagtactcctgcttcgctttgttcgtcaaatttgggaaagaagtcgcagtgaaaatgaaacagtataaggatgagctgctggcatcttgtttgacattcctgctgtccttacctcataatatcatagagctggacgtgcgtgcatacgtgcccgccctacagatggctttcaaactcggcctctcttataccccgctcgccgaggtgggacttaacgcattggaggaatggtcaatctatattgatagacacgtcatgcagccttattacaaggacatacttccttgtctcgacggctacttaaagacaagcgctctgagcgatgaaactaaaaacaattgggaggtctctgcactctcccgcgcagcacaaaaagggtttaacaaagttgtcctcaaacaccttaagaaaacgaagaatttgtcatccaatgaggcgatctctttggaggaaatccggatccgggtggtccagatgctgggaagtcttggggggcagatcaataagaacctccttactgttacttcttcagatgaaatgatgaaaagttatgttgcctgggatcgcgaaaagcgtttgagcttcgcggtcccttttcgtgagatgaaaccggttatatttctcgatgtcttcctgccgcgggttaccgagctggcccttaccgctagcgacagacagacaaaggtggcagcttgcgagttactgcacagtatggtgatgtttatgctcgggaaagcgacacaaatgccagaagggggacagggagcccctcctatgtaccaactctataagcggacatttcccgttctgcttcgcctcgcctgcgacgtggaccaggttactagacagttgtacgaacctcttgtcatgcagttaatccactggtttactaacaacaaaaaattcgagtcccaggatactgttgccctcctggaggcaattcttgacgggattgtggatcctgtggacagtaccctcagagatttctgcggcaggtgtatcagagaattcctcaagtggagcattaagcagataactccccagcagcaggagaagagccctgtgaatactaagtcccttttcaagcggctgtactcactggccctccaccctaacgcgtttaagcgtctgggcgccagtctggccttcaataacatttacagagagtttcgcgaggaagaaagccttgtcgagcagttcgtattcgaggccctggtcatatacatggaatcacttgcgctcgcccacgccgatgagaagagtttggggacaattcagcagtgctgtgatgccattgatcatctgtgtcggatcattgagaaaaaacatgtctctctcaataaagcaaagaaacgtcggctaccaaggggcttcccaccaagcgccagcttgtgtctccttgacctggtgaaatggcttttggctcattgtggccggccccagacagagtgtcgacataagagcatcgaattgttttacaagttcgtgccgctattgcctgggaaccgctccccaaatctctggctgaaagatgttcttaaggaagaaggagtgagttttttaattaatacttttgagggcggtgggtgcgggcagccgtccggaattttagcccaaccaaccctcctttatcggggccccttcagtttacaagcaacattgtgctggctggatctcttgctcgccgcgttggagtgttacaacacctttataggagagcgaactgtgggtgctctgcaggttctaggcactgaagcccagtcctcgctgctgaaggctgttgcatttttccttgagagtattgcgatgcatgacattattgcggcagagaaatgcttcggcaccggcgccgctggaaatcggacgagcccacaggagggtgaacgatacaactacagtaaatgcacagtcgtggtgcgcatcatggagttcactacaacattactgaatacctcccccgaaggctggaagctactgaaaaaagatctgtgtaacacccacctgatgagagtgctagttcagaccctatgtgaaccagcttctataggcttcaacattggggatgtgcaggtgatggcacatctgcccgacgtatgtgttaacctaatgaaggctctgaagatgtccccatataaggatatcctggaaacccacctgcgcgaaaagattaccgcacagtccatcgaagagttgtgtgccgtgaatctgtacggccccgacgcacaagtggaccgtagccgcttagccgcggtggtgtctgcatgcaagcagctgcaccgtgcgggcttactgcataatattctcccatcccagtctactgatctccaccacagcgtggggacagagctactcagcctggtctataaagggatagcccctggcgacgagagacaatgcctgccaagcctggatctgagctgcaagcagctggcttcaggcctccttgagcttgcttttgccttcggcggcctgtgtgaaaggctagtgtcccttctccttaacccggcagtcctgtcgaccgcctctttagggagctctcagggatccgtaatccatttctcccacggagaatacttttactccctgttttcagagaccataaatactgagcttttaaagaatctggacctggccgtgctggaactgatgcaatcttcagttgataacacgaagatggtgtctgccgtgctgaatggcatgctcgaccaaagtttcagagagagggccaaccaaaaacaccaggggctcaagttggcaacaactattctgcagcactggaagaagtgtgactcctggtgggctaaggattccccattggaaactaaaatggccgtgcttgctctacttgccaagattctccagatcgactcttctgtgtctttcaatacttcacatggaagctttcctgaagtctttaccacttacatttccttactggcagacaccaagttggacctgcacctgaagggtcaggccgttaccttgctgcctttttttacaagtctcactggcgggagcctcgaagagctcagacgtgtactcgaacagctgatcgtagcacacttcccgatgcaatcgcgcgaatttccaccagggaccccccgatttaacaactacgtcgactgcatgaaaaagtttctggacgctctggaactgtctcagagccccatgctcctcgaattgatgactgaggtgctgtgcagggaacagcagcacgtgatggaggaactttttcagagttctttcagaaggatagcaaggaggggatcctgcgtcactcaagtcggcttgctggaatccgtttacgaaatgttccgaaaagatgacccacgcctcagttttacaagacaaagctttgtagatagaagcctcctaacattgctgtggcactgctccttggacgcactccgagaattcttttcaacgattgttgttgatgccattgacgtcctgaaaagcagattcaccaaactcaacgaatcaaccttcgacacacagatcaccaagaagatgggatattacaaaattctggacgtcatgtacagtaggctccctaaggatgacgtgcatgccaaggaaagtaagatcaaccaagtgtttcatgggtcgtgtatcaccgagggaaacgaactgacaaagaccttgatcaagctttgctatgacgccttcactgaaaatatggcgggcgagaatcagctgcttgagcgccggcgattgtaccactgtgcagcctacaattgtgccattagcgtgatttgctgcgttttcaatgagttgaagttctatcaaggttttctttttagtgaaaagccagagaagaacctgctaatctttgagaatctaatcgatcttaaacggaggtataattttcctgtagaggttgaggtacccatggaaaggaaaaaaaagtatatcgagatacgaaaggaggctagagaagcggctaacggtgattctgatggccccagttacatgtcgagtctctcctacctggcagactccaccctgtcagaggaaatgtctcagtttgacttttccacaggggtgcagtcttactcctactcttctcaggaccccagacctgccacaggacgcttccgaaggagagagcagcgcgatccaactgttcacgatgatgttctggagcttgaaatggacgagctgaatcgacatgaatgcatggctcctttaactgccctcgtgaagcacatgcacaggtcccttgggcctcctcaaggcgaggaggatagcgtgccccgagacctaccttcttggatgaagttcctgcatgggaagcttggcaatcccattgtgcctctaaatattcggctgttcctggctaagctcgtgatcaatacagaagaagtatttcggccctacgccaaacactggctcagccccctcctccaactggctgctagcgagaataacggcggcgaaggaatacactacatggtggtggagatagtggcaactattctatcttggactgggctcgctactcccactggagtgcccaaagacgaagtgcttgccaacagacttctcaacttcctgatgaaacatgttttccaccctaagcgcgccgtgttccgccataatctggaaattatcaagacactggtggaatgctggaaagactgtctgtcaatcccgtaccgcctgatctttgagaagttcagtggcaaagatcccaacagtaaagataactctgttggcatccagttgctggggatcgtcatggcaaacgacctccctccttacgatccccagtgtggcatccagagctcagagtacttccaggctctcgtgaataatatgagcttcgtgcgctataaggaagtgtacgcggccgcggccgaagtgttaggactgattcttcgttacgtcatggagcgtaaaaatattttggaagagtctctctgtgaactggtggccaagcaattgaaacaacatcagaacacaatggaggacaagtttattgtgtgcttgaataaggtgacaaaatctttccccccgctggcagatagattcatgaatgccgtgttctttctcctcccgaaattccacggcgtgctgaagaccctgtgtctggaggtcgttctctgccgagtagagggcatgacagagttatactttcagctcaagagcaaggattttgtgcaggttatgcgtcatagagatgacgagcgtcaaaaggtgtgcctcgatatcatatataagatgatgcctaagcttaaaccagtggagctccgcgaactcctgaatccagttgtggagtttgtatctcatccgtcaactacctgccgagaacagatgtataacatcctcatgtggatacacgacaactatcgagatcctgagtccgaaacagataatgactctcaggaaatctttaaactagccaaggatgtgcttattcaaggacttatagacgagaatcctggactgcagctgataatccgcaatttctggtcacacgaaacccgcctgccctccaacacgcttgaccgcctactagcgctcaatagcctgtactcgcccaagattgaggttcacttcctctcactcgctacgaacttcctgcttgagatgacaagcatgtctccagactaccctaacccaatgttcgaacaccctttatctgagtgtgaatttcaggaatacaccatcgactctgactggcggttccgcagcactgtgctcacccccatgtttgtggagacccaggcctcacaggggacgctccaaaccaggacccaagagggatccctgtctgcaaggtggccggttgctggacagatccgagcgactcagcaacagcatgatttcactctcacccagacagccgacggtcgaagctcctttgactggctgactgggagctctaccgacccactggtggatcatactagcccaagtagtgattcgttgctgtttgcacataagcggtcagagaggttgcagagagcccctctgaagtccgttggaccagattttggaaaaaagagacttggcctaccaggagatgaagtagataacaaggtcaagggcgcagccggaaggacagacctgcttcgcctgagaagacggtttatgagagatcaggagaaactgtcactcatgtacgctaggaagggcgttgcagaacaaaaaagagagaaagagatcaagtctgagcttaagatgaaacaagatgcccaagtggtgctttacaggagctataggcacggggacctgccggatattcaaatcaaacattcctcactaattacgcccttgcaagctgtggctcagagagatcccattatcgccaaacagttattttcctccctgtttagcggcatactgaaagagatggacaaatttaaaacccttagtgagaaaaacaacattacacagaagctgctgcaagatttcaatcggtttctcaacacgactttttcatttttcccaccatttgtcagctgtatacaagatatctcctgccagcatgccgccctcttgtctcttgacccagctgcggtatccgcaggctgtcttgcctcgttacaacagccggtcggaattcgcctgctggaagaagcccttctaaggcttctaccagctgagctgccagccaaaagggtacggggcaaggcccgactgccaccagacgtgcttcggtgggtcgaacttgccaagctgtatcggagcattggagagtatgacgttttacgcggaattttcacatctgagatcgggacaaaacagatcacccagtcagccctgttggctgaggcacgcagcgactactctgaggctgctaagcagtacgatgaggcactgaataagcaagattgggtcgacggagaaccaacagaagcggagaaggacttttgggaactggcctctttggactgctataaccatcttgcagaatggaaaagccttgagtactgcagtaccgcctccatcgatagtgagaacccccctgatcttaacaagatctggtcagaacctttttaccaggaaacctacctgccatatatgatccggagcaagctaaagctattgctgcagggcgaggctgaccagtccctgttgacattcatcgataaggcgatgcatggggagcttcagaaggcgattctggaactacattattctcaggagttaagtctcctctatttgctgcaggatgatgtggaccgcgccaagtactacattcagaacggcattcagtcctttatgcagaattatagttctatcgatgtgctgctgcatcagtcccgcttgacgaagctgcagtcagtgcaggcactcacagagattcaggagttcatctccttcatatctaaacaggggaacctcagcagccaggtgccactcaagcgtcttcttaacacctggacaaacaggtaccccgacgcaaagatggatcccatgaacatctgggacgatataattacaaatcgatgcttttttctttccaaaatcgaagagaaacttactccactacccgaggacaatagcatgaatgtcgatcaggatggggacccctctgatcgaatggaggtgcaggaacaggaggaggacatctcctctctgatccggagttgtaagttttctatgaaaatgaagatgattgatagtgcccgaaaacaaaataattttagtcttgccatgaaattactcaaagaactgcacaaggagtccaagacccgcgacgactggttggtgtcctgggtgcagagttactgtcggctgtcccattgccgatctaggagccaggggtgttccgagcaggtgttaaccgtgctaaagacagtgtcactgctcgatgaaaacaacgtgtcatcatatttgtcgaagaatatcctcgcttttcgggaccaaaacatcctgctcgggacaacgtaccgcatcattgctaatgcgttgagttccgagccagcttgcttggccgaaattgaagaagataaagcaaggcggatcctcgagctgtccggatctagtagtgaagattctgaaaaagtcatcgctgggctgtaccagagggccttccagcatctgtctgaagctgtccaagccgctgaggaagaggcccagccaccctcttggagttgcggccctgcagccggcgttattgacgcatatatgactctggccgatttttgtgaccagcaactgcgcaaggaggaggagaatgccagcgtcattgacagcgcggagctgcaggcatatcctgcactggtggtcgaaaaaatgctgaaagcccttaaactgaattcgaacgaggctcggttgaagttcccccgcctcttacagattatcgaacgatatcccgaagaaactctgagcttgatgaccaaagagatctcatccgtgccttgttggcaattcataagctggatttctcatatggtcgcactgcttgacaaagaccaggccgtcgccgtccagcacagcgtggaggaaattactgataattaccctcaggccatcgtttacccctttatcatttcttcggaatcttactcgtttaaggatacatccaccggccacaagaacaaagagttcgtcgcccggatcaagagtaagctggaccaggggggtgtaatccaggatttcattaacgcattagaccagctttccaatcctgagctgctgtttaaagactggtcgaatgatgtgagagccgagctcgccaagacacccgttaacaaaaagaatatcgagaagatgtatgagaggatgtatgctgctctcggcgatccaaaagcgcccggcctcggagcctttcgccggaagtttatccagaccttcggtaaggaattcgacaagcactttggaaaagggggatccaagctgctcagaatgaagctaagcgactttaatgacattacaaatatgctgctgctgaagatgaacaaagacagtaaaccacccggcaacctgaaggagtgtagtccttggatgtccgattttaaagttgagttcttaaggaatgaattggagatacctggccagtacgatggaaggggaaagccgttgccagaatatcacgttaggatcgctggtttcgacgaacgggtgacagtcatggcttccctgcgcagacccaagagaattatcattagggggcacgacgaaagagagcacccattcctggtgaagggtggtgaggacctccgccaggaccagcgggttgagcagctgttccaggtgatgaacggaattctggcgcaggatagcgcctgctcacagagagccctccagctccgaacgtattccgtggttccaatgacttcgagactcgggctgatagagtggctagaaaacacggtcaccctgaaggacttactccttaatactatgtcgcaggaagaaaaagcagcctacttaagcgatcctcgggcccccccatgcgagtacaaggactggctgacaaagatgagcggcaaacatgatgtcggtgcctacatgctgatgtacaaaggagctaaccgcactgagacagttacctctttccgcaaacgggagtcaaaagtgccagccgatctgttgaaacgggcgtttgttcgcatgtcaacatcacctgaagcctttttagccctgcgaagccactttgcttctagtcacgccctgatttgtatttctcactggatattgggtataggagatagacacctcaacaatttcatggtagcgatggagacgggtggggttattggcattgattttggacatgcattcggctctgcaacgcagtttctgccggtgccggaactaatgcccttcaggttaacacgacaattcattaacctgatgttaccaatgaaggagactggcctcatgtactctatcatggtccatgccctgagggcattcaggtccgaccctggccttttaacaaataccatggacgttttcgttaaggagccatccttcgattggaaaaattttgaacagaagatgctcaaaaaggggggtagttggattcaagagatcaacgtggctgaaaaaaactggtatccacgccagaaaatatgttacgcaaagcggaagcttgccggcgccaacccagccgtcatcacctgcgacgaattgctcctgggccacgagaaagcacctgctttcagagattacgtggctgtcgcaagaggctctaaggaccacaacatcagagcgcaggagccggaatccgggctttctgaggaaactcaggttaagtgcctgatggaccaagccaccgacccaaacatcctagggcgcacgtgggagggttgggagccgtggatgtag

SEQ ID NO: 25833 - DNA, 12291 bp, synthetic construct
  misc_feature 1..12291: note = Description of Artificial Sequence: Synthetic coding sequence
  source 1..12291: mol_type = other DNA
atggccggcagcggcgccggcgtgcggtgcagcctgctgcggctgcaagagaccttgagtgccgctgatcggtgtggcgctgcccttgcgggacaccaattgattcggggtttgggccaggaatgtgtgttgagctccagtccagcggtactagccctgcagacctcccttgtcttttcacgtgacttcgggctgctggtctttgtgcgtaaaagcttgaattcaatagagttccgggagtgtcgggaggaaatcttaaagttcttatgtatctttctggagaagatgggccagaaaatcgccccttattccgtggagattaagaacacttgcacttcggtttataccaaggaccgggcggcgaagtgcaaaattcctgccctggatttgctgattaagctgctgcagacttttaggagttcacgccttatggacgaatttaaaataggggagctattcagcaagttttacggtgagctggcactgaagaagaaaatcccagacactgtactggaaaaagtgtacgaactccttggactgctgggcgaggtccatcccagcgagatgatcaacaatgccgaaaacctcttcagggccttcctgggggaacttaaaacccagatgactagcgccgtgagggagccgaaactgcccgttctggcgggttgccttaaaggtttgtcaagcctgttatgcaattttacaaagagtatggaagaggatccccagactagccgcgagattttcaatttcgtgctcaaggccatacggccccaaattgacttgaagcgctatgcggttccttccgctgggctgcggctgttcgcactgcatgctagtcagtttagtacctgtctgctagacaactacgtttcactgtttgaggtcctgcttaagtggtgtgcgcatactaatgtcgagctgaagaaggccgcactatccgcgttggaaagtttcctcaagcaagtgtctaatatggtggccaagaacgccgagatgcataaaaataagctgcagtactttatggagcagttttatgggataattagaaatgttgatagtaacaacaaggagcttagcatagcgataagggggtatgggcttttcgcaggaccctgtaaggtcatcaacgccaaagatgtcgactttatgtatgtcgaactgattcaacgatgcaaacagatgtttttgacacagacggatacaggcgacgaccgagtttaccagatgccaagttttctgcagtccgttgcaagtgtgctgctttacctggatacggtgcccgaggtgtataccccagtactcgagcatctggtcgtcatgcagattgattcattccctcagtattcaccaaagatgcagctcgtgtgctgtcgcgctattgtgaaagtcttcctggctttagccgctaaagggcccgtgctccgcaattgcatttccactgtcgttcatcagggattaatccggatttgttccaaacctgtggtccttccgaaaggccctgagtccgaaagcgaagaccacagagcttccggcgaagtgcgtactgggaagtggaaagtccccacttataaagactacgtcgatctctttaggcatctgcttagttcagaccaaatgatggatagtatactggcggacgaggccttctttagcgtgaattccagtagtgaatccctgaaccatctcctgtacgatgaattcgttaagtcggttttgaaaattgtcgaaaaactagacctcaccctggagattcaaacagtgggcgaacaagagaatggcgacgaggctccaggagtttggatgattccgacctcagaccctgctgcaaacctgcacccagcaaagcccaaagacttctcggcctttatcaacttggtggagttctgtcgggagatcttgccagagaagcaggcagagttcttcgagccctgggtatactccttcagctatgagttaatcttgcaatctactagactccctctaatatccgggttctacaaactcctgtccattactgtcagaaacgcaaagaagatcaagtactttgaaggggtaagcccaaaatccctcaagcactcacctgaggacccagagaagtactcttgtttcgccctcttcgtcaaatttggcaaggaggttgcagtgaagatgaagcagtataaggatgagcttctggcctcctgcctcacttttctgctaagcctaccccacaatataatcgaacttgacgtgcgggcatatgtgcccgccttgcaaatggcgtttaagctgggtttatcatatacacccctggccgaagtggggctcaacgctctggaagagtggtcgatatacatagaccgccatgtgatgcagccctattataaggatattctaccatgcctggacggctatctgaaaacatcagctctgagtgatgaaacaaagaataactgggaagtgtctgccctgagcagggctgctcagaagggttttaataaggtggtgttaaaacacttgaagaagacgaagaatctgagctctaatgaagcaatatctctggaggaaattcggatccgtgtggttcagatgctgggaagcctggggggccagattaacaagaatctgctgaccgtgacctcgagcgatgaaatgatgaagtcttatgtagcttgggatcgggagaaaagactgtctttcgctgttcctttccgtgagatgaaaccagttatcttccttgacgtgttcctgcctcgtgttaccgaactggcgctgacagcctcagatcgacagaccaaggtcgctgcgtgtgagctgctccactccatggttatgtttatgttgggcaaagctacacaaatgccggagggcgggcagggagccccccctatgtatcagctctataagagaacctttccagtgcttttacggctggcttgcgacgtagatcaggtgactcgccagctctacgagcctcttgtcatgcaacttatccactggttcaccaacaacaaaaaattcgaatcccaggacaccgtcgccctcctggaggcaattctggatggcattgtagatccagtagattcaaccctgagggacttctgcggcaggtgtatccgcgagttcttgaaatggtccattaagcagatcacgccgcagcagcaggagaaaagtcctgtgaacacaaagtctctattcaaacggctgtactctcttgcccttcacccaaacgcctttaaacgactgggcgcctctcttgcattcaacaatatatacagagagtttagagaggaggagtccctcgtggagcagtttgtgttcgaggcattggtaatatacatggagtcacttgctttggctcatgccgacgagaaatcacttggaactatccagcagtgttgtgatgctatagatcacttatgtcgaattattgaaaaaaagcacgtcagtctgaacaaggccaagaagcgcaggctgccccgcggatttcctccatctgcgagcctttgcctgctggatttggtgaaatggctgctggcacactgcgggcggccacagaccgagtgtcgacataaatctatagaactcttttataaattcgttcctctgctgcctggaaacagatccccaaatctgtggctgaaagacgttctgaaagaggaaggagtgtcctttctcattaacactttcgagggaggcgggtgcggacagcccagtgggattctggcccagcccaccctgctgtatagaggaccgttctccctgcaggccaccctgtgctggctggatcttctcttggctgccctggagtgttataacacattcattggtgagcgcacagtaggggcacttcaagtgttggggacagaggctcaatctagcctgcttaaggccgtcgccttctttctagaaagtattgctatgcatgatatcattgctgcagaaaagtgctttggaacaggtgcagcaggtaaccgaactagtccccaagaaggagagcgctacaactactcaaaatgtaccgtagtcgttcgcatcatggaattcaccactactctcttgaacaccagcccagaaggctggaagctccttaaaaaggacctgtgcaacactcatttaatgcgtgtgttggtccagacactatgcgagcccgcatcgataggcttcaacataggcgatgtgcaagttatggcccacctacctgacgtgtgtgtgaacctaatgaaagctttgaaaatgtccccatacaaggatatccttgagactcacttacgcgaaaaaatcactgcccagtccatcgaagagctttgtgcggtcaacctctatggccctgacgcgcaggtcgatagaagcagactggccgccgttgtttccgcatgcaagcagttgcaccgtgccggcctgcttcacaacattttgccgtcccagagcacagacctgcatcattcagtagggaccgagctcctgagtctcgtctataagggcatcgctcccggggacgagcgccagtgcctgccatctctcgatctgagctgcaaacagctggcctcgggcctgttggaattggcattcgcctttgggggattgtgtgaaaggcttgtcagcctattactcaatcccgccgttctttcaaccgcctcccttggttccagccaaggcagcgttattcactttagccacggggagtatttttactccctgtttagcgagacgattaacaccgagctcttgaaaaacctggatcttgcagtgttagaactgatgcagagtagtgtggataacacaaagatggtgtctgcagtcttgaacggcatgctcgaccaatcttttcgagaaagggctaatcagaaacaccagggtctcaagctagcgaccacaatattacagcattggaagaagtgtgacagttggtgggcaaaggactctccccttgaaacaaagatggctgtcttagccctgttagctaaaatactacagatcgattcatccgtgtcattcaatacctctcacggctcattccctgaggttttcactacctacattagtctattggctgacacaaagctagacttgcacctcaaaggccaggcagtgacacttctgccattcttcacctccttaacgggagggagtctagaagaactgcgccgggtgctcgagcagctgattgttgcacatttccccatgcagtctagagagttcccgcccggtaccccaaggtttaataactacgtcgactgcatgaagaaatttttggacgccctggaactgagccagagtccaatgctgttggaattgatgaccgaggtgctctgtcgggagcagcagcatgttatggaggagctcttccagtctagcttcaggcgcattgctaggagagggagctgcgtgacgcaagtgggactgctggagtccgtctacgaaatgttccggaaagacgacccgaggcttagcttcacccggcagagctttgttgatcggtctctcctgaccctgctttggcactgctctctcgatgcactacgcgaattcttttcaacgatagtagtagacgccatagatgtgttaaaaagtaggtttacaaagctcaatgagtccaccttcgatactcaaatcacgaaaaagatgggctattataagattctggacgtaatgtactcgagattgccaaaggacgatgttcacgccaaggaatctaagattaaccaggtgttccatggttcatgcataacggaagggaatgagctgacgaaaactctcatcaaattgtgctatgatgctttcacagagaatatggcaggagagaatcaactcctggagcggaggcggctgtatcactgcgccgcatacaactgcgcgatctctgtgatctgctgcgtatttaatgagttaaaattctaccagggatttttgttctccgagaaacccgagaaaaacctcctcattttcgaaaatctgatcgatctgaagaggcgatacaatttccctgttgaagtcgaggttcccatggagagaaagaagaaatatattgaaatcaggaaggaggctcgcgaggctgctaatggcgatagtgatgggccaagctacatgtccagcctgtcatacctggcagactctacgctgtccgaagagatgtcccagttcgacttttctactggcgtgcaaagctatagttactcatctcaggatccgaggccagctaccggccgcttccgacggcgggagcagcgcgatcctacagttcatgatgatgtacttgaactggagatggacgagcttaacaggcacgaatgtatggcccccctgaccgccctggttaagcacatgcatagatcactggggccaccccaaggggaagaggactcagtgccccgtgatctaccctcctggatgaaatttctgcacggaaagctcggtaatcctatcgttccacttaacattagactcttcctcgccaaacttgtgatcaacacggaggaggtgtttcggccctatgcaaagcattggctgagccctctgctgcagctggcagccagcgagaacaatggcggcgagggcattcactatatggtggtggaaatcgtggccaccattctgagctggacggggctggccaccccgaccggcgtgcctaaagacgaagtgctggccaaccggctgctcaattttcttatgaaacacgtgttccatccgaaacgggcagtgtttcgtcacaacctcgagattatcaaaacacttgtggaatgctggaaagactgcttgtctatcccctatcggctgatttttgagaaattttccggcaaggatccaaactccaaagataatagcgtcgggatccagctgttgggcattgttatggccaacgacctcccaccctatgatccacagtgcgggatccaaagctctgagtactttcaggcattggtgaacaatatgagctttgtcagatacaaagaagtatacgccgccgccgccgaagtgctaggactcattctgaggtacgtgatggaacgcaagaacatccttgaagagtccctatgcgagctggtggccaagcagctgaagcagcatcagaatactatggaggacaaatttatcgtctgtcttaataaagtaacaaagtccttcccaccccttgccgatagatttatgaatgccgtgttctttctgctcccaaagttccacggcgtactgaagacactgtgcttagaagtcgtgctgtgcagagtggagggcatgacggagctgtacttccaactgaaatctaaggactttgtgcaggttatgcgacaccgcgatgacgaaagacagaaggtgtgcctggacataatctataagatgatgcctaaactgaaaccggttgaactccgggaactgctgaaccctgtggtggagttcgtgtcccacccctcaactacctgtagagagcagatgtacaatattttgatgtggatacatgacaattaccgggaccctgagtccgagaccgacaatgatagtcaggaaatcttcaagttggccaaggacgtgctcattcaaggccttatcgacgagaatccaggtctgcagttaatcatccgaaacttctggagtcacgagacccgtctgccctccaatactctcgatagactcctggctctaaattctctctattcacctaaaattgaagtgcacttcttgtccctcgctacaaatttcctcctcgaaatgacttccatgtcccctgattaccccaaccccatgtttgaacaccccctgagcgaatgcgaatttcaggagtacactatcgactcggactggaggttccggtccaccgtgctaactccgatgtttgtagagacccaagcctcgcagggcaccctgcaaaccaggacgcaggaaggcagcctctccgctcgctggcccgttgctggccagattcgagccacccaacagcagcacgacttcacgttgacccagaccgccgacggccggtctagtttcgactggttaactggctctagtactgatcccctggtcgaccacacaagtccatcttccgatagcctgttgttcgcccataagagatcggagcggctgcagcgcgccccgctgaagtccgtcggacctgatttcggcaagaaacggctggggttgccgggagatgaagttgataacaaggtcaaaggcgccgcgggccgaactgacctgttgagactccgacggcggttcatgcgagaccaggaaaaattgagtctgatgtacgccagaaagggagtggcagagcagaagcgcgaaaaggagatcaagtctgaattgaagatgaaacaggacgcccaggtcgtgctttaccgctcataccgtcatggagatctgcctgacatccagattaaacactctagtctcatcacccctttgcaagcagttgcacagcgtgaccctatcatcgcgaaacagttattttcctctctgttctcaggaatcttgaaagagatggataagtttaaaaccctgagtgaaaaaaacaatatcacccagaagttgctgcaggattttaaccgttttttgaatacgactttttcatttttcccacccttcgtttcgtgcatccaagatatctcctgccagcacgctgccttgctgagcctggaccccgctgctgtcagtgccgggtgtctagcaagcctgcagcagcccgtagggatcagactgctggaggaagctctactaaggctcctacccgccgagctccccgctaaacgagtgagagggaaggcccgactccccccggacgtacttcggtgggttgaacttgcaaagctctataggtccattggtgagtacgatgtcctccgtggcattttcacgtccgagatcggtaccaagcagattacacaatctgctctgctggcagaagcccggtctgactactccgaagctgccaaacagtatgatgaggccttgaataaacaagactgggtggatggagaacctacggaggctgaaaaggacttttgggagctggctagcctcgattgctataaccacttagccgaatggaagtccttggaatattgcagcactgcatcaatcgacagcgagaacccccccgacctaaataagatatggagtgagccattctaccaggaaacctatctaccatacatgattcggagcaagttgaaactgctcctccagggggaagctgaccagtctctgctcacctttatcgataaggccatgcatggggagttacaaaaggccatcttggagcttcactacagccaggaattgtctctgctgtacctcctgcaggatgacgtcgatcgcgccaagtattacattcagaacggtatccagagcttcatgcagaattactcctcgattgacgtcctccttcatcagagtcggctgaccaaattgcagtctgttcaagccctgacggaaatccaagaattcatatcattcataagtaagcaggggaacttgtcatcgcaagttcctttaaagcgattacttaatacctggaccaaccgatacccagacgcgaaaatggacccaatgaacatatgggacgacatcataacaaatcgttgtttcttcctaagcaagatcgaagagaaactgacccctctgcccgaagacaattcgatgaacgtggaccaggacggcgaccccagtgatcggatggaggtgcaggagcaggaagaggatattagttccctgatccgatcttgtaaatttagtatgaagatgaagatgattgatagcgcaagaaaacaaaacaacttttccctggccatgaaactattgaaggaactgcataaggagtctaagacgcgggacgattggttggtttcttgggtacagtcatactgcaggctctcccattgtcgaagcagaagtcaagggtgctccgaacaggtgttgacagtacttaagaccgtctcattgctcgacgagaataacgtcagttcctacctcagcaaaaacatcttagcatttagagatcagaacatcttgctgggtaccacctataggatcatcgcgaacgccctgagcagtgagccggcatgccttgccgaaattgaagaggacaaggcccgtcggatcctcgaactgtccgggagctcatcagaggatagcgaaaaagtgatcgccggcctttaccagcgtgctttccaacatctctcagaagctgttcaagccgcggaggaggaggcccagccaccgtcttggtcttgtggacctgctgccggtgttatcgacgcgtacatgacactggccgacttttgcgaccagcagctccgcaaggaagaggagaatgcgtctgtaattgactcagccgaactccaggcatatcccgcgctggtcgtagaaaagatgttgaaagccctgaaacttaacagcaacgaggccaggcttaagttcccccgcctgctgcaaataattgagagatatccagaagagacattgtcattgatgacgaaagaaatatcctccgttccgtgttggcaattcattagctggattagtcacatggttgccctcctcgacaaagatcaggccgttgctgttcagcacagcgtggaagagattaccgataactacccacaggccatcgtatatccgttcatcattagttcagagtcatatagctttaaagacacctcgacgggccacaaaaacaaggagtttgtggccaggatcaagagcaaactagaccagggaggggtgatccaggactttatcaatgcacttgatcagctgagtaatcctgagctcctttttaaggactggagcaatgatgtcagggctgagctggccaaaacccccgtaaacaagaaaaatatagagaagatgtacgagcgcatgtacgccgctcttggcgaccctaaagcgcccggacttggcgccttcaggcggaagttcattcagaccttcggaaaggagttcgacaagcacttcggaaagggcggatcgaaactcctgcggatgaagcttagcgatttcaacgacattacaaatatgttgctcctgaagatgaacaaggatagtaagcctcccgggaacctcaaggaatgtagcccctggatgtcggatttcaaagtcgaattccttaggaatgaactcgaaatccctgggcagtacgatggccggggcaaacccctgcctgagtaccacgtgaggattgccgggttcgatgagcgggtcacagtgatggctagcctccggaggccaaaacgtataataatccgaggtcacgatgaacgtgaacatccattcctcgtcaagggcggcgaggatctcagacaagatcagcgagtggaacaattgtttcaggtgatgaatggcattttggcccaggacagcgcctgtagccagcgtgccctgcagctacggacatacagcgtcgttcctatgacctcttccgaccctcgcgccccaccctgtgaatataaggattggctcactaaaatgtctgggaaacatgatgtgggcgcatacatgctgatgtacaagggagcaaatcgaacagaaacagtgacctcattccggaaacgagaatcaaaggttccagcggacttactcaagagggcctttgttcggatgtcaacctctccagaggcctttctcgccttacggagccattttgccagcagccacgcccttatttgcatctcccactggatcctgggcattggagaccgacacctaaacaatttcatggtcgcaatggagaccggcggcgtgatagggattgacttcgggcatgcatttggaagcgcaacccaatttctccctgtccctgaattgatgcctttccggcttacccggcagttcatcaacttaatgctcccaatgaaagagaccgggttaatgtactcaatcatggtccatgcgctgcgagcattcaggtccgatccaggcctgttaacgaacaccatggacgtgtttgttaaagagccttccttcgactggaaaaactttgaacagaaaatgctgaagaaaggaggcagttggattcaagaaataaacgtggccgagaagaactggtacccacgccagaaaatttgttacgcgaaacgtaagctggcaggagctaacccagctgtgatcacttgcgatgaactgctacttggacatgagaaagccccagccttccgtgactatgtggcagttgcgcggggctcaaaagatcacaacatccgcgcacaagagcctgaatccgggcttagtgaggagactcaggtgaagtgtctgatggaccaggcaaccgatccaaatatcctcgggaggacatgggagggctgggagccctggatgtag

SEQ ID NO: 25834 - DNA, 444 bp, synthetic construct
  misc_feature 1..444: note = Description of Artificial Sequence: Synthetic coding sequence
  source 1..444: mol_type = other DNA
atggccgcccagcggctgggcaagcgggtgctgagcaagctgcagagtccctcccgggcccgggggccaggcggctctcctggcgggctccagaagcggcatgcaagagtcactgtgaagtatgatcggcgcgagctgcagagacggctggacgtcgaaaagtggatcgatggtcgacttgaagagctgtataggggtatggaagccgatatgcctgacgagataaacattgatgaactgctagagttagaatcagaagaagagagaagtcgcaagatacaggggctcttaaagtcttgcggcaagccagtggaggacttcatccaggagctactggcaaagctgcagggattgcaccggcagcccggcttaagacaacctagccccagccacgacggtagcctctctccattacaggatagagcccgaaccgcccacccctag

SEQ ID NO: 25835 - DNA, 363 bp, synthetic construct
  misc_feature 1..363: note = Description of Artificial Sequence: Synthetic coding sequence
  source 1..363: mol_type = other DNA
atggccgcccagcggctgggcaagcgggtgctgagcaagctgcagagtccttctagagccaggggacctggtggaagccccggaggattgcagaagcgtcacgctcgcgtcaccgtcaagtacgacagaagagagctgcagcggcggctcgatgtggagaaatggattgacggacggctcgaggagctttatagaggaatgggactgttaaaatcctgcgggaagcccgtagaggacttcattcaggaacttcttgcaaaactgcaagggttacacaggcagccaggcctgcgtcagccatcccctagccatgacggttccctttcgcctctacaggaccgtgcaagaaccgcccatccatag

SEQ ID NO: 25836 - DNA, 2025 bp, synthetic construct
  misc_feature 1..2025: note = Description of Artificial Sequence: Synthetic coding sequence
  source 1..2025: mol_type = other DNA
atggcccccggccaggccccccaccaggccaccccctggcgggacgcccacccgtttttcctgttgagcccggtcatgggtctgttatcccgtgcctggtcccggctgcggggactgggacccttggaaccgtggttagtggaggctgtcaagggtgcagccctggtcgaagccggcctggagggcgaagcgcgcacgccgctggctataccacataccccctggggtcgcaggcctgaagaggaggcggaggactcgggaggaccaggtgaggaccgagaaactctcgggctgaagacgagtagctctttacccgaagcgtggggcctcctggatgacgacgacggaatgtacggcgaacgagaagccacctccgtcccgcggggccagggtagccaatttgccgacggtcagcgggctccacttagtccaagtctactcatccgcaccctccaaggtagtgacaagaacccgggcgaagagaaagcagaggaagaaggggtggctgaggaagagggcgtgaataaattcagctaccctcctagccaccgcgagtgttgtccagcagtcgaggaggaggatgatgaggaagcggtgaagaaggaggctcatcgcacttcaacaagcgctctcagtccagggtcgaagcccagtacctgggtatcatgcccaggagaagaagagaaccaggccacagaggacaagcgtacagagaggagtaaaggggctagaaagactagcgtatcaccgaggtcatctggctctgacccaagatcatgggagtatagatccggagaagccagcgaagaaaaggaggagaaagcacacaaggagactggaaagggcgaggcagctccaggcccgcagtcttcagccccagcccagcggccccaactgaaatcctggtggtgtcagccgtcagatgaagaggagggcgaagtgaaagccctcggcgctgctgagaaggacggggaggccgagtgtcccccctgtataccccctcccagtgcattccttaaggcttgggtatactggcccggcgaggacaccgaggaagaggaggatgaggaggaggatgaagactctgactccggctcagatgaggaagagggggaggcggaagcatcaagctcaacgcctgccacaggagtcttcctgaagtcttgggtgtatcagcctggggaggatactgaggaagaagaagatgaggacagcgacaccgggtctgccgaagacgaaagagaagcggaaactagtgcatctacccccccggcatcagcgttcctcaaggcatgggtttacagacccggcgaggacaccgaggaggaagaggacgaagatgtggattcggaggacaaagaagatgattcagaggccgcacttggggaagctgagtctgatccccatcccagtcaccccgatcagagggcacatttcagaggttggggttatcgcccgggcaaagaaaccgaggaggaagaggccgccgaggactggggagaggccgagccttgtccctttcgggtcgcaatctatgttccaggagagaaaccacccccaccatgggcaccaccccggctgcctctgagactgcagcgccgtcttaaacgcccagagacaccgactcatgacccagaccctgagacacctcttaaggcccggaaagtaagattttccgagaaggtgaccgtgcatttcctggccgtttgggccggcccagctcaggccgcccggcaaggaccttgggaacaactcgccagggaccgcagcagatttgcccggcggatcactcaggcacaggaagaactttctccctgtctcacaccagcggctcgtgccagagcttgggcaagacttcgaaatcctcctctagccccaattccagctctgacacagacgctgccatcttcctctgtgccctcgagccccgtccagactacccccctctcccaggcagttgcaaccccttcacggagctccgcagcagctgccgctgctctcgaccttagcggacggcggggctag

SEQ ID NO: 25837 - DNA, 1545 bp, synthetic construct
  misc_feature 1..1545: note = Description of Artificial Sequence: Synthetic coding sequence
  source 1..1545: mol_type = other DNA
atgaaggccgaggaggagggcgtggccgaggaggagggcgtgaacaaattttcatatcccccatcgcatagggagtgctgtcccgccgtggaagaggaggatgacgaggaggctgtgaaaaaagaagcacaccggacaagcactagtgccctaagtccgggatctaagccctccacctgggtaagctgtccaggggaggaagaaaatcaagccactgaagacaaacggaccgagcgctccaagggagccaggaagaccagcgtttcgcctagatccagcggctccgaccctaggtcctgggagtaccgctcaggggaggcctctgaggagaaagaggagaaagcccacaaggaaacggggaagggagaagccgctcccggtccacagagctcggcaccagcgcagaggcctcagctgaagtcctggtggtgccaaccatccgacgaagaggagggtgaggtgaaggcgctgggcgctgcagagaaagacggagaggccgaatgccctccttgtatccctcctccaagtgcgttcctgaaagcatgggtctactggcccggcgaagatacagaggaagaagaggacgaggaggaagatgaagattctgacagcggctccgacgaggaggagggtgaagccgaggcttcgagttccacacccgcaacgggagtttttctgaaatcatgggtgtatcagcctggcgaagatacggaagaagaggaggacgaggacagcgacacgggtagtgccgaagatgagagagaagcggaaaccagcgctagcactccacctgcttccgcttttctaaaggcttgggtctatcgtcccggggaggatacagaagaggaagaagatgaggatgtagattcggaggacaaagaggacgacagcgaggcagctttgggggaggccgagagcgatccccacccaagccaccccgatcaaagagcgcactttcgcggctggggttaccgaccaggcaaggagactgaggaagaagaagcggccgaggattggggagaagccgaaccctgccccttcagagtggcaatttacgtaccaggagaaaagccccctcccccatgggcccctcctagactaccattacgcctgcaacgccggctcaaacggcctgagacaccaactcatgatccagatcctgagacccctctaaaggctcgtaaggtgagattttccgagaaagtaacagtgcattttttggccgtctgggctggcccagcgcaggcagcccggcagggcccttgggaacagttagcccgagatagatccagatttgcaagacggattacgcaggcccaggaagaactgagcccctgtcttactcctgccgctagagctcgcgcctgggcgcggttacggaacccccctctcgcccccatccctgcactaacgcagacattaccctcttcatcagttccttcatctcccgtgcagaccacacccttgtcacaggccgtggccactccctccagatccagcgcagccgctgccgccgctctggatttatccgggaggagggggtag

SEQ ID NO: 25838 - DNA, 1899 bp, synthetic construct
  misc_feature 1..1899: note = Description of Artificial Sequence: Synthetic coding sequence
  source 1..1899: mol_type = other DNA
atgccctggctggtggaggccgtgaagggcgccgccctggtggaggccggcctggaaggagaagcacgaacgccgctcgctatccctcataccccctggggtcgccgcccggaggaagaggcagaagactccggaggtcctggcgaagaccgcgagacattgggactgaaaacttcctcgagtctgcccgaggcatggggcctgctggacgacgatgacggaatgtacggcgaaagggaagccacgtccgtccctagaggccagggttcccagttcgctgacgggcagcgcgcccccttgagtcctagcctgctcatcagaactctccaaggttctgacaaaaatccgggcgaggaaaaagcggaagaagaaggggtggccgaagaagaaggggtcaataagttttcctatccgccatctcacagggaatgttgcccggcggtagaagaagaggatgacgaggaagcagtcaagaaagaagcgcacaggacctctacttccgccctgagcccgggaagcaaaccatcaacttgggtaagttgcccaggcgaggaggagaaccaagccaccgaggataagaggaccgagcgcagtaaaggcgcgcgtaaaacctcagtgtcaccccgctcctctgggagcgatccccgcagttgggagtatagatcaggagaagcaagcgaggagaaggaggaaaaggcccacaaagagactgggaagggcgaggccgcccccggacctcagtcgagcgctcccgcccagcgcccccaactcaaatcatggtggtgccagcccagtgacgaggaggagggcgaagtcaaagccctcggagcagcagaaaaagacggggaggccgagtgcccaccctgtatcccaccgccgtcagcgtttctcaaggcctgggtctattggcctggcgaagataccgaggaagaggaagatgaagaggaggacgaggatagtgattcgggtagcgacgaagaagagggcgaagccgaggcaagtagcagcacccctgcgaccggagtgttcctgaaatcttgggtctaccagcccggggaggatacagaagaggaggaagacgaggactctgatactggtagtgctgaagacgaaagggaagctgagacttccgcgagcacaccacccgcctcagcctttctgaaagcctgggtgtaccgtcctggcgaggataccgaagaggaagaagacgaagatgtggatagtgaggacaaggaagatgactctgaggccgccctgggtgaggccgagagcgatccacatccctcccatcctgaccagcgggctcactttcgggggtggggatatcgccccggaaaggaaacggaagaagaagaagccgcagaggactggggagaggccgagccctgcccttttcgcgtggcgatctatgtgcccggcgagaaacctccaccgccttgggcgccgccgagactgccattacgattacagaggaggttgaagcggccagaaaccccaactcacgacccagaccctgagactccactaaaagccagaaaagtgcgcttcagcgagaaggtgaccgtgcacttcctcgctgtatgggccggtccagcccaggctgcccggcagggaccatgggaacagttggccagagacagatcccgtttcgccaggagaataacacaggcacaggaggagctgtcgccctgcctgacccccgccgccagggccagggcttgggcacggttgcgcaatccccccctggctcccatcccagcattgacgcagacccttccctcctcaagtgtgccgtcctcgcccgtccagactacacccttatcacaggcagtggctactccatccagatcaagtgccgccgctgccgccgccctggacttgagcggtaggagagggtag

SEQ ID NO: 25839 - DNA, 1671 bp, synthetic construct
  misc_feature 1..1671: note = Description of Artificial Sequence: Synthetic coding sequence
  source 1..1671: mol_type = other DNA
atggccggcgccagcgagctgggcaccggccccggcgccgccggcggagacggagatgactctttgtacccgatcgcagtgttgatcgacgagctgagaaatgaagacgtacagcttcgtctgaacagcataaagaaactgagcaccattgctcttgccttgggagtggagcgaacccgcagcgagctactgcccttcctgaccgataccatttatgatgaagacgaggtgctgctagcactggccgagcagctcggaaattttacaggccttgtgggaggtcccgattttgctcattgcttgttaccacctctagagaacctcgcgaccgttgaggaaaccgtggtacgtgacaaggccgtggagtccctgcggcaaatttcccaggagcacaccccagtggccttggaagcctacttcgtccctctcgtgaagagattagctagcggcgactggtttacatcccgaacatccgcctgcggtctatttagtgtatgttatccaagggccagcaacgctgttaaagcggagatccgacagcagttccgatctctgtgcagcgacgatacccctatggtcagacgagccgcagcaagcaagcttggcgaattcgctaaggtcctggaacttgactcagttaagtctgagattgtacccctttttacttccttggcctccgatgagcaggacagtgttagactccttgcagttgaggcctgcgtttctatcgcgcagctgctttctcaggacgacctggagacactggtcatgcctaccctgagacaagctgccgaagacaaatcttggcgtgtgcggtatatggtggccgatagattctcagagctccagaaggccatgggccctaagattacactcaacgacttgatacccgcctttcagaacctcttgaaagattgcgaggcggaggtcagagccgccgccgcacataaggtgaaggagctcggggaaaatctgcccatcgaggaccgcgaaactatcataatgaatcagattctgccttacattaagtgccctgatgtccggttgaacatcataagcaatctggactgtgtgaatgaagtcatcggcattaggcagctttctcagtccctcctcccggccatagtggaactggccgaggacgccaaatggcgagtacggctcgccatcatagaatatatgccacttctggcgggccagcttggcgttgagttcttcgatgagaagctaaacagtctgtgcatggcatggctcgtggatcacgtgtacgcgattagagaggctgcaacgaacaacctgatgaaactggtgcagaagttcggtactgagtgggcacagaacactatagtgcccaaggtcctagtaatggccaacgatccaaactacctacatagaatgactacactcttctgcataaatgcactgagcgaagcgtgtggccaagaaatcactacgaaacagatgttacctatcgtactgaaaatggctggggaccaagtggccaatgtccgtttcaacgtggctaaatccctgcaaaaaataggtcccatccttgacactaatgccctgcagggcgaggtgaagcccgtcctgcagaaattgggccaggacgaagacatggacgtaaaatacttcgcacaagaggccatcagtgtgcttgctctggcatag

SEQ ID NO: 25840 - DNA, 1770 bp, synthetic construct
  misc_feature 1..1770: note = Description of Artificial Sequence: Synthetic coding sequence
  source 1..1770: mol_type = other DNA
atggccgccgccgacggcgacgacagcctgtaccccatcgccgtgctgatcgacgaactccggaatgaggacgttcaactgagactgaattcgatcaaaaaattatccacgatcgctctggcgctcggggtggagcgcacccggtccgaacttctgccgtttttgacggacaccatttatgatgaggacgaggtgctcctagccctggccgaacagctcggtacattcactaccctcgtgggtgggccggaatatgtccactgtctgttgcctcctctggaaagcctcgccaccgtagaggagacagttgtgcgggataaggctgttgaatcgttaagggctattagtcacgagcacagtcccagtgatttagaggcccatttcgtcccactggtgaagcggctggccggcggagattggttcacgtccagaactagtgcgtgcggcctattttccgtatgctacccacgcgtctcttccgcggtaaaagcagagctgcgccaatatttcagaaacctgtgctccgacgatactcccatggtgagaagggccgccgcctccaagctgggagagttcgccaaagtgctggaactcgacaatgttaaaagcgaaattatccccatgttctcgaacctggccagcgatgagcaggactctgtgaggctgcttgctgtggaagcctgcgtgaatatcgctcagctactgccccaggaggatctggaggccttagtgatgcccactctacgacaggccgccgaagacaaatcctggcgcgtgcggtacatggtcgctgacaagtttaccgagctgcagaaggccgtcggacctgagatcactaaaacagacctcgtaccggctttccagaaccttatgaaggattgtgaggctgaagtgagggccgctgccagccacaaagtcaaagaattctgcgaaaatttatctgcggactgtagagagaacgttatcatgtcgcagatcctgccctgtatcaaagaattagttagcgatgccaaccagcatgtgaaaagtgctctcgctagtgtcattatgggacttagtccaattctcggtaaagacaacacaatcgagcacctgctgccactcttccttgcccaactgaaggatgaatgccccgaggttcgtctcaatattatctctaacctcgattgcgtaaatgaggttattgggataaggcagctatctcagagtctattaccagcgatcgtggagttggcggaggacgcaaagtggagagtccggttagccatcattgaatatatgcctctcttggctggccaactgggtgttgagtttttcgatgaaaagctgaattcgttgtgcatggcttggttggtagaccacgtttacgcaatcagagaggccgccacaagcaacctcaaaaagttggtagagaaattcggaaaggagtgggcccacgctacgatcataccaaaagtgttggccatgtccggcgacccaaactacctgcaccgaatgacgaccctcttctgtattaatgtactatccgaagtgtgtggacaggacatcacaactaagcatatgttgcccaccgtcctgagaatggcgggcgaccccgtagccaatgtgagattcaacgtcgccaagagtctgcagaaaatcggccccatcttggataattctactctccagtccgaggtgaagccgatactggagaagctgacgcaggatcaagacgtggacgtgaagtacttcgcgcaggaggccctgactgtgctgtcactcgcttag

SEQ ID NO: 25841 - DNA, 1740 bp, synthetic construct
  misc_feature 1..1740: note = Description of Artificial Sequence: Synthetic coding sequence
  source 1..1740: mol_type = other DNA
atggccgccgccgacggcgacgacagcctgtaccccatcgccgtgctgattgatgagctgcgtaacgaggatgtgcagctgagactgaattcaattaaaaagctgtcaactatcgcactggcactgggagtcgagcggactcgttccgagctgctgccattcttaaccgataccatctatgacgaagacgaagttctgctggccttagctgaacaactgggcacctttacgaccttggtgggcggtcctgaatatgtccactgcctcctgccgcctctggagagcctagccaccgtggaatctctccgcgccataagccacgagcattctccaagcgacttggaagcacacttcgtgcccctcgtgaagcgactggctgggggcgactggttcacatctcggacatctgcttgtggcctcttctctgtgtgctacccacgcgtgagctcagcagtcaaagcagaattgcgccagtactttcggaatctgtgctccgatgacacgccaatggtaaggcgagccgccgcaagtaaactcggggaatttgcaaaagtgttggagctggataatgtgaaaagcgagattatccccatgtttagcaacttagcaagcgacgagcaagactccgttagactgctcgctgttgaggcatgcgtgaatatcgcccaactgctcccccaggaagacctcgaggctctggtgatgcccaccctgaggcaggctgcggaggataagagttggcgagtaagatacatggttgctgacaagttcaccgagttgcagaaagcagtcggacctgagattactaagactgatttagttccagccttccaaaacctgatgaaggactgtgaagccgaggtgcgggcagctgcgtctcataaggtgaaagagttctgcgaaaatctgtccgctgactgccgggagaatgtgataatgagtcaaatcttgccctgcataaaagagctagtctcagacgcgaaccagcatgttaagagcgctctcgctagcgtcattatgggcctgagccccatacttgggaaggataatactattgaacacttgctgccgctgtttctggcccagctgaaagacgaatgccctgaggttagactcaacattatcagcaatctggattgtgtgaatgaggtcattggtattaggcagttgagccagagtctgctgcctgcaattgtcgagctcgccgaggacgctaagtggagggtccgactggccattattgaatacatgcccctgttggctggccagctgggcgtggagtttttcgatgaaaaattaaacagcctgtgcatggcctggctggtggaccacgtttacgccatcagggaggcagctacttcgaacctgaagaaactcgttgagaaattcggaaaggaatgggcacacgcgactatcataccaaaagttctggccatgagcggcgacccgaattacctccacagaatgactaccctattttgtatcaacgtgttgagcgaagtgtgcggacaggatattaccaccaagcacatgctgcctactgtgctgagaatggccggcgatcctgtggccaacgtgcggttcaacgttgctaaatctttgcagaagatcggcccaattctggataacagcactctgcagagtgaggtgaagcccattctcgaaaagcttacccaggatcaagatgtggacgtgaaatattttgctcaggaagccttgacggtcctttccctggcctag

SEQ ID NO: 25842 - DNA, 471 bp, synthetic construct
  misc_feature 1..471: note = Description of Artificial Sequence: Synthetic coding sequence
  source 1..471: mol_type = other DNA
atggccgccgccgacggcgacgacagcctgtaccccatcgccgtgcttatcgatgagctgcgaaatgaagacgtgcagcttagattaaatagcaatctcaagaagctcgttgaaaagtttggaaaggagtgggcccacgcgaccattattcctaaagtgcttgccatgagcggcgatcccaattacctgcaccggatgacgaccctgttttgtatcaacgtactgtcagaagtgtgcggacaagatattaccacgaagcacatgctgcctacagttcttcggatggccggggatccagtggcaaatgttcgattcaatgtggccaaaagcttgcagaagataggtcctatcctggataattccacactacaatcagaggtaaagccaattttggaaaaactcacacaggatcaagacgtggatgtgaagtatttcgcacaggaagcactaacagtgctgtctctggcttag

SEQ ID NO: 25843 - DNA, 1605 bp, synthetic construct
  misc_feature 1..1605: note = Description of Artificial Sequence: Synthetic coding sequence
  source 1..1605: mol_type = other DNA
atgcggaccttcagcttcgccagcaccgccagccggagctgccccccaagtccctggccccttggcctcaagggaccggaggtttcgttctgtctctcgctccagccccctctggaatctttagctactgtggaagaaactgtggttcgggataaggccgtcgagtccctgcgagccatctcacatgagcatagccctagcgatctggaggcgcacttcgtgcccctggtcaagagattggccggcggagactggtttacctcaaggacaagcgcttgcggcctcttcagtgtctgttacccacgggtgtcatcagctgtgaaggcagaactgcgccagtattttcgaaacctgtgctctgacgatacgcctatggtcagacgcgcagcagcctctaaactcggcgagtttgcaaaggtgctcgagctcgacaatgtgaaatccgagataatacctatgttcagcaaccttgcaagtgatgaacaggacagtgtccgattattggcagtggaggcctgtgtgaatatcgcccagctgctcccacaggaagacctagaggctctggtgatgccaaccctgcggcaagcagcggaggacaagtcctggagggttcggtatatggtggccgacaagttcacagaactgcagaaagccgtcggaccggagatcactaagaccgatcttgtgccagcgttccagaacctcatgaaagattgcgaggctgaggtccgcgctgccgcctcccacaaggtgaaggagttctgcgaaaacctcagtgctgattgtcgggagaacgtgataatgtctcagattctgccttgtatcaaggaactggtgtcagacgccaaccagcatgtgaagagtgcattggcttctgtgatcatgggtctcagcccaatcttgggaaaggacaacactattgaacatttactgccgctgtttctcgcccaactgaaggacgaatgcccagaggtacgcctgaatataataagtaacctcgattgtgtcaatgaggtgatcgggatccggcagttgtcacaatctctgttgcctgctatcgttgagctagcggaagatgcaaaatggcgtgtcagattagccatcatcgaatacatgcctctgctcgccggacaactgggggtggagtttttcgacgaaaaattaaattccctctgtatggcgtggctagtagaccacgtatacgcaattagagaggccgctacatctaatctgaaaaagctggttgagaagtttggtaaggagtgggcccacgctactattatcccaaaagtgctggcaatgagcggcgacccaaactaccttcatcgcatgaccacattattctgtatcaacgtcctctccgaggtgtgtggtcaggacatcacaaccaagcacatgcttcctaccgtgctgagaatggcaggagatccagtcgccaacgtgagattcaatgtggcaaaatcactgcagaaaattggacccatattggataattcaacacttcagtcagaagttaaacctattttggaaaagctaactcaggaccaggatgtcgacgtgaagtattttgcacaggaggctttgacagtcttgtcgcttgcctag

SEQ ID NO: 25844 - DNA, 2004 bp, synthetic construct
  misc_feature 1..2004: note = Description of Artificial Sequence: Synthetic coding sequence
  source 1..2004: mol_type = other DNA
atggccggcgccagcgagctgggcaccggccccggcgccgccggcggcgatggggatgactctctctatcccatagcagtgttgatagacgaattacgcaatgaggacgtacagctcaggctgaattctattaagaaattgagcacaattgcactggcgttgggcgtcgagcgcacccgatcggagttactgccctttttgactgatactatctacgacgaagatgaggtactattggcactcgctgagcagctgggtaactttaccggactcgtgggggggccggatttcgcccactgcctactgcctcccctggagaacctggctaccgtcgaagagaccgtggttagggacaaggcggttgaaagcctgcgccaaatcagtcaagaacacacccctgtcgcgctcgaggcctattttgtgcccctcgtgaaacgcttggcttcaggagactggtttacaagcaggaccagcgcctgcggcctgttctccgtatgctacccacgcgcaagcaacgccgtaaaggctgagattcgccagcagtttcgcagtctgtgcagtgatgacaccccaatggtgcgcagggctgcggcttctaaactgggagagtttgcgaaggttctcgagctcgactcagtgaagagcgaaattgttccgctattcacctcgctggcctctgatgaacaggatagtgtgagattacttgctgtcgaagcatgcgtcagcatcgcccagcttctgagtcaggatgacctggagaccctcgtgatgccaaccttgagacaggcagccgaggataagagttggcgggtgcggtacatggttgccgaccgtttctcagagctgcagaaagctatggggccgaagatcacactgaatgatttaatcccggcttttcagaacctgcttaaggattgtgaggctgaggtaagagcggcggccgctcacaaagtgaaagaattgggtgagaatcttcctatagaggaccgggagacaattatcatgaatcagattcttccatatatcaaggagctggtgtctgataccaaccagcatgtcaagtcagccctggccagcgtaattatgggattatctaccatcctggggaaggagaataccatcgagcacctcctgcccctgttcctcgcacagctgaaggatgaatgccccgatgtgagactgaacattattagcaatctagattgcgttaacgaggtaatagggattcggcaattatctcagtcgttactgccagccatcgtagagctcgccgaggacgctaaatggcgagtccggctcgctatcatcgaatatatgccgctgctcgctggtcagctgggagttgaattcttcgacgagaagttgaatagcctctgcatggcatggttggtcgatcatgtctatgctataagggaagccgctaccaacaacctcatgaagctggtacaaaaattcggaacagaatgggctcagaatactatcgttccaaaagttctggtcatggcgaatgacccaaactacctgcatcgcatgacgacactcttctgtatcaacgccttatcggaggcatgtggtcaggaaatcactactaagcagatgctgccaatcgtactcaaaatggccggagaccaagtcgccaacgtgcgcttcaacgtagcgaaaagtctccaaaagatcggccccatcctcgacactaacgccctgcagggagaggtgaagccagtgcttcaaaaactcggccaagacgaggatatggatgtcaaatactttgcccaagaggccattagcgtggtcgcacaacgccttcgtaaattggaatttcctgtgaaagactccggcgaacctagcgtcccccgagccgacaagaatcacttccctcgaccgacagtgcctggcgaggatatgggcaagggacctgtttatcaactgaggggcgatacccgggacaccctggcccagcttgggattgcagagttggtccacttctcacagtctaccgactag

SEQ ID NO: 25845 - DNA, 1425 bp, synthetic construct
  misc_feature 1..1425: note = Description of Artificial Sequence: Synthetic coding sequence
  source 1..1425: mol_type = other DNA
atggccggcgccagcgagctgggcaccggccccggcgccgccggcggagatggtgacgattcgttgtatccaatcgccgtcttaattgacgagttacgaaatgaggacgttcaactgagattgaattccatcaagaagctcagcacaattgcactggcactgggagtcgaacgaacccgctccgagctcctgcccttcctgaccgatactatctatgatgaagacgaagtcctgctggccctcgccgaacagcttggaaacttcacgggactcgtgggcggtcccgattttgcgcattgcctgcttgacagcgtacgattactggcggtggaggcttgcgtgtccatcgctcagctgcttagtcaggatgacctagagactttggtgatgcccactttgaggcaagctgctgaggacaagtcctggcgagtgagatacatggtggccgaccgattttcagagttgcagaaagccatgggacccaagataacccttaacgatcttattccggcctttcagaatttgttgaaggactgtgaggcagaggtacgggctgctgctgcccataaggttaaggaattgggggaaaatcttcctattgaagaccgagagactatcataatgaatcaaatattgccttacatcaaagagctcgtgtccgatactaaccaacacgttaagtctgcccttgcctccgtcattatgggactgagcacgattctcgggaaagaaaacacaatagagcacctcctgcccctgtttctggcacaactaaaggatgaatgtccggatgttcgcctcaatatcatcagtaacttggactgtgtcaatgaggtgattggtatccggcagctgtcccagtctcttctcccagcaatagtagagttagcagaagacgctaagtggcgggttagactggcaattattgagtatatgcccctcctggctggacagctgggagtcgagttctttgacgagaaacttaacagcctttgcatggcttggttggtagaccatgtttacgctattagagaggctgccacgaataacttgatgaaactcgtgcagaagttcgggaccgagtgggcccagaataccatcgtgccgaaggtgctcgtgatggccaatgaccctaactatttgcatcgaatgactacgctgttttgcataaacgccctgtccgaggcgtgtggacaggagattaccaccaagcagatgctgcctatagtgctcaagatggctggcgaccaggtggctaatgtgaggtttaacgttgcaaaaagccttcagaagatcggccccatcctggatacaaacgctctccaaggggaggttaaacctgtgctacagaagctggggcaagatgaggacatggacgttaaatactttgcacaggaggccataagtgttctggcccttgcttag

SEQ ID NO: 25846 - DNA, 1365 bp, synthetic construct
  misc_feature 1..1365: note = Description of Artificial Sequence: Synthetic coding sequence
  source 1..1365: mol_type = other DNA
atggccggcgccagcgagctgggcaccggccccggcgccgccggcggtgacggcgacgacagcctgtaccccattgctgtcctgattgacgagctaaggaacgaggacgtccagcttcgcctcaattcaatcaagaaattaagtacaattgctctggcgctcggagtggaacggaccaggagtgaactgctgcctttcttaactgatacaatctacgatgaagacgaggtgttattggcgctcgccgagcagctggggaactttaccggcctggtgggcgggccagactttgcccattgtctgctggattcagtccggctactagctgtcgaggcctgcgttagcatagcacagctgctcagccaagatgatctggagacgttagtgatgccgacgctcaggcaggccgccgaggataagtcttggagggttagatacatggtggcggataggttttccgagctccagaaagcgatgggaccaaaaattactctgaatgacttgatccccgccttccagaacctgctgaaggactgtgaagcggaagtgcgggcggctgcagcccacaaggttaaggagcttggcgagaacctgcccatcgaggacagggaaacaattattatgaaccaaatcttaccttacatcaaggaactggttagcgacaccaaccagcacgtcaaatcagcccttgcctctgtgataatgggattatccacgatactggggaaagagaatacgatcgaacacctgctccccctgttcctagctcagctcaaggatgagtgtcctgacgtcaggctaaatatcataagtaaccttgactgtgtgaacgaagtcattggcattcgacagttgagtcagagcctcctccctgccattgtcgaactggccgaggatgcaaaatggcgggttcgcctagccataattgagtatatgccacttctagccggccagttgggggtggaatttttcgacgagaagctgaactccctctgcatggcctggttggtggatcatgtatacgctatccgcgaggctgcgaccaacaacctcatgaagcttgtccagaaatttgggactgagtgggcgcagaatactattgttccaaaagtcctcgtgatggctaatgacccaaactatctccaccgaatgactaccctgttttgcattaacgctctctctgaagcatgtggccaggaaatcacaacgaaacagatgttaccaatagtgaagaacggacgtcgcccaagctctaagtgttctctgcagtgtgggcaaattagcaccaaagattggactaactcccgctatcaatgcttcaccggaaggagcgaagcatccacgacagaggtgcggtctcgttag

SEQ ID NO: 25847 - DNA, 1812 bp, synthetic construct
  misc_feature 1..1812: note = Description of Artificial Sequence: Synthetic coding sequence
  source 1..1812: mol_type = other DNA
atggccggcgccagcgagctgggcaccggccccggcgccgccggcggcgacggagacgatagcctgtacccaattgccgttcttatcgacgaactgcgaaacgaagatgtacagcccccgctggagaaccttgccactgtagaggagacagttgtcagggacaaggccgtggaatcacttcggcagatctcacaggagcacacgccggtcgccctggaggcctacttcgtgccacttgtgaaacgcttagcatccggcgactggttcacatctcggacatctgcgtgcggattattttcagtatgttatcccagagcttctaatgctgttaaagcagagatccgccagcagtttcgcagcctatgttcagatgataccccaatggtgcgtagagccgctgcctccaaactgggcgagtttgctaaggtgctcgaactggacagcgttaaatcagagatcgtaccgctgttcacatctcttgcttccgatgaacaggactcagtcaggctactcgccgtcgaagcttgtgtttctattgcccagttactgagccaggacgatctggagactctagtgatgcccactttgcgacaggccgccgaggacaaaagttggcgagtgcgctacatggtcgcggacagattttcagagttacagaaggctatgggcccaaaaattaccctcaatgacctcattcccgcctttcagaatctactcaaggattgcgaagcggaggtgcgggccgccgccgcgcacaaggtgaaggagctgggtgagaacctgcccattgaagatagggagacgatcatcatgaaccaaatcctcccctatatcaaagaactggtcagcgacaccaaccagcatgtcaagtcagcacttgcatctgtcattatgggactctctacaatactgggtaaggagaatacaattgagcacctgttgccactgtttttagcacaactcaaggacgagtgccctgacgtgcggttaaacatcatatccaacctcgattgtgtaaatgaggtaattggcattcgccagctaagccagtccctcctgcccgctatcgtcgagctcgcagaggatgcaaaatggcgggtacgtcttgccatcatcgaatatatgccccttcttgcaggtcaactcggcgtcgaatttttcgacgagaaactgaattctctatgcatggcctggctggtggatcacgtctacgcaattcgggaggctgccacaaataaccttatgaaattggtccaaaagttcggaactgaatgggcccagaatacgatcgtgcctaaggtgttggtgatggcaaacgaccccaactatctgcaccggatgaccaccctgttctgtattaacgctctcagcgaggcttgcggccaggaaatcaccaccaagcagatgttgcctatcgtgctcaaaatggccggagatcaggtggcaaacgtgcggtttaatgtggccaagagtttgcaaaaaatcggccctattctggacacaaatgccctgcaaggcgaggtgaagcctgtgttgcaaaaactgggacaagatgaggatatggatgtgaagtactttgcccaggaggctatttcggtagtcgctcagcgtctgcgcaagctggaatttcctgtgaaagattccggggaaccgagcgttccccgagccgacaagaaccatttcccgcgccctaccgttccgggggaggacatgggaaaaggtccggtttatcagctccgcggcgacacaagggacacactcgctcagcttgggattgccgaactagtgcactttagccagtctacggattag

SEQ ID NO: 25848 - DNA, 1323 bp, synthetic construct
  misc_feature 1..1323: note = Description of Artificial Sequence: Synthetic coding sequence
  source 1..1323: mol_type = other DNA
atgatgcagctgaccttctggctgcgggtgcccccccccttcagccactttaagcgccagtttaggagtctatgtagcgacgacaccccaatggtgagacgggccgcggcctcaaagttaggggaatttgccaaagtgctggagttagactccgtgaagagcgaaatcgtgccgctctttacttccctggccagcgacgagcaggattctgtgagactcctagccgtcgaagcttgtgtctctatcgctcagctgctctcccaggacgatctcgagaccctcgtcatgccaacactgcgtcaagcggccgaggataagagctggcgtgtgagatatatggtggccgacaggttctccgagctccagaaagctatgggcccaaagataaccttgaatgatctgatccctgcattccagaacctgctgaaagactgtgaggccgaggtccgggccgctgcagcgcacaaagttaaagagctgggcgagaaccttccaattgaggatcgggagacaattatcatgaaccagattttgccgtacatcaaagaacttgtgtccgataccaaccaacacgttaaaagcgcccttgcatctgtaattatgggcctgagcacaatactgggcaaggaaaatactatagaacacctgcttccactttttctggcccagctaaaggacgagtgtcctgatgtcagactgaatataataagtaacttggactgcgtcaacgaggtcatcggaattaggcaactcagtcagagccttctcccagctatcgtcgagctcgccgaggatgctaaatggagagtgcgactggccatcattgagtacatgcctttactggccggccagttaggtgttgagtttttcgacgaaaaattgaactccctgtgtatggcttggctggtcgaccacgtgtatgccatcagggaggcggctaccaataatctcatgaagctggtgcagaagttcgggaccgaatgggcccagaatactatcgtacctaaagtgcttgtcatggcaaacgatcccaattatctgcatcggatgaccacactgttctgcatcaacgctctgagtgaggcatgtggacaagagattaccacaaagcagatgttaccaatcgtgcttaagatggccggagatcaagtcgcaaatgtgcgcttcaacgtggccaagtcacttcagaaaatcggcccaatcctggatacaaacgcactccaaggtgaggtgaagcccgtgctgcaaaagctgggacaagatgaggacatggatgtaaagtatttcgcacaggaggccatatctgtcctcgcactggcctag

SEQ ID NO: 25849 - DNA, 1806 bp, synthetic construct
  misc_feature 1..1806: note = Description of Artificial Sequence: Synthetic coding sequence
  source 1..1806: mol_type = other DNA
atggccggcgccagcgagctgggcaccggccccggcgccgccggcggcgacggtgacgacagcctctatcctattgccgtgcttatcgatgaactacgcaacgaagatgtacagctgaggcttaattccattaagaagctgagtaccatcgcccttgccttgggggtcgagagaacaagatccgagctcttacccttccttaccgatacaatctatgatgaggacgaggtcctcttggccctggccgaacagttgggaaatttcacaggcctggttgggggcccagacttcgcgcactgtctgctccctcccttagaaaatctggcaacggttgaagaaaccgtggttagggacaaagctgtggaaagcctgagacagatttcccaggagcatacccctgtcgcattagaggcatactttgtgccactggttaagaggcttgcatccggagactggttcacatcccgtacttctgcatgcggcctcttctcagtatgctacccacgggcttccaacgccgttaaagcagagattcggcagcagttccgctcactgtgtagcgatgacacacctatggtgcgtcgtgcagcagccagcaaactaggagagttcgctaaagtactggagctcgattccgtcaagtctgagatagtgcctctgtttacgtcactggcatctgacgaacaggactcggtgcggctgcttgccgtcgaagcttgtgtttcaatcgcacagctgctctcccaggacgacctggagacattggtgatgccgacgctgaggcaagctgccgaggacaagtcctggcgagtgcgatatatggtggccgaccgtttttctgaattgcagaaggcaatgggtcctaaaattactctgaatgatcttatcccagcattccagaacctgctcaaagattgcgaggctgaagtccgggccgcggcagcccataaggtaaaagagctcggggaaaatctgccaatcgaggacagggaaaccatcatcatgaatcagattctgccctacatcaaagagctggtgtctgacaccaatcagcatgtgaaatctgcccttgccagcgttatcatgggcctaagtaccatcctcggcaaggaaaatacgattgagcacctgctcccactattcctcgcccagctgaaggatgagtgtcccgacgtccggctcaatatcattagtaatttggactgtgtgaacgaggtgattggcatcaggcagctcagccagtcacttcttcctgccatcgtggaattggcagaggacgcaaaatggcgggtgaggctggccatcattgaatacatgcctttactcgccgggcagttgggggtggagttcttcgacgagaaactgaatagcctgtgcatggcatggttagttgaccatgtgtatgccataagagaagcagctacgaacaatctgatgaaactggtccagaagtttgggaccgagtgggctcagaacactatcgtgcccaaggtccttgtcatggccaacgacccaaactacctgcaccgaatgactaccctcttttgcatcaatgctctgagcgaggcctgtggccaggagatcaccaccaaacagatgctgcctatagtcctgaagatggccggggaccaggtagcgaacgttcggttcaatgtggctaagtctcttcagaaaattggtcctatcttagatacaaacgcattgcagggggaggtgaaacccgtgctgcagaaactgggacaggatgaagacatggacgtaaagtactttgctcaggaggcgatcagtgtgctggccttagcgtag

SEQ ID NO: 25850 - DNA, 1566 bp, synthetic construct
  misc_feature 1..1566: note = Description of Artificial Sequence: Synthetic coding sequence
  source 1..1566: mol_type = other DNA
atgagcggccggcggttccacctgagcaccaccgaccgggtgatcaaggccgttcctttcccccccacacaacggctcaccttcaaggaagttttcgaaaacgggaagcctaaggtcgacgtgctgaaaaaccatctcgtgaaagagggaagattggaggaagaagtcgccttgaaaatcataaatgacggggcagcaatcctgcgccaggagaaaaccatgatcgaggtggatgcccccatcacagtatgtggcgacatccatggtcagtttttcgacctgatgaagctgtttgaggtcggggggtccccttctaacacccggtatctgttcctcggcgattacgtggatagagggtacttctcaatcgagtgtgttttgtacttgtggtctctaaagatcaaccatcctaaaactcttttcctgctgagaggtaatcacgagtgcagacatttaaccgattacttcaccttcaagcaagagtgccggatcaagtactctgaacaggtctatgacgcatgcatggagacattcgattgcttgccccttgcagcccttttaaatcagcagtttctatgcgttcatggagggatgtctcctgaaatcacctctctggacgatatcagaaagctcgacaggttcacggagccccccgcctttggtccggtgtgtgaccttctgtggagtgacccctccgaggattacggtaatgagaaaacactggaacactacactcataacacagtgagggggtgcagttacttctatagttatcctgctgtgtgtgagtttttgcagaacaataatctgctgagtatcatcagagcacacgaagctcaggacgccggctatcgaatgtaccggaagagtcaagccacagggttcccctctctcattacaattttctccgccccaaattatctggacgtctacaataataaggcagcagttcttaagtatgagaacaacgtgatgaatatccggcagttcaattgctcgcctcatccatattggcttcctaactttatggacgtctttacctggagcctgccctttgtgggagagaaggttactgaaatgttggtgaacgtcctgaacatttgtagcgatgatgaactgatctcagacgacgaagccgaggatcattacatcccctcataccagaaaggctccaccaccgtgcgcaaggaaatcattcggaacaaaattcgcgcaataggcaagatggctcgcgttttctcgattttgcgacaggaatcggagagcgtgctcaccctcaaaggcctcacccccactggaacactgcctctgggggtgctgagcggcgggaaacagacaattgagaccgccactgtggaggcagtggaggcccgcgaagcgatccgaggcttcagcctgcaacacaagatccgcagctttgaggaggctaggggtctggaccggatcaatgaaaggatgcctcctcggaaagactctatacatgctggtggccccatgaagtcagtcaccagcgctcacagccacgctgcccaccgtagcgaccagggcaagaaggctcactcctag

SEQ ID NO: 25851 - DNA, 1410 bp, synthetic construct
  misc_feature 1..1410: note = Description of Artificial Sequence: Synthetic coding sequence
  source 1..1410: mol_type = other DNA
atgagcgagcccaaggccatcgaccccaagctgagcaccaccgacagagttgtgaaagctgtaccatttcccccatcacaccgcctcactgctaaggaagtgtttgataatgatggaaaaccccgagttgacattcttaaagcacacttaatgaaggagggtcgcctcgaggaatctgtagcgctgaggatcatcacagagggagcgtcaatcctgcggcaggaaaaaaatctgctcgacatagatgctccggtcacagtatgtggtgatattcacggacaattttttgacctgatgaagctgttcgaagtcggtggtagccctgctaacactagatatctgtttctgggtgattatgtggacagggggtacttttcgattgaatgcgtgctgtacctttgggccctgaaaatcctttatccgaaaactctctttctcctgagaggtaatcatgagtgtcgtcatctgaccgaatatttcactttcaagcaagagtgcaagataaaatattctgaacgcgtctacgacgcgtgcatggatgccttcgactgcctgccactggcggcgctcatgaatcagcaattcctctgcgtgcacggtggtctgtcaccagaaatcaatactctggacgatattcggaaactggaccgctttaaggagccaccagcatacggccccatgtgcgatatattgtggtcggacccactcgaggactttggcaacgagaaaactcaagaacacttcacacataatactgtacgaggctgcagctacttctactcgtatccagccgtctgtgaatttctgcagcacaacaacctcctgtctattttgcgcgctcacgaagcccaagatgccggttaccgcatgtatcggaagagccagaccacgggattcccaagtttgataacgattttttccgcacccaattatctggacgtctataataacaaagtgactgaaatgctggttaacgttttaaacatttgttcggacgacgagctcggtagcgaggaagatggctttgatggagctactgctgcggccaggaaggaggtcatcagaaataagatccgggcaatcggcaagatggccagagtgttctcagtgctgagggaagaatcagagagcgtactgaccctgaagggcctaacgcctaccggcatgcttccgagcggggtgctgtctgggggcaaacagacactgcaatccgccattaaggggttctcacctcagcataaaattaccagctttgaagaggctaaaggcctagaccggattaacgagcgtatgcctccccgacgagatgccatgccttctgacgccaatcttaattctattaacaaggctctgaccagcgagacaaacggaactgactctaatgggtccaactctagcaatattcagtag

SEQ ID NO: 25852 - DNA, 1536 bp, synthetic construct
  misc_feature 1..1536: note = Description of Artificial Sequence: Synthetic coding sequence
  source 1..1536: mol_type = other DNA
atgagcgagcccaaggccatcgaccccaagctgagcaccaccgacagggtggtcaaagctgtgcccttccccccgtctcatagacttacggccaaggaagtattcgataatgacggaaaacctagagtagatattctcaaggcacatttgatgaaggagggcagattggaggagtccgtcgccctgcgtattattacagagggagccagcattctcagacaggaaaagaatctcctagacatcgatgcccccgtgactgtctgcggggatattcatgggcagtttttcgacctcatgaaacttttcgaggtcggtggcagtccagcaaatactcgctacctattcctgggggattacgtggacagaggttatttctctatcgagtgcgtgctgtatctctgggccctcaagatcttgtaccctaagaccctcttcctgctgagaggcaaccatgagtgcaggcacctcaccgaatatttcacctttaagcaggagtgtaaaatcaagtactccgaaagagtgtacgacgcttgtatggacgccttcgactgcctgcccttagctgctctgatgaatcagcagttcctgtgtgttcacgggggactgtctcccgagatcaacacgctagatgacatccgcaagctggaccgcttcaaagagccacccgcctatggccctatgtgcgatatcctgtggtcagaccctctggaggacttcggaaatgaaaagacacaagaacacttcacacacaatactgttagagggtgctcttacttttactcctacccggctgtatgcgagtttctgcagcataataacttactatccattctgcgcgcccatgaggcccaagatgcagggtaccgtatgtatcggaagtcgcagaccacaggattcccaagcctgatcacaattttttccgccccaaattatctggatgtctataacaacaaggccgcagtactcaagtacgaaaacaacgtgatgaacatccgccaattcaattgttctccgcatccatactggctgcctaatttcatggatgtgtttacttggagcctccctttcgtgggagaaaaggtgaccgaaatgctggtcaatgtgctgaatatatgctcagacgacgagcttgggagcgaggaggacggtttcgacggagccaccgccgctgcccgcaaagaggtgataaggaataaaatacgtgccataggaaagatggccagggtgtttagcgtgctgcgggaggaatccgaaagtgtccttacgctgaaggggctaacccccacaggcatgctgccctccggggtcctcagtggaggcaaacagacactgcagtctgccataaagggattctcaccccaacataagatcacatctttcgaagaagctaaaggactagaccgcattaatgaacgcatgccgccaaggagggacgctatgccaagcgacgcgaatttaaacagcatcaacaaggctctcacaagtgagaccaacgggacagactccaacggcagcaatagctcgaacatccagtag

SEQ ID NO: 25853 - DNA, 1566 bp, synthetic construct
  misc_feature 1..1566: note = Description of Artificial Sequence: Synthetic coding sequence
  source 1..1566: mol_type = other DNA
atgagcgagcccaaggccatcgaccccaagctgagcaccaccgaccgggtcgtgaaggcggtgccgtttccacccagtcatcgcctgacggccaaagaagtgttcgacaacgacggaaaacccagggtcgatatacttaaggcacacctgatgaaagaaggacgactagaggagtcagtcgcactgaggattattaccgagggcgcatccatcctacgacaggaaaagaacttactggatatcgacgctccagttactgtgtgtggagacatccatgggcagttcttcgacctcatgaaactgtttgaggtaggcggcagtcccgctaacacacggtacctctttctgggcgattacgtggaccgtggatacttctctatcgagtgtgtcctgtatctctgggcactcaagatactgtatcccaaaacgctgtttttgcttaggggcaaccacgagtgcagacatctgacagagtacttcacctttaaacaggagtgcaagatcaagtattccgaaagggtctacgacgcttgtatggacgcttttgactgtctgcccttggcagctctcatgaatcagcagtttctttgcgtccacggaggcctcagtcccgaaatcaatactctcgacgacattcgaaagctagaccgattcaaagagcccccggcctatggccctatgtgtgatatcctatggtccgacccactggaagactttgggaacgagaaaacacaggaacacttcacccacaacaccgtgagggggtgttcttacttctattcctatcccgccgtatgtgagttcctgcagcataataacctgctgtccatcctgcgcgctcatgaggctcaggacgccgggtacaggatgtacaggaaaagtcagaccacaggttttccttctctgatcactatcttcagcgctcccaactatttggatgtctataacaataaggccgcagtgcttaagtatgaaaacaacgtcatgaacatacggcagttcaactgttcaccgcacccttactggctgccgaatttcatggatgtttttacctggtccctcccttttgtcggtgaaaaggtgacagagatgttggtgaacgtcctgaatatttgctccgacgatgagttgggttcagaggaggatggcttcgatggagccacggccgctgctcgaaaggaagtgatacgaaacaagatccgggccataggcaaaatggcacgcgttttttcagtcctgagggaggagtcagaatccgtgctgactctgaagggcctgaccccaacagggatgctaccctctggcgtcctgagtggtgggaaacagactctgcagtccgccacagtggaggcaattgaggctgacgaggccattaagggctttagtcctcagcataagatcacatcattcgaagaggcaaaaggcctagatcgaattaacgaaagaatgccgccacgcagggacgccatgcctagcgacgccaatctgaactcgatcaacaaggctttgacatccgaaacaaatggtaccgactctaacggcagcaacagctcaaatattcagtag

SEQ ID NO: 25854 - DNA, 1272 bp, synthetic construct
  misc_feature 1..1272: note = Description of Artificial Sequence: Synthetic coding sequence
  source 1..1272: mol_type = other DNA
atgaagctgttcgaggtgggcggcagccccgccaacacccggtacttatttctgggtgactacgtagatagggggtactttagtatcgagtgtgttttatacttatgggccctgaaaatattgtatcctaaaaccctctttctcctgcgtgggaatcacgagtgtagacacctgactgagtacttcactttcaagcaagagtgtaaaatcaagtactccgaacgggtttacgacgcctgtatggatgcattcgattgccttccccttgctgctctaatgaatcagcagtttttatgtgttcacggcggattgtctcccgagatcaacacactggacgatattaggaagctggataggtttaaagagcctccagcctatggccccatgtgtgatatcctgtggtccgacccattagaggacttcggcaatgagaagactcaggagcattttacccacaacacagtgaggggctgtagctatttctatagctatccagccgtttgcgagttcctccagcataacaacctgttaagtatcctgcgcgcgcacgaagcacaggatgccgggtatcgtatgtaccggaaatcccagacaaccgggtttccctcactgatcaccatttttagcgcgcccaattacctcgatgtatacaataataaagctgcagtcctgaagtacgagaacaatgtgatgaatattaggcagtttaattgttcaccgcacccctattggctgccgaacttcatggatgtgtttacgtggtctttaccctttgtgggcgagaaggtcacagagatgttggtgaatgtcctgaatatttgcagcgacgacgagctaggcagtgaggaggatgggttcgatggagcaacagcggccgctcggaaagaggtcatccgcaataaaattagggctatcggcaagatggcaagagttttttccgtcctccgagaagagagcgaatccgtactcacattgaaaggtttgaccccgactgggatgctgccctctggggtgctaagcggcggtaagcagactttacagtcagctactgtcgaggccattgaagccgatgaggcgatcaaaggcttttcgccacaacataagattacaagctttgaggaggccaagggcctggatcgcatcaacgaacggatgccacccaggagagatgcaatgccttccgatgctaatctaaacagcatcaacaaagccctgaccagcgagacaaacgggacagattcaaatgggagcaatagctcaaacattcaatag

SEQ ID NO: 25855 - DNA, 870 bp, synthetic construct
  misc_feature 1..870: note = Description of Artificial Sequence: Synthetic coding sequence
  source 1..870: mol_type = other DNA
atgagcgagcccaaggccatcgaccccaagctgagcaccaccgaccgcgttgtgaaggcagttccattccctccgtctcatcggctgaccgcgaaggaggtattcgacaacgatggaaagccaagagtcgacattctgaaggcgcacttgatgaaggaggggcgcctcgaagagtctgtggctctgaggatcattaccgagggcgcctcaattctgaggcaggaaaagaatctgctggatatcgatgctcctgttactgccgctgttctgaagtacgaaaataacgtgatgaacatcaggcagttcaattgttcccctcatccatactggctcccgaatttcatggacgtcttcacgtggtccctgccctttgttggcgagaaagtgactgagatgctggtcaacgtgctcaatatttgttccgacgacgagctgggatccgaggaagatgggttcgatggcgccacagccgccgcacgaaaagaagtgatccgcaataagatccgggccattggcaagatggctcgggtgttcagcgtgctccgggaggagtcagaatccgttctcacactgaagggcttgaccccaacaggtatgctgcctagcggtgtgctatctggaggaaagcaaacgcttcagtcggctactgtggaggctattgaagctgacgaggctatcaaaggattcagcccccagcacaagatcacctccttcgaggaagccaagggattggaccgcatcaacgaaaggatgccacccagaagagacgcaatgccctccgatgcgaaccttaattcaatcaataaggcattgactagcgaaaccaacggaaccgactcaaacggctcgaattcaagcaatattcagtag

SEQ ID NO: 25856 - DNA, 1365 bp, synthetic construct
  misc_feature 1..1365: note = Description of Artificial Sequence: Synthetic coding sequence
  source 1..1365: mol_type = other DNA
atgagcgagcccaaggccatcgaccccaagctgagcaccaccgacagggtggtcaaggtgtgtggagacattcacggccagtttttcgatctcatgaagttatttgaggtcgggggaagccctgccaatacacgctatttatttctaggggactacgttgaccggggctacttttccatagaatgcgtcttgtatctgtgggccttgaagatcctgtatcctaagaccctattcttactgaggggaaaccacgaatgcagacacctcaccgagtacttcacttttaaacaagaatgcaaaatcaaatattctgagcgggtgtacgatgcatgcatggatgcattcgattgccttcccctcgccgcactcatgaatcagcagttcctctgtgtacacgggggcctgtctcccgaaattaatactctggatgacatccgcaaactggatagattcaaggaaccccccgcctatggaccaatgtgcgacatcctatggtccgatccactggaggacttcggaaatgagaagacccaggaacactttacacataatactgtgagaggatgcagttatttctattcctatccagccgtgtgtgagttcctccaacacaacaatctgctgagcatccttcgggctcatgaggcgcaagacgccggatatcgcatgtatcgtaaaagccagactactgggttccccagtttgatcaccatcttttctgctccaaattacctagacgtctataacaataaagccgccgtgctgaaatatgaaaacaatgtcatgaatattaggcagttcaactgtagtccacatccttattggctaccaaactttatggatgtcttcacctggtcactgcccttcgtgggggaaaaggtgaccgaaatgttagtgaatgtgctcaacatctgttccgatgatgagttagggtcagaggaggatggattcgatggagctacggctgctgctcggaaagaagtcattaggaacaaaatccgcgccatagggaagatggcacgagtattctccgttcttagggaagagtctgaaagtgtcctgaccttgaaaggcctcactcctactgggatgttgccttccggcgtgctcagtgggggtaagcaaacattgcagtctgctacggtcgaagcgattgaagctgacgaagccattaagggtttttccccacagcataaaatcacgtcgttcgaggaggcgaaaggactggatcgcattaatgaaagaatgcccccgaggcgggacgcaatgccatcagatgcaaacctgaactcaatcaacaaggccctgacatcagagactaatgggaccgattcaaatggaagtaacagtagtaacatacaatag

SEQ ID NO: 25857 - DNA, 399 bp, synthetic construct
  misc_feature 1..399: note = Description of Artificial Sequence: Synthetic coding sequence
  source 1..399: mol_type = other DNA
atgaaggagggccggctggaggagagcgtggccctgcggatcatcactgagggagcaagcattttgcgccaggagaagaatttacttgatatcgacgcaccagttaccgtttgcggcgacatacatggacaatttttcgacctgatgaagctctttgaggtgggaggctctccggctaacaccaggtacctatttctgggagattacgtagatcgggggtacttcagtatcgaatgtgtgctttatctctgggctttgaaaatcctgtatcccaagacactttttttgctccgcgggaaccacgagtgccggcatctgacagaatacttcacatttaagcaggagtgcaaaattaaatatagtgaaagggtctatgatgcttgcatggacgcattctag

SEQ ID NO: 25858 - DNA, 444 bp, synthetic construct
  misc_feature 1..444: note = Description of Artificial Sequence: Synthetic coding sequence
  source 1..444: mol_type = other DNA
atgaaggagggccggctggaggagagcgtggccctgcggatcatcactgaaggcgccagcatactaaggcaggagaaaaacctgctggatatcgatgcccccgttactgtgtgcggggatattcacggccagttctttgatttgatgaaactatttgaagtaggcgggtccccagccaacacaaggtacctgtttctcggggattatgtggaccggggttacttttcgatagagtgtgtcctctacctgtgggccttaaaaattctttatcccaaaactctttttctcctgcgtggtaaccatgaatgccgtcacttaaccgagtatttcacttttaagcaagagtgtaagataaaatatagcgaaagggtgtacgacgcatgcatggacgccttcgattgtttgcctctcgccgcactcatgaaccagcaattcctatgctag

SEQ ID NO: 25859 - DNA, 1491 bp, synthetic construct
  misc_feature 1..1491: note = Description of Artificial Sequence: Synthetic coding sequence
  source 1..1491: mol_type = other DNA
atggccgcccccgagcccgcccgggccgccccccccccccccccccctcctcccccacctcctggagccgatcgcgttgtgaaggcagttccattcccgccaacccatagactaacgtcagaggaggtattcgatctcgacgggatcccccgagtggacgtactgaaaaaccacctggtcaaggagggcagagtcgacgaggagattgccctcagaatcatcaatgagggagctgcaattctgcgacgggaaaaaaccatgatcgaggttgaagcacccataacagtatgtggggatattcacgggcaattctttgacctgatgaagctcttcgaggtcggtggcagccctgctaatactcgctacttatttcttggcgactatgtcgatcgtgggtacttctctattgaatgcgtgttgtatctctgggtgctgaagatcctatacccctcgaccctttttctcctgcgtgggaaccacgaatgtcgacacctaacagagtatttcacctttaagcaggaatgtaaaatcaagtactctgaacgagtatatgaagcttgcatggaggcatttgacagccttcccttagcagccctattgaaccagcagtttctatgtgtccacggaggattgtcaccagaaattcacactttagacgatatccgcaggctcgataggttcaaggaaccacctgcttttggtcctatgtgcgacctcctgtggtccgatcctagtgaggattttggcaacgaaaagtctcaagaacacttctctcacaatacagtccgaggatgctcctacttctacaactatcctgccgtgtgtgaatttcttcagaataacaatctgctgagtatcatacgggcgcatgaggcgcaggacgccgggtacagaatgtaccgtaagtctcagaccaccgggttcccctctctgattaccatttttagcgctccaaattacctggatgtatataataacaaggccgcggtcctgaagtacgaaaacaacgtgatgaatattcggcagtttaactgtagccctcacccgtactggttacctaactttatggatgtgtttacctggtctctcccctttgtgggcgaaaaggtgacggagatgctggttaatgtactctccatatgttccgatgacgaattaatgacggaaggcgaggatcagtttgacgggagcgccgccgcccgtaaagagatcatccgaaacaaaataagagcaataggtaaaatggctcgcgtgttcagtgtgctcagagaggaaagtgaaagcgtgcttactctcaagggcttaaccccaaccggcatgctgccgtccggcgtgctggccggaggacgccagacacttcagtcaggcaacgacgtaatgcagttggctgtgccccagatggactggggaactcctcactcattcgctaataattcccataacgcttgcagagagttcctcctttttttcagctcctgtctgtcctcatag

SEQ ID NO: 25860 - DNA, 1575 bp, synthetic construct
  misc_feature 1..1575: note = Description of Artificial Sequence: Synthetic coding sequence
  source 1..1575: mol_type = other DNA
atggccgcccccgagcccgcccgggccgcccccccccccccccccccacctcctcccccacccggcgcagaccgagtggtgaaggccgtcccatttccccccacccataggctcacctcagaggaagttttcgacttagacggcattcctagagtcgacgttctgaagaaccacctcgtcaaggaaggccgagttgatgaggagatagccttaaggatcatcaatgagggtgcagccattctgcgtagggaaaaaactatgatcgaggtcgaggcgcccatcacagtgtgcggcgacattcatggtcagttctttgatttgatgaaattgtttgaggtgggcggtagcccagccaatactagatacctgtttctgggtgactatgtcgatagaggatatttttctattgagtgtgtattatacttatgggtgctcaaaatcctttacccttccactcttttcctcctgagaggaaaccatgaatgcagacacctcaccgaatatttcaccttcaagcaggaatgcaaaatcaagtactcagaaagggtctacgaggcttgcatggaagcgtttgattccctccctctggcagcgctgttaaaccagcaattcctttgtgtgcatggaggcctcagcccagaaattcacacactggacgatatccggcgtctcgatcggttcaaggagcccccagcttttgggccaatgtgtgacctcctgtggagcgacccaagcgaggatttcggtaatgagaaatcacaggagcacttttcacacaatactgtgcggggatgctcctatttctacaattatccagcagtgtgcgagttcttacagaacaataatctcttgagcatcattcgggctcatgaagcacaagatgcaggttatcgtatgtacagaaaatcgcaaaccacaggcttcccctcgttaattactatcttttccgcaccgaattatcttgacgtgtataataacaaagccgccgtgctgaaatacgagaataatgttatgaacatccggcagttcaactgtagcccccacccatactggctaccaaactttatggacgttttcacatggagcttgcctttcgtcggcgaaaaagtaactgaaatgcttgtgaatgtgctgtcgatttgctccgatgatgaactgatgaccgagggcgaggaccaatttgacgggagcgccgcggcaagaaaggagattattcggaataagattcgtgcgatcggtaagatggccagagtgtttagcgtgttaagggaggaatccgaatcagtgctgacattaaaggggctcacgcccactggtatgttgccctctggtgtgttggccggaggacgtcagacgctgcaaagcgccactgtggaggcgattgaggccgaaaaagcaattaggggcttttctccaccacaccggatttgcagtttcgaggaagccaagggactggatcgcataaatgaacgaatgcccccccgaaaggatgctgtacaacaggatgggttcaattcgctgaacactgcgcacgccaccgaaaatcacgggaccggtaatcacacagcccagtag

SEQ ID NO: 25861 - DNA, 1545 bp, synthetic construct
  misc_feature 1..1545: note = Description of Artificial Sequence: Synthetic coding sequence
  source 1..1545: mol_type = other DNA
atggccgcccccgagcccgcccgggccgcccccccccccccccccccacctccgccccctcccggggccgacagggtggtgaaggccgttcccttcccacccacacatcggctgaccagtgaggaggtattcgatcttgatggtattccccgcgtagacgtcctaaagaatcacctagttaaggaaggaagggtcgacgaagaaatcgcactgagaattatcaatgagggtgctgcaattcttaggcgggagaagacaatgatcgaagtggaagcacccatcacagtgtgcggcgacatccacggacagttttttgacctgatgaaactgtttgaagtcgggggatctcctgccaataccagatacctatttcttggggactacgttgatcgtgggtatttttccatagaacatgttctaggaaccgaggatatctccattaatcctcataacaacataaacgagtgcgtgctgtatctgtgggttctcaagatcctgtatcccagcactctcttcttgctcaggggaaatcacgaatgtagacacctgactgagtacttcacctttaaacaagagtgtaaaatcaagtatagtgagcgcgtttacgaggcttgcatggaggctttcgactccctgccattggccgccctcctgaaccagcagttcttgtgtgtgcatgggggccttagccctgagattcatacgttagacgacatacggcggctcgatcggtttaaggagccacccgcctttggccctatgtgcgacttgctgtggagcgacccttctgaggacttcggtaacgagaagagtcaggagcacttctctcacaataccgtgcgaggttgttcttatttctacaactacccagccgtatgcgagttcttgcagaataataatctgctgagtatcatcagagctcatgaagctcaggacgctggctatagaatgtatagaaagtcacagaccaccgggttcccgtcgttaatcaccattttttctgctccaaactatctggacgtgtacaacaataaagcggccgtgctgaaatacgagaacaatgtcatgaatattaggcaatttaactgttccccccacccctactggctgcccaatttcatggacgtgtttacatggagcttaccattcgtgggggagaaggtgacagaaatgctggtgaatgtcttgtcaatctgcagcgatgatgaattaatgacagagggtgaagaccagttcgatgggagcgctgccgctcgaaaggaaatcattcgtaacaaaatcagagcaattggcaaaatggctcgagtatttagcgtgttgcgagaggaaagcgagtccgtactcacacttaaagggctgactcccaccggaatgctgccaagcggcgtcctggccggcggaaggcagactctccaatctgggaacgatgtgatgcagttggccgttccccaaatggattggggaacgcctcacagcttcgcaaataacagccataatgcctgccgtgaattcctcttatttttttcctcgtgtctctcctcctag

SEQ ID NO: 25862 - DNA, 591 bp, synthetic construct
  misc_feature 1..591: note = Description of Artificial Sequence: Synthetic coding sequence
  source 1..591: mol_type = other DNA
atgaacatccggcagttcaactgcagcccccacccctactggctgcctaatttcatggacgtcttcacctggtcgctgccctttgtgggggagaaggtgacagagatgttggtgaacgtgctttcgatctgcagcgacgacgagctgatgacagagggagaggatcagttcgatgagaggctcatctatggcaataaaaagggaagcgctgcagcacgcaaagagatcataaggaacaaaattcgggccatcggcaagatggctagggtgtttagcgtgctgcgagaggagagtgagtccgttctgacattaaaaggtttgaccccaaccgggatgctgccatctggtgtgctggcagggggaagacaaaccttacagtctgccactgtggaggccatcgaggcggagaaagccatcaggggattttcaccaccccataggatttgcagttttgaagaggcgaaaggactcgaccggattaatgagcgcatgccaccacgtaaggatgccgtgcagcaagacggttttaactccctgaacaccgctcacgcaacggaaaaccatggcacagggaaccacactgcgcagtag

SEQ ID NO: 25863 - DNA, 1548 bp, synthetic construct
  misc_feature 1..1548: note = Description of Artificial Sequence: Synthetic coding sequence
  source 1..1548: mol_type = other DNA
atggccgcccccgagcccgcccgggccgccccccccccccccccccctcctcccccaccacctggcgcagacagggtcgttaaagccgtgcctttccccccaacccataggctcacctcggaggaagtgttcgacttagacggcatcccccgagtggacgtcctgaaaaatcacctggtgaaagaaggccgggtggacgaagaaatcgcgttaagaattattaacgagggggctgcgatcttgagacgcgagaaaacaatgatcgaagtcgaagcccccataactgtttgcggcgatattcacgggcagtttttcgacctcatgaaattatttgaggtcgggggaagccccgccaatacaagatacctgttcctcggagactacgttgatcgcgggtatttttcgatagaatgtgtgctctacctctgggtgctgaagattctgtaccctagcactttgttcctgcttcgagggaaccacgagtgccggcatctgaccgaatattttaccttcaaacaggaatgcaaaattaaatactccgaacgggtctatgaggcttgcatggaagccttcgattcacttcctctagccgctctactgaatcaacaattcctgtgtgtacatggcggcttgagtcctgaaattcatacattggacgacattaggaggctagaccggttcaaagaaccccccgcattcggacctatgtgcgacctgctgtggtccgatccctccgaggactttggcaatgagaagagccaggagcacttctctcataataccgtgagagggtgttcgtacttctataattaccccgccgtgtgtgaatttctgcaaaacaataacctcctgagcataataagggctcatgaagcgcaagacgctggctatcgcatgtataggaagagccaaactacaggcttcccatccctgattactattttttcagcaccaaattatctggacgtctacaataacaaagccgccgtgctgaagtacgagaacaacgtgatgaatatccgacaattcaattgctcaccccatccatactggcttcccaactttatggatgtgtttacgtggtctctgccgttcgtcggagaaaaagttaccgaaatgcttgtgaatgtcctgagtatctgttccgacgatgagctgatgaccgagggggaggaccaattcgacgtcgggtccgctgccgcccgcaaggagattatcagaaataagattagagcgatcgggaaaatggccagggtgtttagtgttctgcgcgaggaatcagaaagcgtgctgaccttgaagggattaacaccaaccgggatgctgccgagcggcgtgttagcaggcggtcgtcagacactgcagtcggctatccgaggcttttcacctccacataggatctgttcatttgaagaggctaaggggctggatcggattaacgagcgaatgcccccaagaaaggacgcggtgcagcaggatggatttaattctctgaatacggcacatgcgactgagaaccacggcaccggaaaccataccgcacagtag

SEQ ID NO: 25864 - DNA, 1578 bp, synthetic construct
  misc_feature 1..1578: note = Description of Artificial Sequence: Synthetic coding sequence
  source 1..1578: mol_type = other DNA
atggccgcccccgagcccgcccgggccgcccccccccccccccccccgcctccacctccccccggcgcagatcgggtggtgaaagctgttcccttccctcccacacaccgccttacctccgaggaagtatttgacttagatggcatacctcgtgtcgatgttctgaaaaatcacctagttaaggaaggtagagttgacgaggaaattgcactcaggattatcaacgagggagccgccatccttcgccgagagaaaactatgatcgaggtggaggcaccgataacagtctgcggcgacatacacggccaattcttcgacctcatgaagttgttcgaagtcggtggaagccctgcgaacacacggtacctctttctgggggattacgtggaccggggttacttctccattgagtgcgtcctgtatctgtgggttctgaagatcctctatccaagcactcttttcctgctgcgcgggaatcatgaatgtaggcatctgaccgagtacttcacgtttaaacaagagtgcaaaattaagtactccgagagggtttacgaggcatgcatggaggcattcgactccctgcccctggccgccctgctgaaccagcaattcttatgcgtgcacggaggcctcagccctgagattcataccctggacgacattagaagactggacagatttaaagaaccacccgcttttggtcctatgtgcgacttgctctggtcggaccctagtgaggactttggtaatgaaaaatcacaggagcatttttcacacaataccgtacgcggttgctcctatttttacaattatcccgcagtgtgtgaattccttcagaataacaacctcctctctattatcagggcacatgaagctcaagatgcggggtacagaatgtatagaaagagccaaactaccggcttcccctcactgatcactatttttagcgcaccgaactacttagacgtctacaataataaggccgctgtccttaaatatgagaataatgttatgaatattcgtcagttcaattgttctccacatccctactggctgcctaactttatggatgtgttcacctggtctctcccattcgtaggagagaaagtgaccgagatgcttgtcaatgtgttgtctatctgtagtgacgatgaactcatgaccgagggtgaagatcagttcgatgtcgggtctgcagccgcaaggaaggaaatcattagaaacaagattcgcgcaatcggtaaaatggccagagtgttctctgttctgagagaagagagcgaaagcgtgttaaccctaaaaggccttaccccaacaggaatgctcccatcaggggtgctagcaggcggcaggcagactcttcagtcagctaccgtggaggccatcgaagctgagaaggccatccgcggcttttcccccccacatcgaatatgtagtttcgaggaggctaagggcctggataggattaacgaacggatgcccccccgcaaggacgctgtgcagcaggatgggttcaatagcttgaatacagctcacgcgacggagaatcacgggacaggcaaccacaccgctcagtag

SEQ ID NO: 25865 - DNA, 561 bp, synthetic construct
  misc_feature 1..561: note = Description of Artificial Sequence: Synthetic coding sequence
  source 1..561: mol_type = other DNA
cacccctactggctgcccaacttcatggacgtgttcacctggagcctgcccttcgtcggcgaaaaggtcacagagatgctggtaaacgtgctctccatctgtagcgatgacgagctgatgacggaaggcgaggaccagttcgatgagcgcttgatctatggtaacaaaaaggggtccgcagcggccagaaaggagatcattagaaataagatcagagcgatcggcaagatggcgcgcgtgttttcagtgctgagggaagagtccgagtctgtgctcacactgaaggggcttactccaaccggcatgctcccaagcggtgttcttgctggcggcaggcagactctgcagagcgcgacagtggaggcaattgaggccgagaaagctatacgcggcttttcccctcctcataggatctgctccttcgaagaagccaaggggcttgaccgtattaatgagcggatgccacctagaaaggacgccgtgcagcaggacgggtttaactctttaaacaccgcccacgcgaccgagaatcatgggactggtaatcacactgcacagtag

SEQ ID NO: 25866 - DNA, 459 bp, synthetic construct
  misc_feature 1..459: note = Description of Artificial Sequence: Synthetic coding sequence
  source 1..459: mol_type = other DNA
atgctggtgaacgtgctgagcatctgcagcgacgacgagctgatgaccgaaggcgaggaccagtttgatggctcagccgctgccaggaaggaaatcataagaaacaagatccgagccattgggaagatggcgcgggtgtttagcgtgttgcgcgaagaatctgagagcgtgctgaccctgaagggattgacacccaccggcatgcttccatcaggagtgctcgctggtggccgacaaaccctgcagtcggccactgttgaagcaattgaggcggagaaagccattagaggatttagccctccacacaggatatgttccttcgaagaggcaaaagggctggatcggatcaacgagcgcatgccccccaggaaagacgccgtccagcaggatgggttcaattctttgaataccgcacacgccacagagaaccacgggaccggcaaccacactgcccaatag

SEQ ID NO: 25867 - DNA, 1236 bp, synthetic construct
  misc_feature 1..1236: note = Description of Artificial Sequence: Synthetic coding sequence
  source 1..1236: mol_type = other DNA
atgatcgaggtggaggcccccatcaccgtgtgcggcgacatccacgggcagttcttcgacctcatgaagcttttcgaagtgggtggctcacctgccaacacgagatatctgttcttgggggattacgtagacagggggtacttctcgattgaatgtgtgctgtacctctgggttttgaagatcctttacccctcaacactcttcttgctccgggggaaccacgagtgtcgtcaccttaccgagtactttactttcaagcaagagtgcaaaatcaagtatagcgaaagggtatacgaggcatgtatggaggcttttgacagtctgccactggctgctttattgaaccaacaattcttatgcgtccacggtggcctcagcccggagatccacacactggacgatatcagacggttggaccggttcaaggagccacctgcattcggaccaatgtgcgatctcctgtggtctgacccgagcgaggactttggtaacgagaaatcccaggaacacttctcacataacaccgtgcgcggctgtagctacttctataactatcccgccgtttgtgaatttcttcagaataacaacctcctaagtatcatacgagcccatgaggcccaggacgccggctacaggatgtataggaaatcccagacgaccggctttccgtctcttattaccatattcagcgctccaaattatttagacgtttataataataaggccgcagtgcttaaatacgaaaataacgtcatgaatatccgccaatttaattgctcgccgcatccgtattggctgcccaactttatggacgtattcacctggagcctacccttcgtcggcgagaaggtgacagaaatgctggtgaatgtgttgtcaatttgctcggacgacgagctaatgacagagggcgaggaccagtttgatgtaggatcagcagcagcaaggaaagaaatcatccgtaacaaaattcgagcgatagggaaaatggccagggtgttttcagtcttgagggaagagagcgagtctgtcctgactttgaagggactcaccccgacaggcatgcttcccagtggcgtcctggccggcgggagacagactttgcaatccggcaacgacgtcatgcagctggctgtccctcagatggactggggtaccccccatagcttcgcgaacaactcacacaatgcctgccgggagtttttgctgttcttttcaagctgtctcagttcctag

SEQ ID NO: 25868 - DNA, 1539 bp, synthetic construct
  misc_feature 1..1539: note = Description of Artificial Sequence: Synthetic coding sequence
  source 1..1539: mol_type = other DNA
atgagcggccggcggttccacctgagcaccaccgaccgggtgatcaaggccgttcccttccctcccacccaacgcttaacgttcaaggaggtgttcgagaacgggaagcccaaggtagacgtgctcaaaaaccatctggttaaggaggggaggctggaagaagaggtggcacttaagatcataaacgacggtgcggcaatactgcggcaggagaaaaccatgattgaagtggatgcccccattactgtgtgcggagatattcatggccaattttttgatttgatgaaactgtttgaggtgggtggatccccgtcaaacactcgctacttatttctcggcgattacgtagaccgaggctactttagcattgagtgcgtattgtacttgtggtctctcaagattaaccacccaaagaccctcttcttgctgcggggcaaccatgagtgtcgtcacctcacggattattttacattcaagcaggagtgccgaataaagtatagcgaacaggtatatgacgcttgtatggagacatttgattgtctgccactcgcagccctgctgaatcagcagttcttgtgtgtccatggcggaatgtctccagaaattacttcactcgacgacatacgcaagctagataggttcaccgagccaccagccttcgggcctgtttgcgatttactgtggagcgacccaagcgaagattatggtaatgaaaagacactggaacactatacccacaacactgtccggggttgtagttacttttactcctacccagctgtgtgcgaattcctgcagaacaacaacctgctgtccatcattagagctcacgaggcccaggacgcagggtatcggatgtataggaaatcccaggctacaggcttccccagcctgattactatattctccgccccgaactacttggacgtctataacaataaggcagcggtgctcaaatatgaaaacaacgtcatgaacatccggcaatttaactgtagtcctcacccatattggctcccaaattttatggatgtttttacctggagcttaccgttcgtgggagagaaagtgactgagatgctcgtgaacgtgttgaacatttgttctgatgatgagctcatctcagacgacgaagctgaggggtctaccaccgtgcggaaagagatcatccgaaataaaatcagggccattggaaaaatggctagggtgttctctatcctccgccaggaaagcgagtctgtgttaacactaaaaggactgacccctactggaacactccccctcggcgtcctcagcggcggtaagcagacgatcgaaactgccaccgttgaggcggtcgaagcgagggaggcgataagaggctttagtctgcaacacaagatcaggagtttcgaagaagcacgggggcttgaccggatcaatgaaagaatgccgcctagaaaggactctatccatgccggcggccctatgaagtctgtgacatccgcccattctcacgcggcacatagaagcgatcaggggaagaaggctcatagttag

SEQ ID NO: 25869 - DNA, 1509 bp, synthetic construct
  misc_feature 1..1509: note = Description of Artificial Sequence: Synthetic coding sequence
  source 1..1509: mol_type = other DNA
atgagcggccggcggttccacctgagcaccaccgaccgggtgatcaaagccgtacctttcccgcctactcaacgcctgacttttaaagaagtcttcgagaacgggaaacctaaagttgacgtcctgaaaaaccatcttgtaaaggagggccggctcgaggaagaagtcgcgctgaagatcattaatgacggcgcggccatattgcgacaggagaagacgatgatcgaggtggatgctccaattaccgtatgcggagacatccatgggcagttctttgatttaatgaagctcttcgaagtaggggggagtcccagtaatactcggtatctgtttttgggcgattacgtagaccggggctattttagtatcgagtgtgttctttacctctggagcctgaagatcaaccaccctaagaccctgttcctgttgagaggaaatcatgagtgtcgacatctcacggattacttcacctttaaacaggagtgtaggatcaaatattcagagcaggtgtatgatgcgtgcatggagacttttgactgtttacctctagcagccctgttgaaccagcagttcctgtgtgtgcatggcggtatgtctcctgaaattacctccttagacgatattcgaaagcttgaccgcttcaccgagcccccagcctttggtccagtgtgcgatctgctgtggagcgatccttcagaagattacgggaatgagaaaaccctcgagcactacacccacaatacagtgcgggggtgttcctatttctactcttatccggctgtgtgcgaattcctccaaaacaataacctgctgtctatcatccgcgcccatgaggctcaggatgcaggctatcggatgtacagaaaatctcaggcaaccggttttccatctcttattaccatttttagcgcgccgaattaccttgacgtttacaacaacaaagctgccgtgttgaaatacgagaataacgttatgaacatccggcagttcaactgcagtccacacccatactggctgcctaattttatggacgtcttcacctggagtctgccatttgttggggagaaagttactgagatgctggttaatgtgctcaacatctgttctgatgacgaactaattagcgacgacgaagcagaagggtccacaaccgtacgcaaagagattatcaggaataagatcagggctattgggaagatggcaagggtgttcagcatcctgcgacaggagagtgagagtgtcctgacccttaaaggcctcaccccaacaggtactctgccattgggagtgctgagcggcggaaaacaaactattgagactgctatcagggggttttcactgcaacacaagatacgttcgtttgaggaggctcgaggactggatagaattaatgaacgcatgcccccgcggaaagatagcatacacgctggggggccaatgaaaagtgtgacttcagcccactctcatgcagcccaccggtccgatcagggtaagaaagcacacagttag

SEQ ID NO: 25870 - DNA, 345 bp, synthetic construct
  misc_feature 1..345: note = Description of Artificial Sequence: Synthetic coding sequence
  source 1..345: mol_type = other DNA
atgtactacaagttcagcggcttcacccagaagctggccggcgcctgggcttccgaggcctattcgccccaggggttaaaaccagtggtatcaactgaggctcctcccattatctttgctacccctacaaaactgacatcggacagcacagtgtacgattatgccggaaaaaataaggtgcccgagttgcagaagttttttcagaaggccgacggggtgcccgtatacttgaagaggggtcttcccgatcagatgctgtaccggacaactatggcgctaacagtgggcggaacaatttactgccttatcgccctctacatggcctcccaaccaaagaacaagtag

SEQ ID NO: 25871 - DNA, 522 bp, synthetic construct
  misc_feature 1..522: note = Description of Artificial Sequence: Synthetic coding sequence
  source 1..522: mol_type = other DNA
atgagcaccatgggcaacgaggccagctaccccgccgagatgtgcagccactttgataatgatgagattaaaaggttgggccggcgtttcaaaaagctggatttggacaaaagtggttcgctgagtgtggaggaattcatgagtctgcctgaattaagacacaatcctttggtcaggcgtgtgattgacgtgttcgacactgacggcgatggagaggtcgactttaaagagttcatcttaggaacatctcagttcagcgtgaagggcgatgaagagcaaaaactgaggtttgccttttctatctatgatatggacaaggacggatatatttccaatggtgagctttttcaggtgctgaagatgatggtgggaaacaatctgaccgactggcagttgcaacagctcgtagacaagaccattattattttagacaaagacggagatgggaagatcagctttgaggagttttccgctgtcgtccgggatctggagattcataaaaagctggtgttaatcgtatag

SEQ ID NO: 25872 - DNA, 420 bp, synthetic construct
  misc_feature 1..420: note = Description of Artificial Sequence: Synthetic coding sequence
  source 1..420: mol_type = other DNA
atgagcaccatgggcaacgaggccagctaccccgccgagatgtgctctcattttgataacgacgaaattaagaggctgggccgccggtttaagaagctggacttggataagtccggctctttgagtgtggaggagtttatgtctctgccagagcttagacacaatcctttggtgcgcagagtgatcgatgtgttcgacaccgatggagatggggaagtggatttcaaagaattcattctgggaacttcccagtttagtgtgaaaggcgatgaggaacagaaattgaggttcgcatttagcatatacgatatggataaggacggctacatcagcaacggagagctgttccaggtactgaaaatgatggtgggtaataacttgaccgactggcagcttcagcagctcgtcctcatcgtctag

SEQ ID NO: 25873 - DNA, 1818 bp, synthetic construct
  misc_feature 1..1818: note = Description of Artificial Sequence: Synthetic coding sequence
  source 1..1818: mol_type = other DNA
atggccggcctgtacagcctgggcgtgagcgtgttcagcgaccagggtggtcggaagtacatggaagatgttacccagattgtagtggagcccgagcccacggccgaggagaagccaagccccagaaggtctttgtctcagcccctccccccccgtccaagtccagcggcattgccaggtggcgaagtgtctggaaagggccctgctgtggccgcaagagaggctagagacccccttcctgacgctggagctagcccggcaccaagccgctgttgcaggcggcgctctagcgtcgcttttttcgctgtctgtgacggccacggcgggcgcgaagccgcccagtttgctcgggagcacctctggggtttcattaaaaaacaaaagggtttcacctcttcagagcctgccaaagtctgtgcggctatccgtaaaggattcctggcatgccacctggctatgtggaagaagcttgctgagtggccaaaaaccatgaccggacttcccagcaccagtggaaccactgcctctgtggtgatcattagaggcatgaagatgtacgtggctcacgttggggacagcggagtggttctgggcattcaggacgatccaaaggatgattttgtaagagctgtggaagttactcaggatcataagccagagctgcccaaagagcgtgaaagaatagaagggctgggagggtctgtcatgaacaagtcaggtgtgaatagagtggtgtggaagagaccacgcctgacccacaatgggcctgtcaggcgatctaccgtgatcgaccagattccattcttagcagttgccagggcccttggcgatctctggagctacgatttcttcagcggagagttcgtcgtgtctcccgagccagacacttctgttcatacccttgacccccagaagcacaaatacatcatcttaggtagcgatggtctctggaacatgattcctccacaggatgccatctccatgtgtcaggaccaggaagaaaaaaaatacctgatgggcgaacatggtcaaagctgtgctaagatgttggtgaatcgagccctgggacgctggagacagaggatgttaagggcagacaacacttcggccattgtgatatgtattagcccagaggtggacaatcagggcaactttacgaacgaagacgagctgtatctcaatcttacagactccccaagttataatagtcaggagacctgcgtcatgactccttccccctgttccacacccccagtgaagagcctcgaggaggatccatggccccgagtcaattcaaaggatcatataccagccctggtgcgatctaacgccttttcagaaaattttctggaggtttccgccgagattgctcgtgagaatgtccagggggtggtaataccctctaaagaccctgagcctcttgaggagaattgcgccaaagctttgacactgcgaatccacgattctcttaacaattctctgcctatcggtctggtcccaaccaattcaaccaatacagttatggaccagaaaaacctgaaaatgtccacacccggccaaatgaaagcccaggagattgagaggaccccacctactaattttaagagaacactggaggaaagtaactcagggccgctgatgaagaaacataggcgcaacggactctctagaagctctggtgctcagcctgcatctctgcctacaacatctcagagaaagaacagtgttaagctaacaatgaggcgccggctgcgcggccaaaagaagattgggaaccccctgctgcatcagcaccggaagactgtttgtgtctgttag

SEQ ID NO: 25874 - DNA, 1293 bp, synthetic construct
  misc_feature 1..1293: note = Description of Artificial Sequence: Synthetic coding sequence
  source 1..1293: mol_type = other DNA
atggccggcctgtacagcctgggcgtgagcgtgttcagcgaccagggtggtagaaaatacatggaggacgtaactcaaatcgtcgtggaacccgaacctactgccgaggagaagcctagccccagacgcagtttgtcccaacccctccctcctaggccttctcctgccgcccttccaggcggggaagtctccggcaaaggccccgcagtcgccgcacgcgaggcacgcgacccattgcccgacgcaggagcttctcctgcgcctagtcggtgttgtagacgaagatcctctgtggctttttttgcagtgtgcgacggacacggcggtagggaggcagctcagtttgcccgggagcacctctggggttttatcaaaaagcagaaggggtttacatcctctgaacccgctaaggtctgcgctgccattcgcaagggattcctggcttgtcacttggccatgtggaaaaagctcgccgagtggccaaaaaccatgacagggctgccttcaacatctgggacaaccgccagcgttgttataatacgagggatgaaaatgtacgtagctcacgtgggggatagcggagttgtcttgggtattcaggacgatcctaaggacgacttcgtgcgggcagtagaggtcacccaggaccacaagcctgagctccctaaggagcgcgaaaggatcgaagggctgggcgggtctgtgatgaacaagtctggcgtcaaccgtgtcgtatggaaaaggcctaggctcacacacaacggccctgtcaggcggtccaccgtgattgaccagatcccattcttggctgtggcaagagcgctgggagatctctggtcctacgacttcttctcaggagagtttgtggttagccccgagcccgatactagcgtccacacactcgatccccagaagcacaaatacataattctaggttcagacggactgtggaatatgatccctccacaagacgctatttccatgtgtcaggaccaggaagagaagaagtatttgatgggcgaacacggccaatcctgtgccaaaatgctagtgaacagggccttagggagatggcggcagcgtatgctgcgtgctgataatacttccgcgattgtcatctgtatttctccagaagtagataatcagggcaacttcacaaacgaagacgagctctacctgaatctgacagacagcccctcttacaacagccaggagacttgcgtcatgacaccctcgccatgtagcacccctcctgtgaaagacttcggatttgagctggattctaggaagtag

SEQ ID NO: 25875 - DNA, 837 bp, synthetic construct
  misc_feature 1..837: note = Description of Artificial Sequence: Synthetic coding sequence
  source 1..837: mol_type = other DNA
atgtggaagaagctggccgagtggcccaagaccatgaccggcctgccttccacctctggaactacggcctcagtggtgattatcagaggcatgaagatgtatgtcgcacacgtcggggactccggggtggttctggggatccaagatgatcctaaggatgactttgttagagcagtcgaagtcacacaagaccataagcccgaactaccgaaagaaagggagcgcattgaaggcctaggtggttctgttatgaacaaatccggggtgaatcgtgtggtctggaaacggccaagattgactcacaatgggcccgtccggcgctcgacagtaattgaccagatccctttccttgccgtggcacgcgctctgggcgatctatggtcatacgattttttttctggcgagttcgtggtgagccctgaacccgacacgtctgtgcacaccttagatccccaaaaacacaaatacattatcctgggcagcgacggcctgtggaacatgatcccaccacaggacgcaattagcatgtgccaagaccaggaagagaagaagtacctgatgggcgagcacggccagtcatgtgctaagatgctggtgaaccgggctctgggccgctggcgacaaagaatgctccgtgcagataacacttcagccatcgttatatgtataagtccagaagttgacaaccaggggaacttcaccaacgaggatgaactgtatctcaacctgacagatagtccctcctataactcgcaggaaacctgcgtcatgacgcctagtccctgcagtacccctcccgtcaaggattttggcttcgagcttgatagtcggaaatag

SEQ ID NO: 25876 - DNA, 3432 bp, synthetic construct
  misc_feature 1..3432: note = Description of Artificial Sequence: Synthetic coding sequence
  source 1..3432: mol_type = other DNA
atgtacctgtggctgaagctgctggccttcggcttcgccttcctggatactgaggtgttcgttactggacagtccccgacccccagccccacagacgcttacctgaacgcttccgaaaccaccacactttctcctagcggatcggccgttataagtaccacgaccattgcgaccaccccttccaaacccacctgtgatgaaaagtatgccaacatcaccgtggattatctctacaataaagagacaaaattattcactgcgaagttgaacgtgaatgagaatgtggagtgtgggaataatacatgtacgaataatgaggttcacaaccttactgagtgcaagaatgcctccgtcagcattagccataacagctgtaccgctccagacaagaccttgatactagacgtgccccccggcgtggaaaaatttcaacttcacgactgtactcaggttgaaaaggccgacacaacaatatgtcttaagtggaagaacatagaaacctttacttgtgatacacagaatattacttatagatttcaatgtggcaatatgatctttgacaacaaggagataaaactggaaaatctggagccggaacatgaatataaatgtgattcagagatactgtataacaaccataaattcacaaacgctagcaagattattaagaccgacttcgggtcccccggggagccgcaaataattttttgcaggagtgaagctgctcaccagggtgtgatcacttggaatcctccacaaaggtctttccataacttcacactgtgctatattaaagaaacagagaaggactgcctcaacttggataagaacctgatcaagtacgacctccagaatttgaagccatatacaaagtacgtgctaagcctccatgcctacatcattgccaaggtccagagaaacggatcagcagcgatgtgtcactttacaaccaagtctgctcccccttcacaggtgtggaatatgaccgtctccatgacttccgataactcaatgcatgtcaagtgtagacctccccgggatcggaatggcccacacgagaggtatcatctggaggtggaggccggcaacaccttggtcagaaatgagtcccataagaattgtgactttagagtcaaggatctccagtacagcacagactataccttcaaggcctattttcacaatggcgattaccctggcgaaccgttcattttacaccattctacgtcgtacaactctaaggccttgattgcctttctggctttcctgatcatcgttaccagtatagctctcctcgtggtcctgtacaaaatctatgacctacacaagaaacgttcttgcaacctggacgagcagcaggagttggtcgagagagacgatgaaaaacagctgatgaatgtggaacccatccatgcagatatccttctcgaaacctataagaggaagattgccgacgagggaagactgtttctggctgagtttcagagcattccacgcgtattttcaaagtttccgatcaaggaggcccgcaagccctttaatcagaacaaaaatcgatatgtggatatattaccgtatgattacaacagggttgagctcagcgaaattaacggcgatgctggttccaactatatcaacgcgtcttacatcgatggctttaaggagccacggaagtatatagccgcacaggggccgagagatgagacagtagatgacttctggaggatgatttgggagcaaaaggcaaccgtgatcgttatggtcacccgatgcgaggaaggaaataggaacaaatgtgcagaatattggccctccatggaagagggcaccagagctttcggagacgtcgtagtaaaaatcaaccagcacaagcgatgccctgattacattatccagaaacttaacatagtgaataagaaggaaaaggctacagggcgtgaagttacacacatccagttcacctcatggccggaccacggagttcctgaagatccgcatctgctccttaagctgcgacgccgcgtgaacgcgttctccaactttttctctggtcctatcgtggtgcattgttcagctggtgtggggcgaacgggaacttatattggcattgatgccatgctggaaggcctcgaagccgaaaacaaggtcgatgtctatggctacgtggtcaagcttcggaggcaaaggtgcctcatggtgcaagttgaggctcagtatattctgatccaccaggcacttgtagaatataaccaattcggcgagacggaggtgaacctttcagagcttcacccttacctacacaatatgaaaaaacgcgaccccccgtctgagccctccccgttagaggctgagtttcagcgcctgccttcgtatcggtcgtggcgaacacagcacattggcaaccaggaagagaacaagtcaaagaaccgcaatagcaatgtaatcccatacgactacaaccgcgtgccgctgaaacacgagctggaaatgagtaaagagtctgagcacgattcagacgagtcttcagacgacgattccgattcggaagagccctccaagtatatcaatgcatcgttcattatgtcatactggaagccagaggtcatgatcgccgcgcaggggcctcttaaggagacaattggggacttctggcagatgatctttcagagaaaggtaaaggtgatcgtgatgctgacagagttgaaacacggtgaccaggagatctgtgctcagtactggggcgaaggcaagcagacctacggagatatagaagtcgatttgaaagacacagataaaagcagcacttatactttgcgggtctttgagttgagacatagtaagagaaaggattctcgaacggtgtaccagtaccaatatacaaattggtcagtcgaacagctacccgcagaaccgaaagagttgatttctatgatccaggtggtcaagcagaaactgccacagaaaaatagctctgagggaaataaacaccataaatctacccccttgctcatccattgtcgggatgggtcgcagcagaccgggatcttttgcgctcttctgaatcttttggaatccgcggagacggaagaagtagttgatatattccaggttgtcaaggccttgagaaaggcacgtccggggatggtctcaacattcgaacagtaccagttcctctatgacgtgattgcgtcgacttaccccgcacagaacgggcaggtgaaaaaaaacaaccatcaagaagacaagatagaatttgataatgaagttgataaggttaagcaggacgccaactgtgttaatccactgggtgccccagagaagctcccggaagcaaaggagcaagccgagggatcggagcccacttctgggaccgaaggtcctgagcattccgtaaacgggccagcaagcccagctctgaaccagggatcttag

SEQ ID NO: 25877 - DNA, 105 bp, synthetic construct
  misc_feature 1..105: note = Description of Artificial Sequence: Synthetic coding sequence
  source 1..105: mol_type = other DNA
atgtacctgtggctgaagctgctggccttcggcttcgccttcctggacacggaagtgttcgttaccgggcagtcacccacaccctccccaaccggtaaaaactag

SEQ ID NO: 25878 - DNA, 447 bp, synthetic construct
  misc_feature 1..447: note = Description of Artificial Sequence: Synthetic coding sequence
  source 1..447: mol_type = other DNA
atggcccggatgaaccggcccgcccccgtggaggtgacctacaagaatatgaggttcttaattacccacaatcccaccaatgctactctcaacaaattcattgaggagttgaagaagtatggcgtgaccacaatcgtgcgtgtgtgcgaggccacctacgatacaaccctcgttgagaaggaagggatccacgtgctggattggcccttcgacgatggagccccaccatcaaatcagattgttgatgattggctctccctggtcaaaatcaaattccgtgaagagcctggctgctgcattgcggtgcactgcgtggccggtctggggcgtaaacggagaggagcctttaacagtaagcagcttctgtatctggaaaaatacagacctaagatgagactgcgattcaaggactcaaacggccatcgaaataattgttgtatccagtag

SEQ ID NO: 25879 - DNA, 447 bp, synthetic construct
  misc_feature 1..447: note = Description of Artificial Sequence: Synthetic coding sequence
  source 1..447: mol_type = other DNA
atggcccggatgaaccggcccgcccccgtggaggtgacctacaagaacatgcggtttctcatcacgcacaatccaactaacgctactctcaacaagttcatcgaagagctgaaaaaatacggagtgactactatcgttcgtgtgtgcgaagctacctatgacactaccctagtcgaaaaagaaggcattcatgtcttggactggcctttcgatgatggcgcccccccttcaaatcaaatcgtggacgattggttgagccttgtgaagatcaagtttagggaagaacccggctgctgtatcgccgttcactgcgtcgctgggctgggcagaaagcggagaggagcttttaattcaaagcaacttctgtacctggagaaatatagaccaaagatgagactgagattcaaagatagtaacggacatcgcaataattgctgtatacagtag

SEQ ID NO: 25880 - DNA, 522 bp, synthetic construct
  misc_feature 1..522: note = Description of Artificial Sequence: Synthetic coding sequence
  source 1..522: mol_type = other DNA
atggcccggatgaaccggcccgcccccgtggaggtgacctacaagaatatgaggtttctaatcactcacaatcctacaaatgcaacgctcaacaaatttatcgaggaattaaaaaaatatggagttaccacaatcgttcgagtttgcgaggctacgtacgatactactttggtcgagaaggaaggtattcacgtgttagactggccctttgatgacggtgcaccaccgagtaatcaaatagtggatgactggctctcactggtgaaaattaagtttagggaggagcccggatgttgcatcgcagtgcattgtgtagcaggcctcggacgcgccccagtcctggtagccttagctctgattgaaggtgggatgaagtatgaggacgccgtccagtttattaggcagaagcgccgaggggcgtttaatagcaaacagttactgtatctggagaaatacagaccgaagatgcggctaagattcaaggacagcaacggtcacagaaacaattgttgcatacaatag

SEQ ID NO: 25881 - DNA, 1308 bp, synthetic construct
  misc_feature 1..1308: note = Description of Artificial Sequence: Synthetic coding sequence
  source 1..1308: mol_type = other DNA
atggagatggagaaggagttcgagcagatcgacaagagcggcagctgggccgcgatttatcaggacatccggcacgaggcaagcgatttcccgtgccgagtagcaaaactgcccaaaaacaaaaataggaaccgttatcgggacgtcagcccgttcgatcactcccgaatcaagttgcaccaggaagacaacgactatatcaatgccagcttgatcaaaatggaggaggcccaacggtcatatatactgacccagggccccctacctaacacctgtggtcatttttgggagatggtgtgggagcaaaagtcacgaggagtggtgatgcttaacagagtgatggaaaagggtagtctcaaatgcgcccagtattggcctcaaaaagaggaaaaggaaatgatattcgaggatacgaacctcaagttgacgcttatttctgaagacataaaaagctactataccgtccgccaactggagctagagaatctgacaacccaggaaacccgtgagattctccactttcactacactacctggcctgatttcggggtccccgaaagcccagcctcatttcttaacttcctgtttaaggtgagagagtctgggagcttgtctcccgagcacggaccagtcgtggttcattgtagcgctggaattggaagaagcggaacattctgcctcgcggacacttgcctgcttctcatggacaaacgcaaggatccaagttctgtcgacattaaaaaggtccttctggaaatgcgcaagttcaggatgggtctgatccaaacagcagaccaactgcgtttctcttacctcgcggtgattgaaggtgccaagtttattatgggggactccagcgtgcaggatcagtggaaggaactctcacacgaggacttggagccgccacctgagcatatcccccccccgcctcgaccacctaagaggattcttgagcctcacaatggaaagtgtagagagtttttccccaaccaccagtgggtcaaagaggagacccaggaggacaaggactgtcccattaaggaggaaaaaggcagtccactgaatgccgcaccctacggcatagagtcaatgagtcaggataccgaagtccgaagcagggtggtggggggaagcttacggggtgcccaggctgcttcccctgcgaagggcgagccttctttgcccgaaaaagacgaagatcacgccctatcctactggaagccgttcttagtgaacatgtgtgtggccacagtactgactgcgggcgcttacctttgttaccgctttttgttcaacagtaatacctag

SEQ ID NO: 25882 - DNA, 1089 bp, synthetic construct
  misc_feature 1..1089: note = Description of Artificial Sequence: Synthetic coding sequence
  source 1..1089: mol_type = other DNA
atggaggaggcccagcggagctacatcctgacccagggccccctgcccaacacatgtggtcacttctgggagatggtttgggagcagaaatccagaggcgtagtgatgctgaacagagtgatggagaagggatcactgaagtgtgcgcaatattggccccagaaagaagaaaaagagatgatcttcgaggacacaaaccttaagctgactctgatatccgaggacatcaagtcgtattatacagtgagacagctcgaactggaaaatctgacgacacaggaaactcgtgagatcctgcactttcactacacgacctggccagactttggtgtcccggagagtcccgcatcatttctaaatttccttttcaaggtgcgggagtcaggcagtttgagccccgaacatggcccggtggttgtccactgctcagcaggaatcgggcgttccggtaccttctgtctcgctgacacctgccttctgttgatggacaaaagaaaagatccctcatccgtggacataaagaaggtgctgttggagatgcgcaaattcagaatggggctaatccagacggcggaccagttacggttttcctatttagccgtgatcgagggagccaaatttattatgggagattcctctgtccaagatcagtggaaggaactgtctcatgaagacctggagcccccacccgaacacatcccaccccccccccgccccccaaaaagaatcctggagccccataatggaaagtgtcgggaattcttcccaaatcatcagtgggtgaaagaagagacacaggaggataaagattgcccgattaaagaagaaaaaggcagccccctcaatgcagcgccatatggcattgaatcgatgtctcaggatactgaggtcagatccagagtggtcgggggctcgctgcgcggagcccaagccgcctctcccgccaaaggtgaacctagtctgcctgaaaaagacgaggatcatgccttaagctactggaaaccttttctggtgaatatgtgtgttgccacagtacttaccgccggagcctatctttgttacagattcctgttcaactccaacacttag

SEQ ID NO: 25883 - DNA, 1782 bp, synthetic construct
  misc_feature 1..1782: note = Description of Artificial Sequence: Synthetic coding sequence
  source 1..1782: mol_type = other DNA
atgaccagccggcggtggttccaccccaacatcaccggcgtggaggccgaaaatttgctgttaaccagaggagtggacggtagctttctggctagaccttcaaaatccaaccccggcgacttcacattgagcgtgagaaggaacggggccgtcacacatatcaaaatccagaacacaggagactattacgatctctatggtggagaaaaattcgccactctcgcagagcttgtgcaatattacatggagcaccacgggcagctcaaggagaaaaatggcgatgtaatagaactcaagtatccgctcaactgcgctgaccctacatctgagaggtggtttcacggccatctaagcggtaaagaggccgagaaacttctgactgaaaaaggcaaacacggctcttttttagttcgggaaagtcaatcacacccaggagacttcgtgctttctgtgaggactggggatgataagggagagtcaaacgatgggaaaagtaaggtaacacatgtgatgattaggtgccaggagctcaaatacgacgttggcggcggcgagaggttcgattccctcaccgacctcgtcgagcactataaaaagaaccccatggtggagactctgggaacggtcttacagttgaaacagccgttgaataccacccgcatcaacgccgctgagatagagtcccgggtgagagaactgtcgaagttggctgaaactactgacaaggtgaagcagggattttgggaggagtttgagaccctgcagcaacaggagtgtaaactgctttactctaggaaggagggccagcgccaggagaataaaaataaaaaccggtacaagaacatcttgccctttgatcacacacgagtagtactacacgatggggatcccaatgaacccgtaagcgattacattaacgccaacattatcatgccggagttcgagaccaaatgcaacaactcaaagccgaagaagtcgtatatcgccacccagggttgtttgcaaaatacagtgaatgatttttggcgtatggtgttccaggagaatagccgagtgatcgtaatgacaacaaaagaggtggaacgagggaagtctaaatgcgtcaaatactggcctgacgagtacgccctaaaggagtacggcgtcatgagggtgcggaatgtgaaggagagtgctgctcatgactataccctgcgggaattaaaactgtcgaaagtgggccaggggaatacagagcgaacagtgtggcaataccactttcgcacatggccagaccatggggtgccatccgacccaggtggcgtgttagacttcttggaggaggtgcatcacaagcaggaatctatcatggatgctggacctgttgtggtacattgtagcgccggaattggccgaaccggaactttcatcgtgattgacatactcattgacattatccgcgaaaagggcgtggactgtgacatagacgtgccaaaaaccattcagatggtacgaagtcagcgtagcgggatggtccagactgaggcccaatataggtttatttatatggctgtgcagcactacatcgaaacactgcagcgcagaatagaggaggagcagaaatcaaagagaaaaggacatgagtacaccaatatcaaatattcattggcagatcaaaccagcggcgaccagtcacccctcccaccatgcacccctacgcccccctgtgccgagatgcgtgaggattctgcaagagtgtacgagaatgtgggcctgatgcagcagcagaagagcttcagatag

SEQ ID NO: 25884 - DNA, 651 bp, synthetic construct
  misc_feature 1..651: note = Description of Artificial Sequence: Synthetic coding sequence
  source 1..651: mol_type = other DNA
atgaccagccggcggtggttccaccccaacatcaccggcgtggaggcagagaaccttctcctgacacgaggcgtcgacggatcttttcttgccaggccttccaagtcaaatccgggagattttactcttagcgtaagacgcaacggcgctgtgacacacattaaaattcagaacaccggagactattatgacttgtatggtggagagaagtttgccactctagctgagctggtgcagtattatatggagcaccatggacagctgaaagagaaaaatggtgacgtgatagaactgaaatatcctttgaattgtgcagatccaacctctgagcggtggttccacggccatctcagcggcaaggaggcagagaaattactcaccgagaagggtaaacacggtagcttcttggtacgggagtcccagagccacccgggggatttcgttctttccgtccgtacgggggacgacaagggggagagcaatgatgggaagtcgaaggttacacacgtcatgattcggtgccaggagctgaaatacgatgtgggtggcggagaaagattcgactcattgactgacctggtggaacattacaaaaaaaaccctatggtcgagacactcggtaccgtgctgcagctgaaacaaccactatag

SEQ ID NO: 25885 - DNA, 1383 bp, synthetic construct
  misc_feature 1..1383: note = Description of Artificial Sequence: Synthetic coding sequence
  source 1..1383: mol_type = other DNA
atgaccagccggcggtggttccaccccaacatcaccggcgtggaggcagaaaatctcctgctgacccggggagtggacggctcttttttggctcgtccctccaagtcaaaccccggggattttacgctgagtgttcgcagaaacggcgctgtgactcatataaagatccagaatacgggcgactattacgatctgtatgggggcgaaaagttcgcgaccctcgcagagctggtgcagtattatatggagcaccacggacaactgaaggaaaagaacggggatgtgatcgagctcaaatatcctcttaattgtgcagatccaacctctgaacggtggttccatggccatctcagtggcaaagaagccgaaaagctcctgaccgagaaaggaaagcacgggtcgttcctcgtgcgggagtcacaaagccatcccggggattttgtactttctgtccgcacaggcgatgataaaggggagagtaacgacggtaagagcaaggttacacacgtcatgatccgttgtcaggaacttaagtacgacgtaggaggcggagagagattcgactccctcacagatttagttgagcattacaaaaagaacccaatggtggagactctcggtaccgttctgcagctcaagcagccattgaacacaactagaatcaacgctgcggaaattgaaagtagggtgcgcgagctgagcaagctggctgagacaacggacaaggttaagcaaggcttctgggaggaatttgagactttacagcaacaggaatgtaaactcctgtatagtcgcaaagagggccagcggcaggagaacaagaataagaatcgttacaagaatatcctgccattcgaccacactcgagtggtgctgcacgatggggaccccaacgagcctgtctccgattatattaatgccaacattatcatgcccgaatttgaaactaagtgtaacaacagcaaaccgaaaaaaagttatattgcgactcaaggatgcctgcagaacaccgtcaatgacttctggagaatggtgtttcaggaaaatagtcgtgtgattgtcatgactacaaaagaggtggaaaggggcaagtcaaaatgtgtgaagtattggcctgacgaatacgctctgaaggaatatggcgtgatgcgcgtgcggaatgtgaaggaatcagccgcacacgattacaccctgagagaactgaaactcagcaaagtgggtcaaggcaatacagaaagaacggtttggcagtaccattttcgaacgtggccagaccatggagtgccgtctgaccccggcggcgtgctggacttcctagaggaggtccaccacaagcaggagtcaattatggatgcgggtccagtagtcgttcattgtcgatag

SEQ ID NO: 25886 - DNA, 723 bp, synthetic construct
  misc_feature 1..723: note = Description of Artificial Sequence: Synthetic coding sequence
  source 1..723: mol_type = other DNA
atgtacctgtggctgaagctgctggccttcggcttcgccttcctggacacagaggtctttgtgacaggacagtctccaactccatccccgactggacaccttcaggccgaggaacaaggatcacagtccaagtcccctaatctgaaatcccgcgaagccgatagtagcgccttctcctggtggcctaaagccagagaaccgctcactaatcactggcggctgacaactgctaaaatgccgagcgtacccctaagtagcgacccattgcctacacacactactgctttcagcccagcttcaacgttcgagcgtgagaacgatttcagcgagaccacgaccagtctgagccccgacaacacttctacgcaggttagcccagattctctcgataatgctagcgctttcaacactaccggtgtgtcaagcgttcagaccccacaccttccgacccacgctgattcacaaacgccctcagctggcaccgatacccaaactttcagtggcagcgccgctaacgccaaacttaacccaacacccggcagtaatgctattagtgacgtacccggagagcgcagcaccgccagcacattcccaacagatcccgtgagcccccttactacaacattatccctggcccaccactctagcgctgccctcccagcccgaacatcaaacacaacgatcacagccaacacctccgatgcttacttgaacgcgtcatag

SEQ ID NO: 25887 - DNA, 3432 bp, synthetic construct
  misc_feature 1..3432: note = Description of Artificial Sequence: Synthetic coding sequence
  source 1..3432: mol_type = other DNA
atgtacctgtggctgaagctgctggccttcggcttcgccttcctggacacagaggtcttcgtgacaggacagagtcccaccccaagcccgacagatgcgtacctgaatgccagcgagaccaccaccttgagtccatctggcagcgccgtgatcagtacaaccacaatagcaacaacccctagtaagcccacatgtgacgagaagtacgccaacataacagtggactacctctataacaaagagacaaagctgtttacagcaaaactcaatgtaaacgaaaacgtggagtgtggtaataatacctgcacaaacaatgaagtgcataatttgacagagtgtaaaaatgcctctgtttcaatcagccacaatagttgcactgcccctgataagacacttatcctggacgtgccgcctggggtcgaaaagttccagctgcatgactgtacacaggtagagaaggccgatacaacaatctgcctgaaatggaagaacattgaaacttttacgtgcgacactcaaaatataacttaccggtttcaatgtggcaacatgatcttcgacaataaggagataaagctcgagaatctggaacccgaacacgagtataaatgtgattctgagattctgtataacaatcacaagtttactaatgcaagcaaaattatcaagacggacttcggttcccctggagagcctcagatcattttctgtaggagcgaggccgcgcaccaaggagtgatcacttggaaccctccccaacggagcttccataatttcacactttgttatatcaaggagactgagaaagactgcctgaatttagacaagaacctaatcaagtacgacctgcagaatctcaagccctatacaaagtatgtcctgtctctgcatgcgtacataatcgcgaaagtgcagcgaaacgggagcgcagcaatgtgccattttaccacaaagagcgcaccaccatcccaggtgtggaatatgacagtatctatgacaagtgacaactctatgcatgtgaaatgcaggcccccaagagaccggaacggccctcacgagcgataccatctggaggtggaggccgggaatactctggtgagaaatgagtcacacaagaactgtgattttcgagtcaaagacttacagtactcaacagattacacgtttaaagcctactttcataacggcgattacccaggagaaccatttatactgcatcactccacaagttataatagcaaagcgttgattgccttcttggctttcctgataatagtgactagcatcgctttactcgttgttctgtacaagatatacgatctgcacaaaaaacgtagctgcaacctcgatgagcaacaagagctggtcgagcgggacgacgaaaaacaattgatgaacgttgaacctatccacgccgacatactcctggagacttataagcgaaagattgccgatgagggacgcctcttcttagctgaattccaatcaattccccgggtgttctccaaattccctattaaggaagctcgtaagccatttaatcaaaataagaaccgatatgttgacatccttccttatgactacaatagggtggaactgagcgagataaatggcgatgccggcagcaattacattaatgctagctacatagatggattcaaggaacctcgcaagtatatcgcggctcagggcccccgggacgagacagtagatgacttttggcgcatgatttgggagcagaaggcgacagtgatagtgatggttacacgatgtgaagagggcaatcggaacaaatgcgccgagtactggccctctatggaggagggaacacgcgcttttggagacgttgtggtgaaaatcaaccaacacaaacgttgccctgactatataattcagaagctgaacattgtcaacaagaaggagaaagccacgggcagagaagtcacccatatccagttcacttcttggcctgatcacggggtccccgaggacccacacctgctgttgaaactgcggaggagagttaacgccttttccaacttcttctcggggccaatcgtggtgcactgcagtgctggagtcggacgcaccggaacatacattgggattgacgctatgttggagggcctggaggccgagaataaggttgacgtgtacggatacgttgtgaaactgagaagacagcgatgtcttatggtccaggtggaagctcagtatattcttatccatcaggcactcgtagaatacaatcagtttggcgaaaccgaagtcaacctgagcgagctgcacccttacctgcacaacatgaagaagagggacccaccttcagaaccatcaccgctcgaagccgagtttcagagattgccctcataccgtagttggcgaactcagcacatcggtaaccaggaggagaataagagtaaaaaccgcaatagcaacgtgattccatatgattacaacagggtcccacttaagcatgaacttgaaatgtctaaggaatctgagcacgacagtgatgagtcctcggacgacgactctgatagcgaggaaccatctaagtatatcaatgcctcgttcattatgagttactggaaacctgaggtgatgatcgccgcacaaggcccacttaaagaaactatcggcgacttctggcaaatgatctttcagagaaaggtgaaagtgattgtgatgctcacagagctcaaacacggtgatcaggagatctgcgcccagtattggggtgaggggaagcagacttacggagatattgaggtcgatcttaaagacacagacaagagtagtacatacaccctgcgcgtcttcgagctccggcacagcaagcgtaaggacagccgcactgtgtatcaatatcagtacacaaattggtccgtcgagcagctgcctgctgagccgaaagaattaatctctatgatccaggtcgtgaaacagaaactgccccagaaaaacagctcagagggtaacaaacatcacaaatccacacctcttctcatccactgtcgcgatggcagccaacagactggaatcttttgcgcactgctcaatcttttagagtccgctgaaaccgaggaggtggtagacatcttccaggtggtgaaggccttgcgcaaggccaggcccggcatggttagcacattcgaacaataccagttcctctacgatgttattgcgagtacataccccgcccaaaacggacaagtgaagaagaataaccatcaggaagataagattgaattcgacaacgaggtggacaaagttaaacaggacgctaactgcgtaaacccattgggagctccagagaaacttcctgaagcaaaagaacaggcagaaggtagcgagccgaccagcggcactgaaggacctgaacactcagtaaacgggccagcatccccagccttaaaccaaggctcatag

SEQ ID NO: 25888 - DNA, 3771 bp, synthetic construct
  misc_feature 1..3771: note = Description of Artificial Sequence: Synthetic coding sequence
  source 1..3771: mol_type = other DNA
atgtacctgtggctgaagctgctggccttcggcttcgccttcctggatacagaggtattcgtgactggccagtcaccaaccccctctcccacaggtctgaccacagctaaaatgccatctgttcctctaagctctgatccactgccgactcacacaaccgccttttcgcccgctagcacattcgaacgagagaacgacttctcagagacaaccacatctctcagccctgacaacacatccacacaagtcagtccagactcactagacaatgcgtctgccttcaacaccactggagtatcatcagtgcagactccacatctccccacccacgccgactcacagacacctagtgccggcactgacacacagaccttttccggcagcgccgcaaatgctaagctgaacccaactcctgggtcgaacgctatttctgacgcctatctcaacgcttccgaaaccaccactctttcgcctagtggatcagctgtcatttccacaacaaccatcgctacaacccctagtaagccaacttgcgatgagaagtacgccaacatcaccgtcgactacctgtacaataaagagactaagctgttcaccgctaagctgaacgtgaacgagaatgtcgagtgtggaaacaacacatgtaccaacaacgaagtgcacaacctaacagaatgtaagaacgcatctgtatctattagtcacaatagctgtacggctcccgataagacacttattctcgacgtccctcccggtgtcgagaaattccaactgcatgactgcactcaggttgagaaggccgataccaccatttgcctgaaatggaagaacatcgaaaccttcacctgcgatactcaaaacataacttatcgatttcagtgcggtaatatgatcttcgacaacaaggaaatcaaactcgaaaatctcgaacctgaacatgagtataaatgtgactcggagattctctacaacaaccacaagtttactaatgcatctaaaatcatcaagaccgatttcggcagtcctggagagcctcaaattatattttgcaggtcagaagccgcacatcagggcgtgatcacgtggaaccctcctcagaggagcttccacaattttaccctgtgctatattaaagaaaccgagaaagactgcttgaatctcgataagaacctgattaagtatgacctgcagaacctgaagccatacaccaagtacgtgctcagcctgcacgcgtatattattgcaaaagttcagcgcaacggttctgctgcaatgtgccatttcacaacgaagtccgcccccccatcacaagtgtggaatatgacagtgagcatgacatccgataacagcatgcacgtcaagtgccggcccccaagagacaggaacggaccacacgagcgctaccatctggaagttgaggctgggaacacgctggtgagaaacgagtcacataaaaactgcgacttccgcgtgaaagacctgcagtacagtaccgactatacctttaaggcatactttcacaatggagactaccccggagagcctttcatactgcaccactccacatcctataacagtaaggccttaatcgctttcttggcgtttctgataattgtcacgtccatagctctcctggtggtgttgtataaaatatatgacctgcataaaaaacgctcttgcaatctggatgagcagcaggaactggtggagagagacgatgagaaacagctaatgaacgtggagcctatccatgccgacattctcttggaaacctacaagcgaaagatcgcagatgaggggagacttttcctagcagagttccagtccataccaagagttttttctaaattcccaatcaaagaagctagaaagccctttaaccagaataagaaccggtacgtggacatcttgccttacgactataacagagtcgagctcagcgagatcaatggcgacgcaggcagcaactacatcaacgctagctatattgatggtttcaaggaaccccgtaaatatatcgctgcacaggggccacgagacgaaactgttgacgacttctggagaatgatctgggagcagaaagcaaccgtgattgtgatggttacacgatgcgaggagggtaaccgcaacaaatgcgctgaatattggcccagcatggaggaagggacccgtgcgttcggcgacgtggttgttaagatcaatcaacataagagatgtccagattacataatccagaagttgaatattgtaaacaagaaagagaaggccacaggacgagaggtgacccatattcagtttaccagctggccggaccatggcgttcccgaggatcctcacctgctgctcaagttacgccgtagggtgaacgctttctccaactttttttctggtccgatcgttgtgcattgcagcgcaggtgtgggtcggacgggaacatatattggcatcgatgcaatgttggagggtcttgaagccgaaaataaagttgatgtctatggctacgttgtgaagttacgacgccaacggtgccttatggtccaggttgaagctcagtatatactaatccaccaggcactggtggaatataaccagttcggagagactgaagtgaatctttcggagctgcatccttatcttcacaatatgaaaaaaagggatcctccatctgaaccgagcccgctagaggccgagttccagcggttgcctagctacaggagctggagaacgcagcatatcgggaatcaggaggaaaataagagtaagaacaggaattccaacgtgattccttatgattataatcgcgtgccactaaagcatgaactggaaatgtctaaagaatccgaacacgacagcgatgaaagctcagacgatgattctgactcagaagaaccctctaaatatatcaacgcgagcttcattatgtcttattggaaaccagaagtaatgatcgccgctcagggtccgctgaaggaaacaatcggcgatttctggcagatgatatttcagaggaaagtgaaggtgatagtgatgctcaccgagctaaagcacggggaccaggagatctgtgctcagtattggggtgagggcaagcagacatatggagatattgaagtggatctcaaagatacggataagagctcaacctatactctgagagtgttcgaactgagacactcgaaacgcaaagactcccggacagtttatcaatatcagtacactaactggagtgtggagcagctacccgcggagccaaaagaacttatctccatgattcaggtcgtaaagcagaagctgccccagaaaaactccagtgaaggtaataaacaccacaagtcaaccccattactcattcattgtcgggatggcagtcaacagaccggcatcttctgcgccctactcaacctattagagtccgccgagactgaggaggttgttgacattttccaggtggtcaaggccctgagaaaggcgcgccccgggatggtatctaccttcgagcagtatcagtttttgtatgatgtcattgcctccacttaccctgctcagaatgggcaagttaagaagaacaaccaccaggaggataagattgaattcgataacgaagtggacaaagtgaaacaagatgctaattgtgtgaatccactgggagcacccgagaagttgcccgaggccaaggagcaggccgagggttccgagccaacatcaggcaccgagggacctgagcatagcgtcaatggcccagcctcaccagcccttaaccagggctcatag

SEQ ID NO: 25889 - DNA, 2208 bp, synthetic construct
  misc_feature 1..2208: note = Description of Artificial Sequence: Synthetic coding sequence
  source 1..2208: mol_type = other DNA
atgaccatgtacctgtggctgaagctgctggccttcggcttcgccttcctggacacagaggtgttcgttaccggccagtcaccgaccccttcgcccacgggagtaagcagcgttcagacgccacatctgcccactcacgccgacagccagactcccagcgcaggaactgacacccagactttcagtgggtcagctgctaacgctaagcttaacccaacacctggttccaacgccatttccgacgttcctggcgaacggtcaacagccagcaccttccctactgatccagtatcccccctgacaaccaccctcagcctggcacatcacagtagcgctgccttgccagccaggaccagcaataccactataacagcgaacacatccgacgcctacctgaacgcaagcgagacaaccacgctcagtccctctggcagtgccgtgatttctaccactaccattgccactaccccctctaaacccacctgcgatgagaaatacgcaaatattacagtggattatctctacaataaagaaactaaactcttcaccgcgaaattgaatgtaaatgaaaacgtggagtgtgggaacaacacgtgcacaaacaatgaggtacataatctgacggagtgcaagaacgctagtgtctcaattagccacaatagttgcacggcaccagataagactctcatattagatgtcccgcctggcgttgaaaaatttcagttgcacgattgtacacaagtggaaaaggcagacactaccatttgcctgaagtggaaaaacattgagacctttacgtgcgacacacaaaatattacctaccgctttcagtgtggtaacatgatcttcgataataaagagatcaagctggagaacctggagccagaacatgaatataagtgtgactctgagatcctctataataaccataagtttaccaatgcaagcaaaatcataaaaactgattttggctcacctggtgagccccagatcatattttgccggtccgaagcggcccatcagggggtgatcacttggaatcctccccagagatcctttcacaactttaccctctgttatattaaagagaccgagaaagactgtcttaacctcgataaaaacctgatcaagtacgacctacaaaacctcaaaccatacacaaagtatgtgctatctttgcacgcctatattattgctaaagtccagcgaaatggctctgccgccatgtgtcattttacgaccaagtcggccccaccttcccaggtctggaacatgacagtgagcatgacaagcgataattccatgcacgttaagtgccgcccccctagggaccggaacgggccacacgagagataccacctggaggtcgaggccggcaatactcttgtacgaaatgaatcccataaaaactgcgattttagagtaaaggacctgcagtattctactgactacacatttaaagcttacttccataatggagactaccccggtgaacctttcattctgcaccattccaccagctataactcaaaggctctcatcgcctttctcgctttcctgattatagttacttccatagccctcctcgtggtgttgtataagatatacgacctgcataagaaaagaagctgcaatctggacgagcagcaggaactggttgagcgcgatgatgaaaagcagctcatgaatgtggagcctatccacgcagacatccttctggagacatataaaagaaaaattgccgatgaggggcggctgttcctcgcggagtttcaatccatcccaagggtgttttctaagttccccattaaggaagctcgtaagccatttaatcagaacaaaaaccggtatgtggatatcctaccatacgactataaccgcgtggagctatctgagattaacggagatgcagggagcaactacataaatgcttcctacatcgacggcttcaaagaaccccggaaatacattgccgcacaggggccgcgcgatgaaaccgtcgacgacttctggcgcatgatttgggaacagaaggcaacagtcattgttatggtaactagatgtgaggaaggcaaccgcaacaaatgcgcagaatactggcctagcatggaagagggcacacgcgctttcggagatgtagtagttaaaattaatcagcataaacgttgtcctgactatataatacagaagttgaacatagtaaactag

SEQ ID NO: 25890 - DNA, 2202 bp, synthetic construct
  misc_feature 1..2202: note = Description of Artificial Sequence: Synthetic coding sequence
  source 1..2202: mol_type = other DNA
atgtacctgtggctgaagctgctggccttcggcttcgccttcctggatacagaggtgttcgtcacaggtcaatctcccaccccaagccctactggcgtatcttctgtacagacgccacacttgccgacccatgcggacagtcaaaccccatccgccggtactgatacacagacattttctgggtccgctgcgaacgccaaactgaacccaacacctggctcaaacgccatcagcgacgtgccaggtgagaggtccactgcatccacatttccgactgaccctgtgagtcctctcacaacaactctatccctggctcaccattccagtgccgcactgccggcccgcacaagtaacactactattacagccaataccagcgacgcatatttgaacgcatctgagaccacaaccctgtccccgtctggcagtgcagtcatatcaaccacaaccattgcaaccacaccgtcgaaaccgacctgtgatgagaagtatgccaatataaccgttgattacctgtataataaagaaactaagctgtttacagccaaactgaacgttaacgagaacgttgagtgcggaaacaacacatgtactaataatgaggtacacaatttaactgaatgtaagaatgctagtgtgtctatctctcataatagttgcaccgccccagataagaccctcatcctcgatgtgccaccgggcgttgaaaagttccagctgcacgattgcacacaggtagagaaagccgataccacaatttgccttaagtggaaaaacatagaaacctttacctgtgacactcagaatattacctaccggtttcagtgcggcaatatgatcttcgacaacaaggaaatcaagctcgagaatttagaacctgaacatgaatacaaatgtgattccgagatcctctataataatcataaatttaccaatgcttcgaaaatcattaaaacagacttcggttcacccggagagccacagattatattttgcaggagcgaggccgcgcaccagggagtgattacctggaacccgcctcagagatcattccataatttcacactttgctatatcaaagaaactgagaaggattgtctgaacttggacaagaacctaattaagtatgacctacaaaatctgaagccctatactaaatatgttctgtccctgcacgcttacatcatcgcaaaggttcaaagaaatggctccgcagccatgtgtcacttcaccacgaagtccgcccccccgtctcaggtctggaacatgacagtgagcatgacatcggacaattccatgcatgtaaaatgcaggccacctagggatcggaatggcccccacgaacggtaccatctcgaggtcgaggccggaaatacgctggtaaggaatgagagccacaagaattgcgactttagggtcaaggacctgcagtatagtactgactatacctttaaggcatactttcacaacggcgattacccaggcgaacctttcatcctccaccactctacttcatataactctaaggctctgatcgcttttctcgcttttctgattatagttaccagcatagcccttctcgttgtcctgtacaagatctacgacctgcacaagaaacgcagttgcaacctggacgagcaacaagagcttgtggaacgcgatgatgaaaaacaattaatgaatgtggagcctatccatgccgacatcctgctagagacctataagagaaaaattgccgacgaaggtcggttgttcctagccgagttccagtcaataccaagagtattttcaaagttcccgataaaggaggcgaggaagccattcaatcagaataaaaatcgttacgtagacatattgccctacgactacaaccgtgtcgagctgagcgaaattaatggggatgccggctccaattacataaacgcgagctacatcgacggatttaaggagcctaggaaatacattgcagcccagggaccccgcgacgaaaccgttgacgatttttggaggatgatctgggagcaaaaggccacagtgatcgtcatggttactagatgcgaggaggggaacagaaacaaatgtgcggagtattggccatccatggaagagggaacccgggccttcggagacgtggtagtcaagatcaaccagcacaaacgctgccccgattacatcatccaaaaattaaatattgttaattag

SEQ ID NO: 25891 - DNA, 3921 bp, synthetic construct
  misc_feature 1..3921: note = Description of Artificial Sequence: Synthetic coding sequence
  source 1..3921: mol_type = other DNA
atgaccatgtacctgtggctgaagctgctggccttcggcttcgcctttctcgacaccgaggtgtttgtgacgggtcagagtcctactccaagtcccactggcctgacgacagccaaaatgccgagcgtcccccttagctcagacccccttcctacgcatacaacagcctttagccccgcctccacttttgagcgtgagaacgacttttcagagacgaccacctcactgtccccagacaatactagtacgcaggtgtctcctgacagcctggataatgcatcagctttcaatactaccggtgtgagtagtgtccagactccccacctacctactcacgctgactcccagacgccatcagctggtaccgatacgcagaccttctccgggtccgccgcaaatgcaaagctaaaccctacccctggctccaatgccatctccgacgtccccggggagcgctcaacggcgtcgacatttcctaccgatcctgtgagtcctttgactacgaccttgagcttagcacatcactctagcgccgctctgccggctcgcacatctaatactactattacggccaatacttcagatgcttacttgaatgcttccgagacaactacactgtcgcccagcgggtccgcagtgatttcaactaccactatcgctactactccttcaaaacctacatgcgacgagaaatatgcgaacatcactgtagactacctgtacaataaggaaaccaagctttttacagcaaagctgaatgtgaatgaaaatgtggagtgtggtaataatacttgcaccaacaacgaagtgcacaatctgaccgagtgcaagaacgccagcgtctctatctctcacaacagctgcactgcccccgacaagactcttatcctagacgtcccccccggcgtcgagaagtttcagctccatgattgcacacaggtggagaaagctgatacgactatctgtctgaagtggaagaacatcgagactttcacttgtgacactcagaatattacttaccggtttcagtgtgggaatatgatttttgacaacaaggaaattaagctcgagaacttggaacctgaacatgagtataaatgcgatagcgagatcctctacaataaccataagttcactaatgcctccaaaattatcaaaaccgatttcggatcacctggtgaaccacaaataatcttctgccggtccgaggcggctcatcaaggagtaatcacgtggaaccctcctcagagaagttttcacaactttactctgtgctacatcaaggagaccgaaaaagattgcctcaacctggataaaaacctgattaaatacgacctacagaacctcaagccttatacaaaatatgttctatccctccacgcttatatcatcgccaaggtgcagaggaacggatccgcggctatgtgtcactttacaactaagtccgcacccccatcgcaggtgtggaatatgacagtttccatgacttccgacaactccatgcacgttaagtgcaggcctcccagagatcgaaatggccctcatgagcgttatcatctggaagtcgaggccgggaacaccctagtgcggaacgagagccacaagaattgcgatttccgcgtgaaggatctgcagtactcaaccgactacaccttcaaggcctatttccacaacggagattatcctggcgagcctttcatactgcaccactccacctcatacaactcaaaggctctcatcgccttccttgcatttttgataatcgtcacaagcatcgctctactggtggtgctgtacaagatatatgatttgcataaaaagaggtcctgcaacctggatgaacaacaggagctggttgagagagacgatgaaaagcagctcatgaatgttgagcctatccacgcagatatcctgttagaaacttacaaacgaaaaatcgctgatgagggtaggcttttcctagcagagttccaatccatcccccgagtgttctccaaatttcccatcaaggaagccagaaagccctttaaccagaataagaatagatacgtggacatcttgccgtatgactataaccgcgtggagctcagcgagattaatggagacgctggctctaattacatcaacgctagctacatcgacggcttcaaagaaccgaggaaatacatcgctgctcaggggccgagggacgaaacggtcgacgatttttggagaatgatctgggagcagaaagcaaccgttattgtcatggttacccgctgtgaagaggggaatcggaacaagtgtgcagagtactggccatccatggaggagggaaccagagcctttggagacgtcgtggtaaaaatcaatcagcacaaacgatgccccgattatattattcaaaaacttaacattgtgaataaaaaagagaaagccacaggtcgcgaggtgacccatatccagttcacctcatggcctgaccatggggtacccgaagatccgcacttgctgctgaagcttcgccgcagggtcaatgcatttagcaatttcttcagcggaccgatcgtagtacattgctcagccggcgtcggaaggacgggcacgtacattgggattgatgctatgctcgaaggattggaggcagagaacaaggtggacgtatacggatacgtcgtaaaactgcggcgccagcgttgcctgatggtgcaggttgaggctcaatacatcttaatccatcaggcgctggtggaatacaatcagtttggggaaacggaagtcaacctatctgaactccacccatatctccacaacatgaagaagagagatcctcctagcgagccatcaccccttgaggccgagtttcagaggctcccgagctacagatcttggcgaacccagcacatcgggaaccaggaggaaaataaaagtaagaacaggaacagtaatgtgataccctatgattataatcgggtgcctcttaagcatgaactggagatgagcaaagagagtgagcacgattcggatgagtctagcgatgatgattccgacagcgaggagcccagtaagtacattaacgctagctttatcatgtcatactggaagcctgaggtgatgattgccgctcaaggccccctgaaagagaccatcggggatttctggcagatgatcttccagcgcaaggtaaaagtcatcgtcatgttaactgaactgaaacacggggaccaagaaatctgcgcccagtattggggcgaagggaagcagacttacggagacatcgaggtcgatctaaaagatacggataagagttctacctacactttacgggtgttcgaactccgacattccaagaggaaagactcccgtacagtctaccagtatcaatataccaattggtccgtggagcagctccccgctgaacccaaagaactgatctccatgatccaggttgtcaagcagaagctcccacagaaaaactcttctgaggggaataagcatcacaagagtacacccctgttaatccattgccgcgacgggtcgcagcagactgggattttctgtgcactgcttaatttgctcgagagcgctgagactgaggaagtggtcgacatattccaagtggtgaaggcgctgcgcaaggcacgtcctggcatggtgtccacatttgagcaatatcaatttctgtacgacgttatagcatccacttatcccgcgcagaacggccaagtgaaaaagaataatcatcaggaggacaaaatcgaatttgacaacgaggtggataaggtgaaacaagatgctaattgtgttaacccacttggcgcgccggagaagctccctgaggccaaggagcaagcggagggctctgagccaacaagtggtacagaaggtccagagcattcagtgaatggccccgcaagccccgccctcaaccagggttcttag

SEQ ID NO: 25892 - DNA, 441 bp, synthetic construct
  misc_feature 1..441: note = Description of Artificial Sequence: Synthetic coding sequence
  source 1..441: mol_type = other DNA
atgtacctgtggctgaagctgctggccttcggcttcgccttcctggatacggaagtattcgtaacaggacagagcccgacgccatcacccaccgacgcgtacctgaacgcaagcgaaacaacgacgcttagcccttccggcagcgcagtgatttcaacgacaaccatcgcgaccaccccgtccaaacccacttgtgacgagaaatatgcaaacattacggttgattacctgtataacaaggagaccaaattattcaccgccaagctaaacgtgaacgagaacgtagaatgcggcaataatacttgcaccaataacgaggtgcacaacttaactgagtgtaagaatgccagtgtcagcatatctcataatagctgtaccgcccccgataagaccctcatcctggatgtccctcctggcgttgaaaagtttcaactccactag

SEQ ID NO: 25893 - DNA, 351 bp, synthetic construct
  misc_feature 1..351: note = Description of Artificial Sequence: Synthetic coding sequence
  source 1..351: mol_type = other DNA
atgtacctgtggctgaagctgctggccttcggcttcgccttcctggataccgaagtctttgtgaccggccagtcacccaccccttcccccaccggactgaccaccgccaagatgccgagcgtgcctctgagttcggaccctctgcctactcacaccactgcttttagccctgcgagcacattcgagcgagagaatgatttttccgaaacaactaccagcctgagccctgataacaccagtacccaggtgtctccagattcactcgataacgcctccgcctttaacacaactggagtgtctagtgtgcaaactccccatcttccgacccacgcagattcccagacaccctag

SEQ ID NO: 25894 - DNA, 3915 bp, synthetic construct
  misc_feature 1..3915: note = Description of Artificial Sequence: Synthetic coding sequence
  source 1..3915: mol_type = other DNA
atgtacctgtggctgaagctgctggccttcggcttcgccttcctggataccgaggtcttcgtcactggtcagtcacccaccccatcccccacagggttgaccaccgccaaaatgccttctgttcccttgtctagtgaccctcttcccacacatactaccgctttcagccctgcgtcaacttttgagcgcgagaacgatttcagcgaaacaactacatccctcagcccagataatacttccactcaagtttctcctgattcactggacaatgcctccgcgttcaacaccaccggggtgtcttctgtgcagactccccatctcccaacccatgcagatagtcagacgccttccgccggcaccgacacccagactttctccggaagcgcagccaatgccaagttgaatccaacaccagggtcaaatgctatatccgatgtccctggggagcgctcgaccgcctccaccttccccactgatccagtatcacctctgaccactaccctgtctttggcccatcactccagtgcagcactgcccgccagaaccagcaatactacgatcacagctaacacctcagatgcctacttgaatgcttcggagactactaccctctcaccctcgggcagtgctgtgatctccacaaccacaatcgcaaccaccccgtccaaacccacctgtgacgaaaagtatgctaacattaccgtagattacttgtacaataaggaaaccaagttgtttacagccaagctaaatgtgaacgagaatgtggagtgtggtaacaatacatgtactaataatgaggttcacaacctcaccgagtgtaagaatgcatccgttagtattagccacaattcctgcactgcccccgataaaactcttattctggacgtcccaccaggagttgagaagtttcagttgcacgactgcacacaggtcgaaaaagctgacaccaccatctgtctcaagtggaaaaacatcgagacgttcacttgtgatactcaaaacatcacctaccgatttcagtgcggcaatatgatcttcgacaacaaggaaatcaagctcgagaacttagagcccgaacacgaatacaaatgcgactctgagatactgtacaataaccacaaatttactaacgcatcaaaaatcattaaaacggatttcggctcccccggcgagcctcagatcatcttctgtcggtccgaggctgcacatcagggtgtaattacctggaacccaccccagcgatcatttcataattttactctttgctatattaaagaaacggaaaaagattgtctgaacctggataagaatttgatcaagtacgacctacagaaccttaagccatacaccaagtacgtgctgagcctgcacgcttacattatcgcaaaggtccagcggaatggctcggcagctatgtgtcacttcactaccaaatccgcccctccatcacaggtctggaacatgaccgtgtccatgacatctgataacagtatgcacgtgaaatgtagacccccccgcgataggaatggtccacacgagaggtaccacttggaagtcgaggccggtaataccctggtgaggaatgagagccataagaactgtgacttcagggtaaaagacctccagtactccaccgattacacttttaaggcctactttcacaatggggactaccctggggaacccttcatcctccatcacagcacaagttacaactcaaaggctctgatcgcctttctggcatttctgatcatcgtcacttctattgccttgctggtggttctctataagatctacgacctgcataagaagcgctcttgtaacctagacgagcagcaggagttggttgagcgggatgatgagaagcaactcatgaatgtggagccaattcacgctgacatcctcctagagacctacaaacggaaaatcgctgacgagggccgcctttttttggcagagttccagtcaatcccccgcgtcttcagtaagttccctatcaaagaggctcgcaagcctttcaatcagaacaagaacaggtacgttgacatcctcccctatgactacaacagagtggagttatctgagatcaatggcgatgcaggtagtaattacattaacgccagctatatcgatgggttcaaagagccacgcaaatacatcgccgcccagggtccgagagacgagaccgtagatgatttctggagaatgatctgggaacaaaaggctaccgtgatcgttatggtcacccgatgtgaggagggtaacaggaacaagtgtgccgaatactggccatctatggaagaggggacaagagcgttcggggacgtggtagttaaaatcaatcaacacaaaagatgcccggactacattatacagaaactgaacatcgttaacaaaaaggagaaagctaccgggagagaagtcactcacattcagtttacgtcatggcctgatcatggggtcccagaagatcctcacctgttactgaagctgagaaggcgagtcaatgcatttagtaactttttttctggtccgatcgtcgtccattgttctgccggagtaggccggacagggacatatatcggcatcgatgctatgttggaagggctcgaggccgagaataaggtggatgtctatggttatgttgtaaagttacgcagacaacgctgcctgatggtgcaggtggaggcccaatatatcttaatacatcaagctctggtggaatataatcagttcggagagacagaagtgaacttgagtgaactgcacccctacctgcacaatatgaaaaagagagacccgccgtctgagccttcacccctcgaggccgagttccagcggttaccctcatacaggagttggcgaacacagcacatcgggaaccaagaggaaaacaagtcaaagaatcgaaactccaatgtgattccctatgactacaatcgggtgcctttaaaacatgaattagaaatgtccaaggagagtgagcatgactcagacgagtcatctgatgatgacagtgactccgaagagccttccaaatacataaatgcttcatttattatgtcttactggaagccggaagtgatgatcgccgcgcagggtccgttaaaggagaccatcggcgatttctggcaaatgatatttcaaagaaaggtcaaagtgattgtgatgctgaccgaactcaaacacggtgatcaggagatttgcgctcagtactggggggaggggaagcagacatatggcgacatcgaagtggacctgaaagacaccgacaagtcaagcacctacaccctgagagtgttcgagctaagacactcaaagcggaaagattctcgcactgtgtatcagtatcagtatactaactggtctgtggagcagctgccagctgaacctaaagagctgatttcaatgatacaggtggtcaaacagaagcttccccagaaaaactctagcgaaggcaacaagcaccacaagtcgacgccgctattaattcactgcagggatggttcccagcagaccggcattttctgcgccctcctcaatctactggagtcagccgagaccgaagaagtcgttgacatcttccaagttgtgaaagccctcaggaaggccaggcctggtatggtatcgacatttgagcagtaccaatttctgtacgatgttattgctagcacctacccagcccagaacggtcaagtgaaaaaaaacaaccatcaagaggataagatagagtttgacaacgaggtagataaggttaagcaggatgctaattgtgtcaatccactcggggcccctgagaagctgccggaagctaaggagcaggctgagggatccgaacccacctcaggcaccgagggtccggagcactcagttaacggcccagccagcccagcattgaatcaggggagctag

SEQ ID NO: 25895 - DNA, 1797 bp, synthetic construct
  misc_feature 1..1797: note = Description of Artificial Sequence: Synthetic coding sequence
  source 1..1797: mol_type = other DNA
atgtacctgtggctgaagctgctggccttcggcttcgccttcctggacacagaagtctttgtgacaggacaaagcccgaccccctctccaactggggtgtcctcagtccaaaccccacatctccccacccatgctgactcccagactccaagcgccggaactgacacccaaacatttagcggcagcgcagccaacgctaagcttaatccgacccccggttcaaacgctatcagtgacgcttatctgaacgcctccgagacaacaaccttgtccccttcagggagcgctgtgattagcaccacgacaatcgcaaccactccgtctaaacccacctgcgatgaaaaatatgccaatattacggtggactacctctacaataaggaaactaaactgtttacggccaaactgaatgtgaatgaaaatgtggagtgtggcaataatacctgcaccaataacgaggttcataatcttacagaatgtaagaacgccagcgtatccatatcacataatagctgcaccgcacctgataagacgctcattctcgatgtgccccccggagtggagaagttccagctgcatgactgcacacaggtggagaaagcagacacaaccatttgtctgaaatggaagaacatcgaaacgttcacctgtgacactcagaatattacctatcgcttccagtgcggtaacatgattttcgacaacaaagagattaagcttgagaatctggagccggaacatgaatacaaatgcgattccgagattctttataataaccataagtttactaatgcaagcaaaattataaagacagattttgggtcaccaggcgaaccccagatcatcttctgtcgctcagaagctgcccaccaaggcgtcattacatggaatccaccacagcgcagcttccataactttactttgtgctatatcaaggagacagagaaggactgcctgaacctggacaaaaatctgattaagtacgatctccagaaccttaagccctacactaaatacgtgctttccctacatgcatacataatcgctaaggttcagcgcaacgggagtgcggcgatgtgccatttcaccacgaaatctgccccccccagccaggtgtggaacatgaccgtctcaatgactagcgacaactcaatgcacgtcaagtgccgccctccgagagaccggaatggcccacacgagagatatcatctggaggtggaagcaggaaacactctggtgcgcaatgagagccacaaaaattgcgattttagggtcaaggatttgcaatacagtacggattacacattcaaagcatactttcacaatggggactaccctggcgagcctttcatactgcaccacagtacctcttacaacagcaaagccctgattgctttccttgctttcctgattattgtaacttctatagctctgctggtcgtactctacaaaatctacgacctgcataagaaacggagctgcaatctggacgagcagcaggaactggtggaacgagacgacgagaaacagctgatgaatgtggagcccattcatgccgatattctgctggaaacttataaacggaagatagcagacgaagggaggctgttcctggctgagtttcagtctatccctagagtcttctcaaaatttccgatcaaagaggctcgaaaaccttttaaccagaataaaaatagatatgtggacattctgccttacgattataatcgcgtggaactgtcagagattaacggcgacgctggcagtaactacataaacgcaagctacatcgactag

SEQ ID NO: 25896 - DNA, 2271 bp, synthetic construct
  misc_feature 1..2271: note = Description of Artificial Sequence: Synthetic coding sequence
  source 1..2271: mol_type = other DNA
atgtacctgtggctgaagctgctggccttcggcttcgccttcctggatactgaggtgtttgtgaccgggcagtctccaaccccaagtccaaccggcctcacaacagcgaagatgccatccgtgcctctctcctccgatcctctgccgacacacactaccgccttctctcccgcgagcacctttgagagagaaaacgacttctctgaaactacaacctcactatctcctgacaacaccagcactcaggtgagcccagacagccttgataatgcctctgctttcaataccactggcgtatcgtcggtccagactccgcacctgcctacacacgccgacagtcagacaccatctgctggcacagacacacaaactttctcgggctcggctgctaacgcgaagctgaatccaacccctggatcaaacgctataagtgacgcgtatcttaacgcctctgagactacaacactgagtccatccggctcagccgtgatatccacaactactatcgccacaaccccgtctaaaccaacatgcgatgaaaagtacgctaatataaccgttgactatctttacaacaaagagactaaacttttcaccgccaaactgaacgtaaacgagaacgtcgagtgcggtaataacacgtgcacgaataacgaggtgcacaacctcaccgagtgcaagaacgcctctgtgtcaatttctcacaatagttgcactgcacccgacaaaaccctaatcctggacgtccccccgggtgtcgaaaagtttcagctacacgactgtacccaggtcgaaaaagccgataccactatatgcttaaaatggaagaatatcgaaacctttacatgcgatacccagaacattacctacagattccaatgtggcaacatgatctttgataataaagagatcaagctggagaacctggaacccgaacacgaatacaaatgcgattctgagatactctataacaatcataagttcaccaatgcctccaagatcatcaaaacggattttggatccccaggagaaccacagattatcttctgtaggtccgaggccgcccaccagggagttattacctggaacccgccccagaggtctttccacaacttcaccttgtgttacataaaggaaactgaaaaggattgccttaacctggataagaacctgattaaatatgatctgcagaacctcaaaccttatactaaatacgtcctatctctccatgcctacattatcgctaaggttcaacgcaacggttcagctgccatgtgccattttacaacaaagtctgctcccccctcccaggtgtggaacatgaccgtcagcatgacaagcgataattcaatgcacgtgaaatgcagaccccccagggacagaaacggccctcatgaaagataccacttggaggtggaggctggaaatacactcgtccggaacgagagccacaaaaactgcgatttcagggttaaagaccttcagtatagcacagactacacatttaaagcgtactttcacaacggcgactaccccggggagcctttcattttgcatcatagtacctcttacaactctaaggccctaattgcttttctggccttcctgattatcgtaacctcaattgcactgctggtggtgctgtacaagatttacgacctccataagaaaagatcctgcaatcttgacgaacagcaggaactggtggagcgggacgatgagaagcagctgatgaacgtcgaaccaatccatgcagacattctgttggaaacgtataagagaaagatcgctgatgaggggcgcctgttcctggccgaattccaatccattcctcgggtgttttccaagtttccgattaaggaagctcgcaaaccctttaaccagaacaagaacaggtacgtggatatccttccctatgactataacagggtggagttgagtgaaattaacggcgacgctggttcgaactacattaatgcatcctatattgatggatttaaagagccccgcaaatatattgctgcccaaggcccaagggatgagactgtggacgatttttggagaatgatttgggagcagaaggcaaccgtcatcgtcatggttacccggtgcgaagagggaaaccgcaataaatgtgcagaatactggccatctatggaggagggcacccgagcctttggcgatgtcgtggttaagattaaccagcacaaaaggtgcccagactatattatccagaaacttaatatcgttaataagcagaagagtaagtag

SEQ ID NO: 25897 - DNA, 1662 bp, synthetic construct
  misc_feature 1..1662: note = Description of Artificial Sequence: Synthetic coding sequence
  source 1..1662: mol_type = other DNA
agcgactacatgatcatcaagaagaagagcaactacgaggtgctggaaaaggatgtgggcttgaaacggttttttcctaagtcactccttgactctgtgaaggccaagacactgcgaaaattgatacagcagactttcagacagttcgcaaacctgaaccgggaggaatccatcctcaagttcttcgagatcctgtctcctgtatatcggtttgacaaagagtgtttcaaatgcgccctgggaagctcttggatcatctcggttgagctggcgatcgggcccgaggaagggatctcttatctcacagataaaggctgcaatccaacccacctcgccgatttcacacaagtccagaccatccagtattccaactctgaggacaaggacagaaaaggcatgctgcagcttaaaatagccggggcccctgaaccgctcactgtgaccgctccatccctgacaatcgctgaaaatatggctgatctgatcgatgggtactgtcgtctggtcaacggaacctcgcagtctttcatcatccggccgcagaaggaaggtgaacgtgcactgccatccattcctaagcttgcaaattcggagaagcagggcatgcgaacacacgcggtgtctgtgtcagaaacagacgattacgctgaaattattgatgaggaggacacctatacaatgccctcaacacgcgattacgagatacagcgcgagcgaatcgaactggggcgttgtatcggcgaggggcaatttggtgacgttcatcagggaatctatatgagtccagaaaatcccgctctggctgtggcgattaagacttgtaagaactgcacgagtgacagcgtcagggagaagtttctgcaagaggcgtgccattacacctcactgcactggaattggtgtcggtatatttcagacccaaatgtggattgtcctgatccccggaatgccgaagtcaccatgagacagtttgatcaccctcatattgtaaaactgattggagtcattacggagaatcccgtgtggataataatggagctctgtactctcggggagcttagatcgtttttacaggtgagaaaatattctctggacctcgcctctttaatcctttacgcctaccagctcagcactgctttggcttacctggagtcgaaaagattcgtgcaccgggatatcgctgctcgcaatgtgctggtgtctagtaatgactgcgtaaaactcggtgattttggcctatccagatacatggaagatagtacatactataaggcctctaaagggaagctgcccatcaagtggatggcccccgagagtatcaactttcggaggttcacctccgcctccgacgtttggatgttcggcgtttgtatgtgggagattctgatgcatggagtaaaaccatttcagggggtgaaaaataacgacgtcatcggtcggattgagaacggggagaggctgcccatgccaccaaactgccctcccacgctgtactctctcatgacaaagtgctgggcttatgacccaagtcgccgccctcggtttaccgaactcaaggctcaactgtccttccagaatcccgcccagatgcttcccgcatccggccggctgccaaatcagccctgccccgaacgcgaaaactactcttttgcaacattctag

SEQ ID NO: 25898 - DNA, 2931 bp, synthetic construct
  misc_feature 1..2931: note = Description of Artificial Sequence: Synthetic coding sequence
  source 1..2931: mol_type = other DNA
cggagcttcatcatcctgaaggccatcgtgagccagccccccggccctgtgctcagcggtatggagatgctgctaatgtcaggttacgagctccgcatccggtatctaccgaaaggtttcttgaaccaatttacagaagacaaacctacacttaacttcttctaccagcaggtcaaatctgattacatgttagagattgccgatcaggtggaccaggagatcgcactgaaactcgggtgtcttgagatcagacgttcttattgggaaatgcgaggcaatgccctggaaaaaaagagcaattatgaggtgctggagaaggatgttggactgaaaagattctttcccaagtcactgctggattccgtgaaggcaaaaacactgcggaaacttatccaacagacatttaggcaattcgcaaacttaaatcgcgaagagtcgatcctaaagttctttgagattctgtcgccagtgtaccgtttcgacaaggagtgctttaagtgtgctctgggatcctcctggattatcagcgtggaactggcaatagggcctgaggaaggcatttcatacctcacggacaaggggtgcaaccctacccacctggctgattttactcaggtccagaccattcagtacagtaactcagaagataaagatagaaagggcatgctccagctgaagattgccggagcccccgagcctctgacagtgacggctcccagcttgaccatagcagagaatatggccgatttgatcgacgggtattgccgcctcgttaacgggacttcccagagtttcatcatcaggccacagaaggagggcgaaagagctctgcctagcattcctaagttagcaaacagcgagaagcagggtatgaggacccatgctgtgagcgtgagtgacgagatacccggcgcagagacggatgattatgcagaaattattgatgaagaggacacttataccatgccttcaattaaaagctattgcatcgatgtcgctcgagattacgagattcagcgggagcgcattgaactcgggcgctgcatcggagaggggcaattcggcgacgtgcaccaaggcatatacatgtctcctgagaaccccgccctggccgtggcaatcaaaacctgcaagaattgtacgtcagatagtgtgagagaaaagtttttgcaagaggccttgacaatgaggcagttcgaccacccacacatcgtcaaacttattggtgtgataaccgagaaccccgtgtggatcattatggaattgtgcacgttaggcgagctgaggagctttttacaggtcaggaagtactctttggacctcgccagcctcattttatacgcctaccagcttagtactgcgttggcgtacctggagagtaagaggttcgtacaccgcgacattgccgcgcgtaacgtattggtgtcctccaacgactgcgtgaagctgggagattttggcctcagccggtatatggaggactccacttattacaaggctagcaaaggaaaactacccatcaaatggatggctcctgagagcatcaatttcagaagatttacctccgcatccgatgtgtggatgtttggtgtgtgcatgtgggaaatcctcatgcacggtgtgaaaccatttcagggtgttaagaataacgacgtgatcggccgcattgagaacggcgagcgcctgccaatgccgcccaattgtccacctacactatattctctcatgaccaagtgttgggcctatgaccccagcagaaggcctcggttcactgagttaaaagctcagctgagcaccattctggaggaggagaaggcccagcaggaagagagaatgagaatggagagccgacgacaggcaaccgtgtcatgggactccggaggatctgatgaggcgcccccgaagccctccaggcccggatatcccagtcctcgatcgagtgagggcttctacccaagcccacagcatatggtacaaacaaatcactaccaggtgtccggttacccaggctcccatggcatcactgcgatggcagggtccatctaccccggccaggctagccttctcgaccagaccgacagttggaaccacaggccacaggagatagcaatgtggcagccaaatgttgaggacagtacggtactggatttgagaggcatcggccaggtgctgccaacccacctgatggaagaaaggttgataagacaacagcaagaaatggaagaagaccaacgatggctcgagaaagaggaacgcttcctcaaacccgacgtgcgcctcagccgaggaagcatcgatagggaagatggcagcctccaagggccaatagggaatcaacatatatatcaaccagtcgggaaaccagaccccgccgcccccccgaagaagccaccacggcccggtgccccaggacacttggggtcattggcttctcttagcagccccgccgactcctataacgaaggtgtcaaacctttacgactccagccacaagaaatttctcctccaccgaccgctaacctggatcggtccaacgacaaggtctatgagaatgtgacaggactcgtgaaggcagtgatagagatgtcgtcaaaaatccaacccgcccccccggaagaatacgtgcccatggtgaaggaagtcgggctcgctctgcggactctcttggctaccgttgacgagaccatacccttgcttcctgcctctacccaccgggagatcgagatggcacagaaactcctcaatagcgatctaggcgaacttattaataagatgaagctcgcccagcaatacgtcatgaccagcctgcaacaggagtataagaagcagatgcttacggctgctcacgcactcgccgtagatgccaagaacctgctcgacgtgattgaccaagccaggttgaagatgttgggacaaactagaccacactag

SEQ ID NO: 25899 - DNA, 3024 bp, synthetic construct
  misc_feature 1..3024: note = Description of Artificial Sequence: Synthetic coding sequence
  source 1..3024: mol_type = other DNA
aaggccgagtacgaccggtacctggccagcagcaagatcatggccgccgcatacctcgaccccaatctaaaccatactcctaaggagtggaagtacgaactgagaatccgatacctgcctaaaggatttctcaaccagtttacagaggataaaccgacactgaatttcttctatcagcaagtcaagagcgattatatgctggaaattgcggaccaggtggaccaggagatagcactgaagctcggttgtttagaaatccggaggtcctattgggagatgcgagggaatgctctggagaaaaaatcaaattatgaggtactagagaaggatgtggggttgaagcggttctttcctaaatctcttctggacagcgtgaaggctaaaactttaagaaaactcatccaacagacctttaggcaattcgccaacctaaatcgagaagagtccattctaaaatttttcgagatcctctccccggtctaccggtttgataaggagtgctttaagtgcgccttgggatcctcctggattattagcgtagaattagccattgggccggaagagggcatctcgtatctcaccgataaggggtgcaatcctacccatcttgccgactttacccaagtgcaaacaatccaatactcaaattcagaagacaaggaccgcaagggcatgctacagctgaagattgctggcgcacctgaacccctcaccgttacagcccccagcctgacgattgctgagaacatggctgacctcatcgacggatactgccggctggtaaatggcacttctcagtcatttataatccgacctcaaaaagaaggcgaaagagcactgccctctatccctaagctcgccaactcggagaaacagggcatgcgaacccacgcagtgtctgtgtccggtgtcagccactgccaacacaaagtcaagaaggcaagaaggttcctacccctcgtgttttgcagtcacgatccgccctccaccgacgagatttccggtgacgagaccgatgattatgccgagatcattgatgaggaggacacatacacaatgccatccattaaatcatactgcatcgatgttgctcgggactacgaaattcagagagagagaatcgagctcgggaggtgcataggcgagggccagtttggggacgtacatcagggtatttacatgtcacccgagaatcccgccttggccgtggccatcaagacatgcaaaaactgtaccagcgacagtgttcgggagaaattcctgcaggaggctcttactatgcgccaattcgaccacccccacatagtgaaattaataggggtcataaccgaaaaccccgtgtggatcataatggaattgtgcaccctcggagagctcaggtccttcttacaggttaggaaatactctttagacctcgcctccttgatcctgtatgcataccagttgtccaccgcgctcgcctacttggaatccaagcgattcgtgcaccgcgatattgcggcaagaaacgtactggtgtcatccaacgattgtgtgaagctcggggactttggcttgtcaaggtacatggaggattcaacgtattacaaggctagcaaagggaaactgccgattaagtggatggcgcctgaatctattaactttcgacgattcacatccgccagcgacgtgtggatgtttggagtgtgtatgtgggagatactgatgcatggcgtgaagccattccagggcgtgaagaataatgatgtcattgggcggatcgagaacggcgagcgtctaccaatgccgccaaattgccctcctacgctgtattccctgatgaccaaatgttgggcgtacgatccttctagaagaccaagattcaccgagctgaaggcccagttgagtaccatactggaggaggaaaaagctcagcaggaagagcggatgcggatggagtctcggcggcaggccaccgtgtcctgggactcaggagggagcgatgaggcccctccaaagccctctaggccggggtatccatcccctcggtcttcagaggggttctacccaagcccgcagcatatggtgcaaaccaatcattaccaagtctcagggtaccccggctcccatggcattaccgcaatggccggatcaatttacccaggccaggctagtctcctggatcagactgactcttggaatcacagaccccaggagatcgcaatgtggcaacctaatgtagaagattctactgtccttgatctccggggaatcggacaagttctgcctacccatctgatggaggagcgcttgattcgccagcagcaggaaatggaggaggatcagcggtggctcgagaaggaagagaggtttctgaaacctgacgttaggctaagcaggggctccattgacagggaagacggcagccttcaaggccctatcggcaatcagcatatttatcaaccagttgggaagcccgaccctgcagctcctccaaaaaaaccacctcgccccggggcgcccggtcacctgggaagcctggcatccttgtcatcccccgcggattcctacaacgagggtgttaagcccctgagactccagccgcaagagatcagtcctcctccaactgctaacctggacaggtctaacgataaagtctatgagaatgtgacaggattggtgaaagctgtcattgaaatgtcctctaagatccaacccgcccccccggaggagtatgtcccgatggtgaaggaagtgggcctagcactgaggaccctgctagcgaccgtggatgagacgatccctctgctccccgcatccacccaccgtgaaattgaaatggcccagaagctcctcaacagcgatctaggggagctcattaacaagatgaaactagcccagcagtacgtgatgacaagtctgcagcaggagtacaaaaaacagatgctaactgctgcccatgccttagccgtggacgctaagaacctcttggacgtgatcgaccaggccaggttaaaaatgctgggccagactagaccacactag

SEQ ID NO: 25900 - DNA, 3198 bp, synthetic construct
  misc_feature 1..3198: note = Description of Artificial Sequence: Synthetic coding sequence
  source 1..3198: mol_type = other DNA
atggccgccgcctacctggaccccaacctgaaccacacccccaactcctctacgaaaacccacctcgggactggcatggaacggagcccaggggcaatggaacgggtgcttaaggtattccactatttcgagagcaattccgaacccaccacatgggcttccattatcagacatggcgacgctaccgatgtgcgtggcatcatccagaaaatcgtggactcacacaaagttaagcatgtggcctgttacgggttcagactctcccacttgagatccgaggaggttcattggctgcatgttgatatgggggtctccagcgtccgtgaaaagtacgaactggcacacccgcccgaggagtggaagtacgagctacgaatacggtatctgcctaagggattcttaaatcaatttaccgaggataagccaacgctgaatttcttttatcagcaggtcaaatcagattacatgctggaaatcgcagatcaggtcgatcaggagattgccctgaaactgggatgtttggagatccgtaggtcttattgggagatgcgcggcaacgctcttgaaaagaagtcaaattatgaagtgttagagaaagatgtggggctgaaaagattcttccctaagtctctgctcgatagcgtgaaagccaagaccctgaggaagctgatccagcagacctttcgccagtttgcaaatctaaatcgggaagagagcatcctgaagttcttcgaaatcttatcacccgtttaccgattcgacaaggagtgctttaaatgtgccctgggatccagctggatcatcagcgtggagttggcaatcggaccggaggagggtatttcatacctcacagataaaggctgcaatcccacacatctggccgatttcactcaggtgcagaccatacaatattcaaactccgaagacaaagacagaaaaggaatgttgcagctgaagattgcaggtgcccctgagcctctgaccgttacagctccaagcctgacgatcgcggaaaatatggctgatttaattgacggttattgccgtcttgtgaacggtacgagccaatcctttattattcggccacagaaagaaggcgagagggctctgccttctataccaaaacttgcgaactctgagaaacagggaatgcggacacacgcggtgtctgtctctgagactgacgactatgctgagattatagacgaggaagatacctacaccatgccctctactagggactacgagatacaaagagaaagaattgagctgggacggtgtataggagaaggtcagttcggcgatgtgcaccagggcatatacatgtcacctgaaaatcctgccctcgccgtcgccatcaagacttgcaaaaactgcacctctgattcagtgagagaaaaatttctgcaggaagccctcacgatgagacagttcgaccacccccacatagtgaaacttatcggcgtcattacagaaaatcccgtgtggatcatcatggagctgtgtaccctgggcgaactccgctctttcctgcaggttagaaaatactctctagacctggcgtccctgattctgtacgcctaccaactcagcaccgccttagcttatctcgagtccaaaaggttcgttcatcgcgacattgcagctcgcaacgtcctagttagttccaatgattgtgtgaagctgggcgacttcggtctttcacgttacatggaggactccacgtactataaagcatcaaagggcaaactgccaattaaatggatggctcccgaatcaattaacttcaggcgattcacaagcgcgtccgacgtttggatgtttggggtgtgtatgtgggaaatcttaatgcacggtgtaaaacccttccagggtgtgaaaaacaatgacgtgatcgggcggatcgagaacggtgaaaggctccccatgccaccaaactgtcctcccacactgtactcattgatgactaagtgctgggcttatgacccatcaaggagaccacggtttactgagttgaaggctcaattatccaccatactggaagaggaaaaagcacaacaggaggaaaggatgcgaatggaatcccgccggcaagccacagtgtcctgggattccggtggatctgacgaggccccaccaaaaccctctcgccccgggtatcctagcccgagaagcagtgaaggcttttacccttcgcctcagcacatggtgcaaaccaaccactaccaggtgtctggctatccaggtagccacgggattacagctatggccggtagcatttatcctgggcaagcctcattactggaccaaaccgactcatggaaccaccggccacaagaaatagccatgtggcagccgaacgtcgaagatagcacagtgttggacctccgaggcatcggtcaggtgcttccaactcacctgatggaggagagactcattcggcagcaacaggagatggaagaggatcagagatggctagaaaaggaggaacgcttcctcaaacccgatgtccgcttgtctagagggagtatcgatagggaggacggcagcctgcaggggcccatcgggaaccagcacatctatcagcccgtagggaagccaggcaaggaggagaagaattgggcagagcggaacccagcagcaccccccaaaaagccaccccggcctggcgcccccggtcacctggggtctctagccagcctcagctcccccgcagactcctacaacgaaggtgtcaagcctaaccaactccagccccaggagatttccccacctcccaccgcgaacctggaccgcagcaacgataaagtctacgagaacgtcaccggactggtgaaagctgtgattgagatgagctccaaaattcagcccgccccccccgaggaatatgtaccaatggttaaagaagtcgggctcgctctgcggactctactggcaactgtggatgaaaccattccattgttacccgcgtccacacaccgggagatcgaaatggcacagaagctcttgaactccgatctcggcgagcttatcaataagatgaagctggcccagcagtacgtgatgacatcattgcagcaggaatataaaaagcagatgctaaccgcagcacatgcacttgcagttgatgctaagaatctactggatgtaatcgatcaggcccgtctgaaaatgcttggacagacacggccgcattag

SEQ ID NO: 25901 - DNA, 2253 bp, synthetic construct
  misc_feature 1..2253: note = Description of Artificial Sequence: Synthetic coding sequence
  source 1..2253: mol_type = other DNA
atggccgacctgatcgacggctactgccggctggtgaacggcaccagccaaagctttattattaggccgcagaaggagggagaaagggccctaccatctattcctaagctggccaatagcgaaaaacaggggatgcgcacccatgccgtttccgtaagcggtgtgagccattgccaacacaaagtgaaaaaggctcgcagatttctgccccttgtcttctgctcgcatgatccccccagtactgatgaaatttcaggagatgaaactgacgactacgccgagatcatagatgaagaagatacatacactatgcccagcacgcgcgactacgagattcaacgagaaagaatagagcttgggcgctgcatcggcgagggccagttcggggacgttcaccaagggatttatatgtccccagagaatcccgccttggcggtcgccattaagacttgtaagaactgcacctctgattctgttcgggaaaagtttctgcaggaggccctcactatgcgccagtttgatcacccacatatcgtaaagctcatcggtgtgatcacagagaaccctgtgtggatcataatggagctgtgtaccctgggtgagctgcggtccttcttgcaagtgaggaaatatagcttggacctagcgtccttgattctctacgcatatcagctgtccaccgccctggcctatctggaatctaagaggtttgtgcaccgggacattgcagcccgtaatgtccttgtgtcctcaaacgattgtgtgaaactgggtgacttcggtctctcccgatatatggaggactcaacttactataaagcgagcaagggaaaattgcccattaaatggatggcgcccgaatctataaactttagacgattcacctccgcctcagatgtgtggatgtttggcgtgtgtatgtgggagatactcatgcacggagtaaagccctttcagggtgtgaagaataatgacgttatcgggcgcatcgagaacggcgaacgactccctatgccccccaattgtccccctaccttgtactcactcatgacaaagtgttgggcctatgacccctcccgaaggcctcggtttacagaactgaaagcacaactgagcaccattctcgaagaggagaaggcccagcaagaagaaaggatgcgcatggagtccagacgtcaggccacagttagttgggatagcggcggcagtgacgaagcaccacctaagccaagccgtcctggctatccttctccccggtcaagcgagggattctacccatcgcctcagcacatggttcagacaaaccattatcaggtatctgggtatcccggcagccacggaataacggctatggcaggaagcatctatccagggcaggcaagcttactggaccaaacggacagctggaatcatcggccacaggaaatagccatgtggcagcccaacgtggaggactcaacagtgttggacctgcgcgggatcgggcaagtgctgccgactcatctaatggaagagcgtctgattcgccagcagcaggagatggaggaggatcaacggtggctggagaaagaggagagatttctcaaacctgatgtaagactgagcagaggctctattgatcgggaggatggctcgctccaagggcccatcggtaaccagcacatataccagccagtgggaaagcccgatccggcagccccacccaagaaacctccaaggcccggcgcccccggacatctgggttccctggcctccctgagcagccccgcggactcttacaacgagggcgtgaagccttgccggctgcagccccaggaaatcagccccccacccacagctaacctggatcgctctaatgataaagtgtacgagaatgtgaccggcctggtcaaagctgtgatcgagatgagttcaaaaatccaaccagcccctcccgaagagtatgtcccaatggtgaaggaagttggtcttgccctgagaacattacttgctacggtggatgaaaccatccctttgttgcctgcctccactcaccgcgagatcgaaatggctcagaaactattaaactctgacctgggtgagcttattaacaagatgaagttggcccagcaatatgtcatgacctcactgcagcaggaatacaagaaacagatgttaactgcggcccacgctctggctgtggacgccaagaacctgctggatgtgatcgaccaggctaggctgaagatgttaggacagacacggccacactag

SEQ ID NO: 25902 - DNA, 1089 bp, synthetic construct
  misc_feature 1..1089: note = Description of Artificial Sequence: Synthetic coding sequence
  source 1..1089: mol_type = other DNA
atgcggatggagagccggcggcaggccaccgtgagctgggacagcggtggcagcgacgaagcgccaccaaaaccgagccgcccaggctaccctagtccccgttcatccgaaggtttctatcctagtccacagcatatggtgcagactaatcactatcaggtcagcggatacccaggaagccacggcattacagccatggctggatctatctaccccggacaagcaagcctactagatcagactgattcttggaatcacaggccccaggaaattgctatgtggcagccaaacgtggaggacagtaccgtgcttgaccttcgcggcattgggcaggtgctaccaacacatttaatggaagaaaggcttatacggcagcagcaagaaatggaagaagaccagcggtggctggagaaagaagaacgattccttaaaccagatgtgcggttatcacggggcagcatcgatcgtgaagatggcagccttcagggccctattggcaatcagcacatctaccagcctgtgggcaagcccgacccagctgccccaccaaaaaaaccgcctcggccaggcgcgcctgggcatttgggatctcttgcatccctgagtagccctgccgactcatataacgaaggcgtgaaattgcaaccgcaggaaataagtcctcccccgaccgccaatctcgatcgcagcaacgataaggtgtacgagaacgtaaccggactagttaaggccgtgattgagatgtcttctaaaattcagcccgctcccccagaagagtacgtgccaatggttaaggaagttgggctggcattgaggaccctgcttgcaactgtcgatgagactatcccgctgctgccggcatcaacccacagagagattgaaatggcccagaagctgctgaatagtgatctaggcgagttgattaataagatgaagttggcccagcagtacgtcatgacgagccttcaacaggagtataaaaaacagatgctgacggctgcccatgcgctggccgtagatgctaaaaacctgctggacgtaatagaccaggcccgcctgaaaatgcttggacagacaaggccccattag

SEQ ID NO: 25903 - DNA, 354 bp, synthetic construct
  misc_feature 1..354: note = Description of Artificial Sequence: Synthetic coding sequence
  source 1..354: mol_type = other DNA
atggccgccgcctacctggaccccaacctgaaccacacccccaacagctccactaagacacacctgggaacgggcatggaaagaagccccggagccatggaaagggtgttgaaagttttccattactttgagtcgaacagcgagcctacaacctgggccagcatcatccggcacggagatgcgaccgatgtgaggggcatcattcagaagattgtcgactcacacaaagtcaagcacgtggcgtgctatggtttccgactctctcatctgagatcagaggaggtccattggctgcacgttgatatgggggttagttcagtgcgcgagaaatacgagcttgctcacccaccttag

SEQ ID NO: 25904 - DNA, 3291 bp, synthetic construct
  misc_feature 1..3291: note = Description of Artificial Sequence: Synthetic coding sequence
  source 1..3291: mol_type = other DNA
atgctgctggagctggccggccaggaggccctgaagcccgccggcgctatctacatggaaaaaagcggttgctcaccgtttcctgtctgttgggccaaagaatacgataggtacctggcgtccagcaagatcatggccgcagcctacctggatcctaacttgaaccacacgccaaatagctctacaaagacacacctgggtactggcatggagagaagccctggcgcaatggagagagtgctaaaggtatttcactatttcgaatccaactccgagcccactacatgggcctcaattatcaggcacggcgacgcaaccgacgtgagagggatcatccagaagattgtggacagccacaaggttaagcatgtggcttgctatggctttaggctctcgcacttacgatccgaggaagtgcattggctgcacgtggacatgggtgtatcctcagtgcgtgagaagtacgaactcgcccatccccctgaggagtggaagtacgaactgagaattagatatttgcctaaggggttcttgaaccagtttaccgaggacaaacccacactcaacttcttttatcaacaggttaagtctgactacatgctggaaatcgccgaccaagtcgaccaggagatcgccctgaaactgggatgcttggagatcaggcggtcatattgggaaatgcggggcaatgctctcgagaagaagagcaattacgaggttctggagaaagacgttggattgaagcgattttttccgaaatccctgctcgacagcgtcaaagctaagactctccgcaaactgatccaacagacattcagacagtttgccaatctgaatcgggaggagtctatactgaaattttttgagatcctgtctccggtctaccgcttcgataaagaatgctttaaatgtgcccttggctcctcatggataatctctgtcgaattggccattgggccagaagaaggaattagctatcttacagataagggctgtaatcccacacatctcgcagatttcacacaggtgcagaccattcaatactcgaactctgaagataaggacaggaaaggcatgttgcagcttaagattgcgggggcaccagagcccctgaccgtgaccgcgccatccctgactatcgccgagaatatggctgacctaatcgacggctattgcaggctggtaaatggcacctcacagtctttcatcatccgaccgcaaaaggaaggcgagagggccctccctagcatccccaagctcgcaaacagcgaaaaacaaggcatgcggacccacgccgtgtcagtttctgagactgatgattacgccgagatcatcgatgaggaagatacatacaccatgccctccacgagggattacgaaattcagagggagagaattgagttgggacggtgtatcggcgagggacagttcggggacgttcaccaaggcatctacatgtctcccgagaacccagccctagctgttgccataaagacctgcaagaattgtaccagcgattcggtcagggagaagtttttgcaggaggccctgaccatgagacagtttgatcacccacacatcgtaaagctaatcggggtgatcactgagaatccggtctggatcatcatggagctctgcactttaggggaactgagatcgttcctccaggtcagaaagtactccttagacctcgcctccttaatcctatacgcataccagctctctacagcactggcgtacctggaaagcaagagattcgtgcacagggacatcgctgcaaggaatgtccttgtttccagcaatgattgcgtaaagttgggcgattttggattgtctagatacatggaggactctacctattataaagccagcaagggcaagctccccattaaatggatggccccggaaagtatcaattttcggcggttcacaagcgcctcagatgtgtggatgtttggggtctgtatgtgggaaatactaatgcacggggttaaaccattccagggagtgaaaaataacgatgtgatagggagaatcgagaacggtgaaagattgcctatgcccccaaactgtcccccgacactttactccctgatgacaaaatgttgggcctacgacccttcccggcgtccccggttcaccgagttaaaagctcagctttcaacgatcttggaggaggaaaaggcccagcaggaggagcgcatgaggatggaatcaaggcggcaagctacagttagttgggattctggaggatctgatgaggccccacccaagccttctcggcctggctacccttcacctcggtctagtgagggcttttatccatcaccgcagcacatggtgcagactaaccattatcaggtgtcaggctaccccggaagccatggcattaccgctatggccggtagtatctatccaggccaggcatcactgcttgaccaaactgatagttggaatcatagacctcaggagatcgcaatgtggcagcccaatgtggaagactctaccgttctggacctgcgcggcattgggcaggtcctgcctacacatcttatggaagagagactcatccgccagcagcaggaaatggaggaagaccagcgctggttggagaaggaagagcgatttctcaagcctgatgtacgactcagcagagggtccatcgacagggaagacggcagtttgcagggtcccatcggcaatcagcacatttatcaacctgtcggcaaacccgacccagcagcaccaccaaaaaagccacccaggccgggtgcacccggacatctggggagcctggcatcactttcatccccagccgatagctataatgagggcgtgaaactgcagcctcaggagatctcccctccccctactgccaaccttgatcgctctaatgacaaagtgtacgaaaacgttacagggttggtcaaggccgtcatcgaaatgtcctccaaaatacaaccagctccgccggaggagtacgtccctatggtcaaagaagtggggctggcccttcgaactctcctggccactgtcgacgagaccatcccgctgttacctgccagtacccacagagaaatcgagatggcgcagaagttactcaacagcgatctgggagaacttatcaataagatgaagctggcgcaacaatacgttatgaccagcctgcagcaagaatacaagaagcagatgctgactgctgcgcacgctctggccgttgacgccaagaaccttctggatgtcatcgaccaagcccgcctgaaaatgttaggtcaaacccgcccccattag

SEQ ID NO: 25905 - DNA, 3291 bp, synthetic construct
  misc_feature 1..3291: note = Description of Artificial Sequence: Synthetic coding sequence
  source 1..3291: mol_type = other DNA
atgctgctggagctggccggccaggaggccctgaagcccgccggcgctatttatatggagaaatccggatgctctcctttccccgtctgctgggctaaggaatacgataggtaccttgcgtctagtaagataatggccgcagcatacctggacccgaacctcaatcacaccccaaactcctcaactaagactcatctgggcactggtatggagcggagtcccggcgctatggaaagggtgctcaaggtgttccactatttcgaaagtaatagtgagcctacaacctgggcgtctataatacgtcacggagacgccacagacgttagaggcatcatccagaaaattgtggatagtcacaaggtaaaacacgtcgcctgctacggatttcggctaagccacctaaggagcgaggaggtgcactggcttcatgtggacatgggcgtgagttccgtgagggaaaagtatgagcttgctcaccccccggaggaatggaaatatgagttgaggatcaggtatcttcctaaggggttcctgaatcaattcactgaagacaagccaacactgaacttcttctaccagcaggtgaagtcggattacatgctggaaatagcagatcaggtggaccaggaaattgcactgaagctgggatgtctcgagattcggagaagttactgggagatgaggggcaatgctctggaaaagaagtccaattatgaggtcctggagaaggatgtgggtttgaaacgattcttcccaaaaagcctgttggatagcgtcaaagctaagacgctgcggaaattgatccagcaaactttcaggcagtttgctaacctcaaccgggaggagagtatcttaaaatttttcgagatcctgtcgccagtctaccgttttgataaggagtgctttaagtgtgcactgggatcctcctggattatcagtgttgagctggcaatcggccccgaagagggcatatcatacctcacagacaagggatgtaaccccacccatctggccgacttcacacaagtgcagaccatacagtattcgaattccgaggataaagaccgaaagggaatgctgcagttgaagatcgccggcgctccggagccattgactgtgacggcaccgagcctgaccattgccgaaaacatggctgaccttattgatgggtattgtagactagtcaacgggacttctcagtcctttatcattagaccgcagaaagagggcgaaagagccctgcccagcattcctaagctcgctaattccgaaaaacaggggatgcgcacccatgctgtgtcagtttcagagaccgacgattacgccgagatcattgatgaggaggacacatacaccatgccgagcacacgagattatgagatacagcgcgaacgaattgagctcggcaggtgcatcggagaaggacagtttggtgacgtgcaccagggtatctacatgtctccagagaaccccgccctcgcagtcgcaataaagacgtgtaagaactgcacgagtgactccgtccgtgagaagtttcttcaagaagccttgacaatgcggcagtttgaccatccgcacatagtaaaacttatcggcgtaatcacagagaatccggtctggatcatcatggaactctgtacccttggcgagctgcggagtttcctgcaggtgcgcaaatactccctggatctcgcctcattaatactttatgcctaccaactgagtaccgccctcgcatatctcgagagtaaacggttcgttcatagagatattgctgctaggaacgtcctggtgagcagcaacgactgtgtgaagctgggcgatttcggactgtctaggtatatggaagattctacgtactataaagcttccaaaggtaagttgccaatcaaatggatggccccagagtcaatcaatttccggcggtttacaagcgctagcgacgtctggatgttcggcgtgtgcatgtgggaaatcctgatgcacggcgtaaagcctttccagggtgtgaagaacaacgacgtaattggcaggatagagaacggagaaagattgcccatgccccccaactgtccacccaccttatactccctcatgactaagtgctgggcctatgatccctccagacggcctaggtttacagaattaaaagcacagctgagtacaatcctggaggaagaaaaggcacaacaggaagaacggatgcgcatggagtctagacgccaggcaaccgtgtcctgggactccggagggtccgacgaggcacctccgaaaccttccaggcctggctatccatcccctcggtcatccgaggggttctacccttccccccagcatatggtccagactaatcattaccaggtgtctggatatccgggttcccatggaatcacagcgatggctggttctatctatcccggtcaggcttcactactcgaccagaccgattcttggaaccacagacctcaggagattgccatgtggcaaccgaatgtggaagatagtactgtcctcgatctccgaggcatcgggcaggtcttgccaactcatctcatggaggaaaggttgatccggcagcagcaggaaatggaagaggaccaaagatggctggagaaggaagagcggtttctgaaaccagacgttcgcctgagcagaggatcaattgaccgcgaggacgggtcactgcagggtcccatcgggaatcagcacatttatcaacccgtgggtaaaccagacccggcagctcctcccaaaaaacctccccgtcctggcgctccaggacacctgggtagtctggcaagcttgtcctccccagccgactcctataacgaaggggtcaagctgcagccccaggaaatttccccacccccaactgccaatctagacaggtcaaatgacaaggtttatgagaatgttacaggactggtcaaggctgtcatcgagatgtcatctaaaatacagcccgcaccgccggaggaatatgtacctatggttaaagaggttggactggcgttacgaacacttctcgcaacagtggatgagactattccattattgcctgctagcacacatcgcgagatcgaaatggcgcagaagctattgaactcagacctaggggagttgattaacaagatgaaacttgcacaacaatacgtgatgacctcccttcagcaggagtacaagaagcagatgttaacggctgcgcacgctttggccgtggacgccaagaacctcttggacgtgatcgaccaggccaggctgaaaatgctgggacagactcgcccacattag

SEQ ID NO: 25906 - DNA, 2043 bp, synthetic construct
  misc_feature 1..2043: note = Description of Artificial Sequence: Synthetic coding sequence
  source 1..2043: mol_type = other DNA
atgaagtaccaggaggtgcggtgcctgaccagcttcaacatcagcgtctcatttccagcggagaccgacgattatgctgaaattattgacgaggaggatacctatacgatgcctagtacacgtgactatgagattcagcgagagaggatcgagctcggtcgatgcataggcgaaggacagttcggtgacgtgcaccaggggatctatatgagtcctgagaatccggcgctggctgtcgccatcaagacatgtaaaaactgcacaagcgattcagtgagagaaaagtttctgcaggaggctcttacaatgcggcaatttgaccacccacacatagtcaagctgataggggtgatcacagagaatcccgtatggataattatggagctgtgtactcttggcgaattgcgctcatttctccaagttcgcaaatacagcctggacctcgcctccctcattttatatgcctaccagctgagtacagcactggcttacctcgagtccaaacgctttgtccacagggatattgctgcgcggaacgtactcgtatcctcaaatgactgcgttaaactgggagattttggtctgagtcgctacatggaagacagcacctattacaaagcctcaaagggaaaattgcccattaagtggatggctcctgagagtattaattttcgtagatttacttctgcatcagacgtgtggatgtttggcgtttgcatgtgggaaatactcatgcacggcgtcaaaccattccagggagtcaagaacaatgacgtgattggccgcattgaaaacggcgaaagacttccaatgccccccaactgtccccctacattgtactccttgatgaccaaatgttgggcctatgacccttcccgacgcccaagattcacagaattaaaggctcagctttccacaattctggaggaagagaaggcccagcaggaagaaaggatgcgcatggagtcccgcagacaggccaccgtgagttgggactctggcgggtctgatgaggctcccccaaaaccctcccgcccagggtatccttctcccagaagctctgagggcttttatccgtcccctcagcacatggtgcagacaaatcactaccaggtgtccggttatcctggaagtcatggtataacagcaatggccggttcaatttatcccggacaggcctcgttgctagaccagaccgatagctggaatcacaggcctcaagagatcgcaatgtggcagcctaatgtggaggattcaacagtgttagacctcaggggcattggccaggtccttcccacacacctgatggaggagcggttgatacggcagcagcaggaaatggaagaggatcagcgctggttggaaaaggaggagagatttcttaagcctgacgtgagactgtcacgaggatccatcgacagagaggatggaagcctgcaggggcccatcggtaaccagcacatttatcagcccgtgggaaaaccagaccccgccgcccccccgaagaagcctccaagacctggtgctcccgggcaccttgggtcactggcctccttgagcagtccagcggatagctataatgagggtgtgaagctgcaacctcaggagatttccccgcccccgacggccaacctcgatcgctccaatgacaaggtgtacgaaaatgtcacgggacttgtcaaagccgtcattgagatgagttctaaaatccaaccagcgcctcctgaggagtatgtgcccatggttaaggaggtgggcctggccctgaggacattacttgctactgttgacgagacaataccgttattgccagcctccacccaccgggagattgaaatggcccagaaacttctaaactcagatctgggcgagctgattaataaaatgaagcttgcacagcaatacgtgatgacatctctgcagcaagagtataaaaagcaaatgcttacagcagctcatgccttggccgtggatgctaaaaaccttctcgatgtcatcgaccaggccaggctgaagatgctcggccagacacgcccacattag

SEQ ID NO: 25907 - DNA, 3054 bp, synthetic construct
  misc_feature 1..3054: note = Description of Artificial Sequence: Synthetic coding sequence
  source 1..3054: mol_type = other DNA
tgatacgaccggtacctggccagcagcaagatcatggccgccgcctatctggatcccaatttaaaccatactcctaactcttcaactaagacgcatttggggacgggcatggagaggtcaccgggggctatggaacgggtgttgaaggtattccattactttgagtctaattccgagcctaccacatgggcctctatcatccgccacggtgatgctacggacgtgcgagggataatccagaaaatcgtagactcacataaggtaaagcacgtagcttgttacggcttccgtctctcccatctgcggagcgaagaagtgcactggctccacgtcgatatgggagtcagttctgtaagggaaaagtacgaactggctcacccccctgaagagtggaaatacgagctccgaattagatatctacctaaggggtttctcaaccagtttactgaggacaagcccacacttaacttcttttatcagcaggtgaaaagcgactacatgcttgaaatcgccgaccaggtggatcaggagatcgctctcaaactcggctgtcttgaaatacgccgctcctattgggaaatgcgaggtaatgccctcgagaaaaagtccaattacgaagttctggagaaagacgtagggctcaagagattctttcctaaatctctgctggattctgtcaaggcaaagaccttgcgtaagctcatccagcagactttccggcagtttgccaatctcaacagagaggagtccatccttaaattcttcgaaatcctgagcccagtgtaccgtttcgacaaagaatgttttaagtgtgcccttgggagtagctggatcatctcagtggaattagctattggtccagaagaggggatttcctatctgaccgacaaaggctgcaacccgacccacctcgccgattttactcaagtgcaaactatacagtattccaatagtgaagacaaggaccggaagggaatgcttcaattaaaaatcgcaggggcacccgaaccactgacagttaccgccccttccctaacaatcgcagagaacatggcagatctcatagacggatactgtaggcttgtgaatggaacaagccaaagcttcatcatacggccccagaaggaaggtgaacgggccttgccaagcatacccaaattggctaacagcgaaaagcaggggatgcgaactcacgctgttagcgttagtgaaacagacgactatgccgagatcatcgacgaagaggacacttataccatgccaagcactagggactacgagatccagcgtgaacgcatcgaattgggccgttgtatcggtgaaggacaatttggggatgtgcaccagggaatctatatgagtcctgagaaccctgccttggccgtcgccatcaaaacttgtaagaattgtaccagcgattccgtccgcgagaaatttctacaggaggcactcacaatgaggcaatttgatcacccacacattgtgaagcttatcggcgtaataactgagaaccctgtttggattattatggagctttgtaccctaggcgagctacgcagtttccttcaagtccgaaagtattcacttgacctggccagtctgatcctttacgcttaccaactgtcaactgctctagcttacctggagagcaaaagattcgtgcacagggacattgcagcgcgtaatgtgttagtgtcttctaatgattgtgtcaagctgggcgattttgggttgtctcgatacatggaggattcaacttactacaaagcctctaaaggcaagctgcccatcaagtggatggcccctgagtcaataaacttcaggagattcactagtgcatccgatgtgtggatgttcggggtatgtatgtgggagattctgatgcacggagttaaaccattccagggagttaagaacaacgatgttatcggtcgcatcgaaaacggggagcggcttccaatgccccctaactgtccccctactctgtattctcttatgacaaagtgttgggcctatgacccaagtcgccgacccaggtttactgagctgaaggcccagctgagcactatcttagaagaagaaaaggcccagcaggaagagaggatgagaatggaaagtcgtagacaggccactgtcagctgggattctggcgggtcagatgaggccccccccaaacctagccgacccgggtatccaagtccacgctcctcggagggcttttaccctagcccacagcacatggtccagacaaatcactaccaagacagcaccgttctagacctgcgcggaataggccaagtgctgcctactcacctcatggaggagcgcctgatacgccagcaacaggagatggaggaagaccaacgctggcttgaaaaagaggagagattcctgaagcctgacgttcgtctatcccggggatctatcgaccgggaagacggctccctccagggcccgattgggaaccaacatatttaccagcccgtcgggaagcccgatccggctgcaccacccaagaagccccccagaccaggagctcctggacacctggggtcactggcatccctgagttcacctgctgactcttacaatgagggtgtgaagcttcaaccgcaagaaatatcacctccacctacagccaatcttgatcgcagcaacgataaggtctacgagaatgtgacaggcctggttaaggccgtcatcgagatgagcagtaagatccagcctgctcctccagaggaatatgtacccatggtcaaagaagttgggctagcattgagaaccttgctcgccacagtggacgagaccatccccttgctgcccgcttcaacccatagagagattgaaatggcccagaagttactcaacagtgacctgggcgaactcattaacaagatgaagttagctcagcaatatgttatgacctccctacagcaggagtacaaaaagcagatgcttacggcggcccacgcccttgcagtcgacgccaagaacctgttggatgtgattgatcaggctagactgaagatgctcgggcagactaggccgcactag

SEQ ID NO: 25908 - DNA, 354 bp, synthetic construct
  misc_feature 1..354: note = Description of Artificial Sequence: Synthetic coding sequence
  source 1..354: mol_type = other DNA
atggccgccgcctacctggaccccaacctgaaccacacccccaactcgagtaccaaaactcaccttggcactggcatggaaaggtcacccggtgcaatggaaagggttctgaaggtgtttcactactttgagagcaattcagaaccaacaacatgggccagcatcataagacacggcgacgcaaccgacgtgcgcggaattatccagaagatcgtagattcccacaaggttaagcatgtggcctgctacggattcaggctgtctcatttgaggagcgaggaagttcattggctgcacgtggatatgggagtgagttctgtacgcgaaaagtatgaattggcccaccctccttag

SEQ ID NO: 25909 - DNA, 471 bp, synthetic construct
  misc_feature 1..471: note = Description of Artificial Sequence: Synthetic coding sequence
  source 1..471: mol_type = other DNA
atggccgccgcctacctggaccccaacctgaaccacacccccaactccagcactaaaacccacctcgggaccgggatggaaagatcccccggcgctatggaacgggtgcttaaggtcttccactacttcgaatcgaactctgaaccaacaacctgggctagcatcattcgccacggggacgccaccgacgtaaggggaatcatacaaaagatagtggacagtcacaaggtcaagcacgtggcatgctacggatttagacttagccacttaaggagtgaggaagttcactggctccatgttgacatgggagtctccagcgtcagggaaaaatatgagctggcacaccctcctgaggagtggaagtacgagctgagaatacgctacttgcccaaaggttttcttaatcagttcaccgaagataaacccacactgaactttttttaccaacaagtcaagagcgactatatgtag

SEQ ID NO: 25910 - DNA, 3159 bp, synthetic construct
  misc_feature 1..3159: note = Description of Artificial Sequence: Synthetic coding sequence
  source 1..3159: mol_type = other DNA
atggccgccgcctacctggaccccaacctgaaccacacccccaactccagcacaaagacccatcttggcactggaatggaacggtctcctggggctatggaacgggtgctcaaggtgttccattacttcgagtcaaatagtgaaccaacaacatgggcttctataatcagacatggggacgctacggacgtacgggggatcatacaaaaaatcgttgatagccataaagtgaaacacgtggcgtgctatgggtttcgcttgagccacctccgctctgaagaagtgcattggctccatgtggatatgggcgtgagcagtgtgagggagaagtacgaactggcgcatcctccagaggaatggaagtacgagctccgcatccggtatctgcccaagggctttttgaaccagttcactgaagataagcccacactcaattttttttatcagcaagttaaatccgattatatgctggagattgcagatcaagtcgaccaggaaatcgctttgaagctgggatgtttggaaatccgtaggtcatactgggaaatgaggggtaatgccttagagaagaagagcaactatgaggtcctcgaaaaagacgtaggcctcaagaggttctttccaaagtcgctgttagattctgtgaaggccaagactctgaggaaattaatacaacagacatttcggcagtttgcaaacctcaatcgggaagagtccatattgaaattcttcgaaatcctgagccctgtctaccgctttgataaggaatgtttcaagtgtgcactcgggtctagttggatcattagcgttgagctggcaattggtcccgaggaagggattagttaccttacggacaagggttgtaacccgacacacttggctgatttcacccaggtccagactatacagtactcgaacagtgaagataaggataggaaagggatgttgcaactgaagatcgccggggctcctgaaccgctgacagtaacagccccttcactcaccattgccgagaacatggctgacctgatcgacggttattgccggctggttaacgggacttcccagagttttataataagaccgcagaaggaaggagaaagggctctgccgtccattcccaagttggccaacagtgagaaacagggcatgcgcacacatgccgttagtgtgtccgaaaccgacgactatgccgaaattattgatgaggaggatacctacaccatgccctccactcgggattatgagattcagagggagagaatcgaactgggcaggtgcattggggagggacagtttggagacgtgcatcaggggatctacatgtctccagagaaccccgcactcgcagtcgccattaaaacctgcaagaactgtacatctgactccgttagagaaaaatttcttcaggaggctctgactatgagacagtttgatcaccctcatatagtgaagctcatcggagtcatcacggaaaatcctgtgtggatcattatggagttatgtactctgggcgagctgaggtcttttctgcaggtacgcaaatacagtcttgacctggcctcactgatactctacgcttaccagcttagcacagcactggcctaccttgagtctaagagattcgttcaccgtgatattgctgcacggaacgtgctggtttcaagcaacgattgtgtaaaactgggcgattttggcctgtctcgttacatggaggatagcacttactacaaggcctccaaaggcaaacttcccatcaagtggatggcccctgaatctatcaattttagacggtttacctctgcaagcgacgtctggatgttcggcgtctgtatgtgggaaatcctgatgcacggcgttaaacccttccagggtgtgaagaataacgatgtgattgggcgcatcgaaaacggcgaaaggctccctatgccacccaactgcccacccaccctgtatagtctcatgaccaagtgttgggcttatgacccctccaggcgtcctcgttttaccgagctgaaggctcagctgtccaccattctggaggaggaaaaggcacagcaggaagagcgtatgcgcatggaatcccgtagacaggcaaccgtgtcctgggattcaggcgggtcggatgaagctccgccgaaacccagcagacctggctatccttcaccacgatcatccgaaggattctaccctagtccacagcacatggttcagacgaatcactaccaagtgagcggttaccccggttctcatggcatcacagccatggccggctcaatctaccccggtcaggcatccctgctggaccagacagattcatggaatcaccggccccaggagattgcgatgtggcagcccaacgtcgaagatagtacagtgcttgaccttcgcgggattgggcaggttctccctactcacctgatggaggaacgactcatcagacagcagcaggagatggaggaagatcaacgttggttagagaaggaggaacgatttctcaaacctgatgttcggctgtctcggggctctatcgacagggaagacgggtccttgcagggaccgatcggcaaccaacacatctaccaacctgttggaaaaccagatccggccgcccctccaaaaaaacctcctagaccaggggcccccgggcatttgggcagccttgcctcactgagtagcccggctgacagctacaacgaaggagtcaagctgcaaccacaggagatctcacctccccctactgccaacctggaccgaagtaatgacaaagtgtacgaaaacgtaactggtctggtgaaagctgtgatagagatgagcagcaaaatccagcccgcccctcccgaagagtacgtgcccatggtaaaagaagtagggctcgccctcaggaccctcctggcaaccgtggatgagacaatccctctcttgcctgcaagtacccaccgggagattgagatggcgcagaaattgcttaactccgaccttggggagttgatcaacaaaatgaagctggcgcaacagtatgtgatgacttcccttcagcaagaatataaaaagcagatgctgactgctgctcacgcactcgctgtcgacgctaaaaacctgcttgatgtgattgaccaggcgaggctcaaaatgctgggccaaacccgaccccactag

SEQ ID NO: 25911 - DNA, 198 bp, synthetic construct
  misc_feature 1..198: note = Description of Artificial Sequence: Synthetic coding sequence
  source 1..198: mol_type = other DNA
atggccgccgcctacctggaccccaacctgaaccacacccccaactcgtccaccaagacccacctaggaacaggtatggaacgtagcccaggagctatggagcgcgtcctaaaagtctttcattacttcgaaagcaacagcgagcctactacctgggcgtcaatcattcgccacggtgacgctacagatgttcggtag

SEQ ID NO: 25912 - DNA, 324 bp, synthetic construct
  misc_feature 1..324: note = Description of Artificial Sequence: Synthetic coding sequence
  source 1..324: mol_type = other DNA
atggccgccgcctacctggaccccaacctgaaccacacccccaactcctccactaaaacgcacctcggaaccggcatggaaagatctcccggtgcgatggaaagggtgctgaaggtgtttcactatttcgagtcaaactccgaaccaacaacatgggcatctattatacgccatggggacgcgaccgatgtgcggggtattatccagaaaattgtggacagccataaggtgaaacatgtggcttgctacggcttccgtctgtcccatctacgatctgaagaggtgcattggttacacgttgatatgggagtgtcgagcgtttag

SEQ ID NO: 25913 - DNA, 360 bp, synthetic construct
  misc_feature 1..360: note = Description of Artificial Sequence: Synthetic coding sequence
  source 1..360: mol_type = other DNA
atggccgccgcctacctggaccccaacctgaaccacacccccaactcttctaccaagactcatttaggaaccggcatggaacgatcccctggagcgatggagcgggtcctgaaggtgttccactactttgaaagtaactccgaacctaccacttgggcctccatcattcggcatggagatgccacggatgtcaggggaattatccagaaaatcgtagacagccacaaagtcaaacacgtggcctgctacggtttcaggttgagccacctgcgatccgaagaagtgcattggctccacgtggacatgggcgttagttctgtgagagaaaaatatgagctggctcatccccctgaggagtag

SEQ ID NO: 25914 - DNA, 2262 bp, synthetic construct
  misc_feature 1..2262: note = Description of Artificial Sequence: Synthetic coding sequence
  source 1..2262: mol_type = other DNA
gccgagaacatggccgacctgatcgacggctactgccggctggtgaacgggaccagtcaatcattcattattagaccacaaaaagagggcgaaagagctcttccctcaatacccaagttggctaattccgagaagcagggcatgcgcactcacgctgtctcggtatccggtgtatctcattgccaacataaggtcaagaaggcacgacggttcctgcctctggttttttgctcgcatgaccccccatctaccgacgagatttctggggacgaaaccgatgactacgcggaaatcattgatgaagaagatacatacaccatgccttctactcgcgattatgaaattcagcgggagaggatcgagctgggacgatgtatcggggagggacagtttggtgacgtccaccaggggatctacatgagcccagagaaccccgcattagccgtcgctattaagacctgcaaaaactgcacgtcagacagtgtaagagagaagtttctccaggaagcgctgactatgcgccagttcgatcatccacatattgtgaaactgatcggagttatcactgagaatccagtctggattattatggaactgtgcactctcggcgaattgaggagcttcctccaggttcggaagtatagcctggatctggcgagtctcatactctacgcatatcagctgtctacagctctggcgtacctcgagagcaaacgattcgtgcacagagacattgcggcccgcaatgttctcgtcagttcaaatgactgcgtgaagctcggcgactttggtttgagcagatacatggaggactccacctattataaggcatccaaaggaaaattacccattaagtggatggccccagagagtataaatttcaggaggtttactagcgcatctgacgtgtggatgttcggcgtgtgtatgtgggaaatcctgatgcatggagttaaacctttccagggtgtcaagaataatgacgtaattggtcgcattgagaacggagagcgactccccatgccaccaaattgccctcctacactgtattcgctgatgaccaaatgttgggcttatgaccccagtcgccgtcccagattcaccgagcttaaggcccagctctctactatcctcgaagaggagaaggcccaacaggaggagcggatgcggatggagtcaagaaggcaggccacagtgtcttgggattctggaggaagcgacgaggcccctcctaaaccctctaggccaggttacccgtctccacggtccagcgaaggtttctacccgagcccccagcatatggttcaaactaaccattaccaggtgagtggatatcccgggtctcatgggatcacagcaatggccggaagtatttacccgggccaggcgtccctgcttgatcagacagatagttggaaccaccggcctcaggaaatcgcaatgtggcagccaaatgtggaagacagcaccgtgctggatctgcgtggaatagggcaggtgctgcctacccatttgatggaggagaggctgattcgccagcaacaggagatggaagaggaccagagatggttggaaaaggaagaacgattcctgaagcctgacgtgagactgagccggggtagtattgacagggaagacggatctttgcaaggcccaatcggcaaccagcatatttaccaacctgtgggtaagccggacccagcggccccccccaagaaacccccacgtcctggcgctcctggacacctcggcagcctggcatccctgtcctcccccgcggacagttacaacgaaggtgtaaagccttggcgacttcaaccccaggagatcagtcccccgcctacagcaaacctggatcgatccaatgacaaggtatatgaaaatgtgacaggccttgtaaaagccgtaatcgaaatgtcctcgaagatccagcccgcgccccccgaagaatatgtcccaatggtgaaagaggtcggcctggccctgaggactttactagctaccgtcgacgagacaattcctctgcttcctgcctctacccatagggagatcgaaatggcccagaagctactgaacagtgacctgggcgaactgattaacaagatgaaactcgcccaacagtatgttatgacttctctgcaacaggaatataagaagcagatgcttacagccgcccacgccttggccgttgacgccaaaaatctgttggatgtcatagaccaggccaggttgaagatgctgggccagacccggcctcactag

SEQ ID NO: 25915 - DNA, 3159 bp, synthetic construct
  misc_feature 1..3159: note = Description of Artificial Sequence: Synthetic coding sequence
  source 1..3159: mol_type = other DNA
atggccgccgcctacctggaccccaacctgaaccacacccccaacagcagcacaaagacgcatctcggtaccggcatggagcgatcaccgggagctatggaacgagtactcaaagtcttccactactttgaatctaatagtgaacctacaacgtgggctagcatcatccggcatggggacgccacagatgtgcgcggtataatccagaagattgtggatagccacaaagtgaagcatgttgcttgctatggatttaggctttctcacctgaggtcggaagaggtgcactggcttcacgtggacatgggggtatcttccgtgcgggaaaaatatgagctggcccatccgcccgaggaatggaaatatgaattgcgaattaggtacctgcctaaaggctttctgaaccagtttaccgaagacaaacctaccctcaacttcttctaccaacaggtaaagtccgactatatgctggaaatcgctgatcaggtggaccaggagatcgcgctgaagctggggtgccttgaaattagacgaagctattgggaaatgcgaggcaatgccctggagaaaaaaagtaactatgaagtgctggaaaaagacgttggattgaaacggtttttccccaaatctctcctggattcggtcaaggctaaaacgttacggaaactgatccagcagacctttcgtcagtttgctaacctgaatagggaggagtctattctgaaatttttcgagattctgagtcctgtttaccgatttgacaaagaatgtttcaagtgcgcattagggtctagctggatcatcagcgtcgagctggctataggacctgaggaaggcattagttatctgactgataaaggttgcaaccccacccacttggccgactttacgcaggtccagacaattcagtactctaattccgaggataaagataggaaaggaatgctacagctgaaaatcgcaggggcaccagagcccttgacagtgactgcacccagcctgactatcgctgaaaatatggctgatctgatcgacggatactgccgactggtaaacggcacaagccaatcctttatcatccgcccccaaaaggagggtgaacgcgccctgccgtccatccccaaactggcaaattcagaaaagcaggggatgcgcacgcatgccgtctccgtgtctgagaccgacgactacgccgagattattgacgaggaagacacttatacaatgcctagcactcgggattatgaaattcagcgcgaacgcatcgaattaggccgctgtattggcgaaggacagttcggagacgtgcaccagggcatttacatgtcgcctgaaaatccggcactggctgttgctatcaagacatgcaagaattgcacatcagactctgtgcgcgaaaaatttctgcaggaggcattaaccatgagacagttcgatcacccccatatagtgaagttgatcggagttatcaccgagaatcccgtgtggattatcatggagctgtgcactctgggcgaactccgaagttttctccaggtcagaaagtattctctcgacctcgcgagcttgattctatatgcgtatcagctgagcactgctctggcttacctggagtctaagcgattcgttcatcgagatattgccgccaggaacgtgctcgtttcctctaatgactgtgtaaagttgggagatttcggtcttagtcgttacatggaggattccacttattataaagcctccaagggtaaattgcccatcaagtggatggcccctgagagcatcaacttccgtcgctttactagcgctagcgacgtctggatgttcggtgtgtgcatgtgggagatcctgatgcacggcgtcaagccttttcaaggtgttaagaacaacgatgtcatcggccggatcgaaaacggcgagcgactgccaatgccccctaattgccctcctacattatattctcttatgactaagtgttgggcctacgacccaagcagacggcctcgcttcaccgagctcaaggctcagctgagcacgattctcgaagaggagaaggcccagcaggaagagaggatgagaatggaatcccggcgccaggctacagtcagctgggatagtgggggctccgatgaggccccccctaagccaagtcggccgggatatcctagcccaagatcttctgagggtttttacccaagtccacaacacatggtgcagacaaatcactatcaagtgtctggctaccccggtagccacgggattactgctatggcgggatcaatctatcctggtcaggcgagcctcctggaccagaccgattcttggaaccacagaccacaggagatagctatgtggcagcctaacgtggaggacagtacagtgctcgatcttaggggtatcggacaggttctccctacccatctgatggaggagcgccttataaggcaacagcaggagatggaggaggatcagcgctggttagagaaggaagagcgcttcctcaagccagacgtgcgcctttctaggggctcaattgaccgggaagacggctctttacagggtcctatcggcaaccagcacatttatcaaccagttgggaagcccgaccccgcagcgccacctaaaaagcctccaagacctggtgctcccgggcaccttggatctctggccagcctttcgagccccgctgacagttacaatgaaggggttaaactccaacctcaggaaatcagtccacctcccaccgctaaccttgataggagcaatgacaaggtatacgaaaatgtgacaggtctggtaaaagcagtaatagaaatgagttccaagatccagcccgctccccctgaggaatacgtccccatggtcaaggaggtggggttggctctgaggacactcctagctacagttgatgaaacaatccctttactgcctgcttccacacaccgcgagatcgaaatggcacagaagttgctgaattctgatctgggagagctgatcaataaaatgaagctggctcagcaatatgtgatgacctctctgcagcaggaatataaaaaacaaatgctcactgctgctcacgctctggctgttgatgccaagaatttactcgacgtgatcgaccaggcgcgcctgaaaatgctgggccagacccgtccacactag

SEQ ID NO: 25916 - DNA, 2175 bp, synthetic construct
  misc_feature 1..2175: note = Description of Artificial Sequence: Synthetic coding sequence
  source 1..2175: mol_type = other DNA
atcgccgagaacatggccgacctgatcgacggctactgccggctggtgaacggtacaagtcagagtttcattatccggcctcaaaaggagggtgaacgggccttgccctcaatcccgaagctcgctaatagtgaaaaacaaggtatgaggacgcacgcagtgtcagtgtctgagacagatgattacgccgagatcattgatgaggaagacacatacaccatgccctccaagtcttacggtattgacgaagcccgcgattatgagatccaacgtgagagaatcgaacttggtcgatgcattggcgaagggcaatttggcgacgtgcatcaaggtatttatatgagtccggagaatccagcactggccgtagccatcaaaacatgcaaaaattgcacatccgatagcgtgcgcgaaaaattccttcaggaagccttgaccatgcggcagttcgaccacccacacatcgtaaagcttatcggcgtaattaccgagaatccagtgtggatcattatggaactgtgtactctcggagaactgcggagttttttacaagtgagaaagtacagtcttgacctggcctccctgattttatacgcctaccagctgagcacggccctggcctacctggagtcaaagcgtttcgttcatcgtgatatagcagctaggaacgtactcgtgtcttccaacgattgcgtgaagctaggtgactttggcctcagtaggtatatggaggattcaacgtattataaggccagcaagggcaagctgcctatcaagtggatggctcccgagtccatcaatttccgccgcttcacttcagcttccgatgtctggatgttcggcgtgtgcatgtgggaaatcctcatgcacggcgtcaaacctttccaaggtgttaaaaacaacgatgttattggcaggatcgaaaatggagagcgccttcctatgccccctaactgccctcccactttgtactcccttatgaccaagtgctgggcttatgacccgtcccgccggccacgattcacggaattgaaggcccagctgtctactatattagaggaggaaaaggcacaacaggaagaaaggatgcggatggagtcacgacgacaggccaccgtgtcatgggattcaggagggagtgacgaggcacctccgaaacctagcaggccaggatatccatctccacggtcaagtgaaggattctacccgagcccccaacacatggtgcagactaatcactatcaagtcagtgggtatcccggctcccatggtattacggcgatggccgggtctatttatccgggccaggcctccttactggatcaaaccgactcgtggaaccaccggccgcaggagattgctatgtggcagcccaacgtggaagactccacagtgctcgacctgagaggtatcggacaggtgttgccgacccatcttatggaggaacggctaattagacaacagcaggagatggaagaggaccaaaggtggctcgagaaggaggagcgttttctgaaaccagatgtaagactgagtcgcggatccatcgaccgcgaagacggatcgttacagggtccaattgggaaccagcacatttatcagcccgtagggaagcctgatcccgctgccccacccaagaagccgcctagacccggtgcacccggccatttgggcagtttggcttccttaagtagcccggctgactcgtacaatgagggcgtgaaactccagccccaggaaataagtccaccacctacagccaacttggacagatccaatgacaaagtatacgagaatgtaaccgggcttgtgaaggccgtgattgagatgagctctaaaatccagccagcccctccggaagagtatgtcccaatggttaaagaggtgggcctggctcttagaacccttctggctaccgtcgacgagacaattcccttactgcctgccagcactcacagagaaattgaaatggcccaaaagctgctgaactctgatctcggcgaactgataaataagatgaagcttgcgcagcagtacgttatgacttctctgcaacaggagtataaaaagcagatgctgaccgccgctcacgctctggcggtagatgctaagaatctactggatgtcattgaccaggctcgcttaaaaatgttggggcagactagaccgcactag

SEQ ID NO: 25917 - DNA, 363 bp, synthetic construct
  misc_feature 1..363: note = Description of Artificial Sequence: Synthetic coding sequence
  source 1..363: mol_type = other DNA
atggccgccgcctacctggaccccaacctgaaccacacccccaactcatctactaagacccacttaggaactgggatggaacggtcaccaggagcaatggaacgcgtgcttaaggtcttccattattttgagtccaactccgaaccaactacctgggctagcataattaggcatggcgacgccaccgacgtccgcgggattattcagaagatcgtagatagtcacaaagtgaaacatgtcgcctgttacggattcaggctgagccatctcaggtctgaggaggtgcactggttacatgttgatatgggggtttcatccgtgcgcgagaagtacgagctggcacatccccctgaggaatggtag

SEQ ID NO: 25918 - DNA, 156 bp, synthetic construct
  misc_feature 1..156: note = Description of Artificial Sequence: Synthetic coding sequence
  source 1..156: mol_type = other DNA
atggccgccgcctacctggaccccaacctgaaccacacccccaactctagcactaagactcacctgggaactgggatggaacgctcacctggggccatggagcgggtactgaaagtgtttcactacttcgagtcaaactccgagccaaccacctag

SEQ ID NO: 25919 - DNA, 3021 bp, synthetic construct
  misc_feature 1..3021: note = Description of Artificial Sequence: Synthetic coding sequence
  source 1..3021: mol_type = other DNA
atggccgccgcctacctggaccccaacctgaaccacacccccaacagttctactaaaacccacttaggtaccggcatggaacggtcccccggggcgatggaacgtgtactgaaagtcttccactatttcgaatctaacagcgagccaacaacttgggccagcatcatcaggcatggcgacgcaactgatgtccgtggaatcattcaaaaaattgtggactctcacaaagtcaagcatgtggcgtgttatggatttcggctgtcccatctcagaagtgaggaggtccactggctgcacgtggatatgggagtttcaagcgtgagggagaaatatgagttggctcacccaccagaggagtggaagtacgagctgaggataaggtacttaccaaaaggcttcctgaatcagttcacagaggataaacctactcttaattttttttaccagcaggtgaagtccgattatatgcttgaaatcgctgatcaggtggaccaagaaattgccctgaagctcggttgtttagagatccggcggtcctattgggaaatgaggggcaacgcactggaaaaaaagtctaattatgaggtacttgaaaaggacgtgggcctcaagcgattctttcccaaatctctactcgattctgttaaagctaagacccttcgaaagctgatccagcagacatttcgtcagtttgcaaacttaaacagggaggaaagtatcttgaaattttttgaaatcctcagtccagtctatcggttcgacaaggagtgttttaagtgtgccctcggaagctcttggattatctcagtcgaactggccatcggaccagaggaaggaatttcttacctgaccgataagggctgtaatcccacacacctggccgactttactcaggtgcaaactattcagtacagtaatagcgaagataaagaccgcaagggcatgctgcaactgaaaattgctggcgccccggagcctctgacggtgaccgccccctcccttacgattgctgagaacatggctgatttgatagacggatactgtaggctggttaacggcactagtcagagcttcattatccggccacagaaagagggagagcgagcactacccagcataccaaaattagctaactccgagaagcaaggcatgcgcacccatgccgtgagcgtttccgaaaccgacgactatgcagagatcattgacgaggaagatacgtacaccatgccttccacgcgtgattacgagatccagcgtgaacggatagagcttgggcgatgcattggagaagggcaatttggggacgtgcaccagggcatctatatgtccccagagaaccccgccctggccgttgccattaaaacatgcaaaaactgtacgtcagacagcgttagggaaaaattcctccaggaggctctcaccatgaggcagtttgatcaccctcacattgtgaagttaatcggagtgataactgaaaatcccgtgtggatcataatggagctgtgtactttgggcgaattgaggtcttttttacaggtgaggaagtactccctcgacctcgcctcactaatcctatatgcttaccagctctccaccgccctcgcctacttagaatccaagagatttgtgcaccgcgatatagccgcccgcaacgtcttagtcagttccaacgattgcgtcaaactgggcgactttgggttaagtcgctatatggaggattcaacctattacaaggccagtaaaggtaagttgcctatcaagtggatggcccccgaaagcatcaatttcaggagatttaccagcgcctccgacgtctggatgttcggcgtgtgcatgtgggaaattcttatgcacggggtcaagccattccagggcgttaagaacaacgatgtaatagggcgtatagagaatggcgagcgactacccatgccgcccaattgccccccgaccttatatagccttatgactaaatgctgggcttatgacccctcacgccgccccagattcacagaactgaaagcacagctgtctaccatcctagaggaggaaaaagcccagcaggaggagcgcatgcgcatggagtctagacgacaggccacagtgtcttgggactctgggggctccgacgaggctcccccaaaaccgtcacgacctggttatccctctcctaggtcctctgaggggttctatccttctccacagcacatggtccaaactaatcactatcaggatagcactgtgttggatctgagaggaattggacaggtactgcccacccacctcatggaagaaagactgatccgccagcagcaagagatggaagaagatcagaggtggcttgaaaaagaagagcgctttctcaaacccgacgtacggctttctagaggatccatcgaccgggaggatggctctttgcaaggtcccatcgggaatcagcacatataccagcccgtaggaaagccggaccctgccgccccgcccaaaaaaccgccacggcccggtgccccagggcatctaggctctctggcttctctgtcctcccccgccgactcatataacgagggagtgaagttgcaaccacaggaaatcagcccccctcccacagcgaatctggatcgcagcaatgacaaggtgtatgaaaacgtgactggcctggtgaaggctgtgattgagatgagttccaaaatccagcccgcccccccagaggaatacgttccaatggtcaaggaggtgggtcttgccctccgtactctcttggctactgtggacgagaccattcctttgctgcctgcaagtacacaccgcgagattgagatggcgcaaaaactcctaaattctgatcttggagaacttatcaacaagatgaaactggcgcagcagtacgtcatgacaagtctgcaacaggagtacaaaaagcagatgctgacagcagctcacgcactcgcagtggacgcaaagaacctcttggatgttatcgatcaggcgcgcctgaaaatgcttggccagactcgacctcactag

SEQ ID NO: 25920 - DNA, 2163 bp, synthetic construct
  misc_feature 1..2163: note = Description of Artificial Sequence: Synthetic coding sequence
  source 1..2163: mol_type = other DNA
atggccgacctgatcgacggctactgccggctggtgaacggcaccagccaatccttcatcatccgccctcagaaagagggcgaaagggctctgccatccattcccaaactcgccaattctgagaaacagggcatgcgaacccacgccgtgagcgtgtcagagacagacgactatgccgagatcatcgatgaggaggacacctacaccatgccttccaagagctatggaatagatgaagcacgcgattacgagatccagcgggagagaatcgagctgggcaggtgtattggcgaggggcagtttggggacgtgcatcagggaatttatatgtctcccgagaaccctgcactggctgtggcaatcaaaacctgcaaaaactgcacgtctgattccgtgcgggagaaattccttcaagaggctctcactatgaggcagttcgaccatccgcatatcgtcaaactgattggtgtgattaccgaaaatcccgtgtggattattatggaactgtgtacactaggtgagctgagaagtttcctccaggtgaggaagtattctctggacttagcctcacttatcctatacgcctatcaactctctaccgccctcgcatatttagagagtaaacggtttgtccatcgcgacatcgccgccaggaacgtcctggtgtcaagcaatgattgcgtgaaacttggcgatttcggcctgagccgctatatggaagattcgacttattataaagctagtaagggtaagctgcccatcaagtggatggcacccgaatcgatcaatttcagacgattcacatccgcgtctgatgtttggatgttcggagtttgcatgtgggagatcttgatgcacggggttaaacccttccagggcgtgaagaataatgatgttattggcagaatcgagaacggtgagcgattaccaatgccgccgaattgtcctcccacattatattccctcatgacaaagtgctgggcctatgacccgtctcgccgccctcgattcacagaacttaaggctcaattgagcaccatactcgaggaagagaaggcacagcaggaagaaagaatgcgcatggaatctcgccggcaagctacagtgtcgtgggactcaggcgggtccgacgaggcgccacctaagccatcccggccgggctatccctctccacggagctccgagggcttctatcccagcccgcaacatatggtccagaccaaccactaccaggtctccgggtaccccgggagtcatgggatcacagctatggctggtagtatttacccgggacaggcctccttgctggatcagaccgactcttggaatcacagaccgcaggagatcgccatgtggcagcccaacgtagaggattcaactgtccttgacttacgtggaatcggacaggtcctgcccacccaccttatggaagagagactgatccggcagcagcaagagatggaggaagaccagcggtggttggaaaaagaggagcgctttctgaagcccgacgtgagattgtcacgagggtctattgaccgggaggatggctcattgcagggtccaattgggaatcagcatatttatcaacctgttggcaagccggatccggccgctcctcctaaaaagcccccacggcctggtgcccctggccaccttggctccctggcgtccttatcatctcccgccgatagctataacgaaggggtgaaattgcaacctcaggaaatctcacctccccccaccgctaacctggacagaagcaacgataaggtctacgaaaatgtcactggcttagttaaggctgtaattgagatgtccagtaaaatacagccggcgccacctgaagaatatgtgccaatggtcaaagaagtaggtctcgcactgaggaccctcctcgccaccgtcgacgagactatccctctgctccccgcttcaacacacagagaaattgagatggctcaaaaacttctgaatagcgacctgggagagctgattaacaagatgaaacttgcccagcagtatgtgatgacatctctacaacaagagtacaaaaagcagatgctcaccgccgcccacgccttagcagtggatgcaaagaacctgctggacgtgatcgatcaggcccggcttaagatgctcggtcaaactcgccctcattag

SEQ ID NO: 25921 - DNA, 3198 bp, synthetic construct
  misc_feature 1..3198: note = Description of Artificial Sequence: Synthetic coding sequence
  source 1..3198: mol_type = other DNA
atggccgccgcctacctggaccccaacctgaaccacacccccaacagcagcaccaaaacccatctgggaactgggatggagcggtcaccaggagctatggaaagggtgctgaaagtgttccactatttcgaaagcaactcggagccgacaacctgggcttcaatcatcaggcacggggacgccactgatgttaggggcattattcagaagattgtggacagccataaggtgaaacatgttgcttgctacggattccgattgagccacctgagaagcgaggaagtccactggttgcacgtggacatgggcgtctctagcgtgagagaaaagtatgaattggcgcacccgcctgaggagtggaaatatgaactccggatccggtaccttcctaagggtttcctcaaccagtttacagaagacaaaccgacattgaatttcttctaccaacaggtcaagagcgattacatgctggagatcgccgatcaagtggatcaggaaatcgccctgaaactgggttgcttggagatccgacgctcttactgggaaatgagaggtaacgcactggagaagaagagcaattacgaagtgctggagaaagacgttggcttgaagcgattcttcccgaaatctctgctggatagtgtgaaggctaaaaccttgcgcaagttaattcagcagacatttcgccagtttgcaaatctgaacagagaggagagcattcttaaattctttgagatcctgtcccccgtgtacaggtttgataaggagtgctttaagtgtgccctgggatcttcatggatcatctccgtcgaactggccatcggaccagaagaagggatcagttacctgacggataaaggctgtaatcccacccacctagcggacttcacccaggtacagactatccagtactctaacagcgaagataaagatagaaagggcatgctacagcttaagattgctggagccccagaaccgctgactgttacagcccccagcttgaccatcgccgagaatatggcagatctcatcgatggatattgtcgactcgttaacggaacaagtcagtcatttattataaggccacagaaggaaggggaacgagctttgcctagtatccctaaactagccaatagtgagaagcaaggtatgagaacccacgctgtaagcgtatccgagaccgacgattatgccgaaataatcgatgaggaggatacatataccatgcccagtacacgagactacgaaatccagagggagcgcatcgagctcggccggtgtattggggagggacagtttggagatgtgcatcaaggtatttacatgtctcccgaaaaccccgctctggcagtggccatcaagacttgtaagaactgcacatcagacagcgtccgcgaaaaattcctgcaggaggctctcacaatgagacaattcgaccaccctcatatcgtgaagctgatcggcgttattactgagaacccggtgtggatcattatggaattatgtaccctcggggaattgcgtagtttccttcaggtccggaaatactcgctagacctggcctccctgatcctgtacgcctatcaactttctactgccctggcatacctggagtcaaaacgtttcgtgcatagagatattgcagctcgcaacgtcctcgtgagctctaatgattgcgtgaagctgggagatttcggcctctccagatacatggaagatagcacatattataaagcttcaaaaggtaagttacccataaaatggatggctccagaaagcattaacttcaggcggttcacatccgcttctgacgtgtggatgttcggggtgtgcatgtgggaaatcctgatgcatggtgtgaagccttttcagggagttaaaaacaatgacgtgattgggcgaatagagaatggggagagactgcctatgcctccaaattgcccaccgacactatacagcctgatgaccaagtgttgggcttatgacccaagccgccggccacgattcactgagctgaaagcgcagttgtccactatcctggaggaagaaaaggcccaacaagaggagcgaatgcgcatggagagtcgacgtcaggcaacggtgtcatgggacagtggtggaagtgacgaagcacctcccaaaccttcacgacccgggtaccctagtcctcgctcgagcgaagggttttacccctccccccagcacatggtgcagaccaaccactaccaagtgagtggataccctggttcacatggcattactgccatggccgggagcatataccccggacaagcatcgctacttgatcagactgattcttggaaccaccggccgcaggagatcgctatgtggcagccaaacgtggaggactcaacagtgttagacttgcgcgggatcggtcaagtgctgcctacccacctgatggaggagcggcttatacgacagcagcaagaaatggaagaggaccagcgatggctcgaaaaggaagagcggttcttgaagccggatgtcaggctttcccgcggctcaatcgatagggaagacggaagcttgcaaggccccataggcaatcagcatatctaccagccagtcgggaagccaggcaaagaggaaaagaattgggctgaacgcaatccagcggcccctccaaaaaagccgccaagacccggcgcacccgggcatcttggcagcctggcttcactatcaagcccagccgacagttataatgaaggcgtgaaaccctggcggcttcagcctcaagagatctctcccccccccactgccaatctcgatagaagtaacgataaagtctatgaaaacgtaactgggctggttaaggctgtgatcgagatgtcctcaaagattcagcctgcccctcccgaagagtacgtgcctatggtgaaagaggtcggcctggctttgcggactcttttggcgactgtcgatgagaccatacccctattaccagcatccacccaccgcgagattgaaatggcccagaaattactcaattctgatctgggggagctcataaataaaatgaagttggcacagcagtacgttatgaccagcctccagcaggagtacaagaaacagatgctcaccgccgcccatgccttggccgtcgacgctaaaaatctgctggacgtcatagatcaggctcgcctgaagatgctgggacagacccgaccacactag

SEQ ID NO: 25922 - DNA, 2904 bp, synthetic construct
  misc_feature 1..2904: note = Description of Artificial Sequence: Synthetic coding sequence
  source 1..2904: mol_type = other DNA
atgagcggcgtgagcgagcccctgagccgggtgaagctgggcaccctgcggagacccgagggccctgctgagcctatggtggtggtacctgtcgacgtcgaaaaggaggatgtgcggattttgaaggtgtgtttctattccaattcttttaaccctggtaagaacttcaaattggttaaatgcactgtgcagactgagattcgcgagataatcacctctatccttctctctgggcggataggccccaatattagactggccgagtgttacggactgcgcttgaaacacatgaagtcagatgaaattcattggcttcatcctcagatgaccgtgggtgaagtgcaagataagtacgagtgtctgcacgtggaagccgaatggcgctacgatttgcagatccgatatctcccagaagactttatggagagcctgaaagaggaccgtacaaccctgctgtacttctaccagcagctccgaaacgattatatgcaacgctacgccagtaaagtgagtgaagggatggccctccagcttggatgtttggagcttaggcgattctttaaggacatgccccataacgctctggacaagaagagcaactttgaattgctcgaaaaggaggtgggcctcgacttattcttccccaagcagatgcaggagaaccttaagccaaaacaatttcgcaagatgatccagcagaccttccagcaatatgcgtcattacgtgaggaggaatgtgtcatgaagttcttcaacactctggccgggtttgctaatatcgatcaggagacgtacaggtgcgagcttatccagggctggaacattactgtcgatctggtcatcggcccaaagggaatcagacaattaaccagtcaggacgctaaacctacatgtctggccgagtttaaacaaatcagatcaattcgatgccttccacttgaggaaggacaagcagtgctccagctgggcattgaaggagcacctcaggctctctcaattaaaacatcgtccctggcagaggccgaaaacatggccgacttaatcgacgggtattgtaggctgcaaggcgaacaccagggaagcctgataattcaccctcgcaaagatggcgaaaaaaggaatagcctgccccagatccctatgcttaatctcgaggccagaaggtcccacctgtccgagtcttgttctatcgaatcagacatatatgcagaaatccctgacgagaccctccggagacctgggggtcctcaatatgggatcgcgcgcgaagacgttgtgctgaaccgcatactgggcgaggggttcttcggcgaggtgtacgagggggtttatacaaaccacaagggagaaaaaatcaacgtggccgtcaagacttgcaaaaaggactgtacactggacaacaaggaaaaattcatgtcggaggccgtgataatgaagaacctcgatcatccccacatcgttaaactgatcggcataatcgaagaagaacccacgtggatcatcatggaattatacccttacggggagttgggccattaccttgaaagaaacaaaaatagtctgaaagtgcttactctcgtgctgtatagcctccagatatgcaaggctatggcctacctagaatcgatcaactgcgttcatcgcgatattgcagtgaggaatatccttgtcgccagccctgagtgtgtgaagctgggggacttcggtctctctaggtatatcgaagatgaggactattacaaagcaagcgtgaccagactcccaatcaagtggatgtctcctgagtcgatcaatttcagaagatttaccactgcctctgatgtctggatgttcgctgtttgcatgtgggaaatactctcattcggcaagcagccatttttttggctcgaaaataaggatgtgatcggcgtgctggaaaagggcgacagacttccaaaaccagacctttgccccccagtgctgtatacgcttatgacccggtgctgggactatgaccccagtgatcgaccaagattcaccgaactggtctgctcactgtctgacgtgtaccagatggaaaaggacatagcaatggagcaggaacggaatgcccgctaccgaaccccaaaaatactggagcctacagctttccaggagccacctcccaaaccttctaggcccaagtatcgacctccgccccagacaaacctcctggcgccaaagcttcagttccaggaggaggatttcattcagccttcgtccagagaagaggcccaacagctttgggaagctgagaaggtgaagatgcgccagattctcgataagcaacagaagcagatggttgaggactaccagtggttgaggcaagaggagaaatcgttggatccaatggtatacatgaacgataagagtcccctgacacctgaaaaagaagtgggctacctggagtttacaggcccccctcaaaagcccccccgcttgggtgcacagagtatccaacctactgccaacttggatagaaccgatgacttggtttacctgaacgtgatggagctggtgagggcagtactggagttgaagaacgagctgtgtcaactgccacctgagggatacgtggtagtagttaaaaatgtggggttgacattgaggaaactgatcgggtccgtagacgatcttctgccctctctgccaagtagcagcaggacagagattgagggcacacaaaagctgcttaacaaagaccttgctgagttgataaacaagatgagattagcacagcagaatgctgtcacctccttaagcgaagagtgcaagagacagatgctgacagctagtcatactcttgctgtggatgctaagaacctcctggacgccgtggatcaagcaaaagtgctggccaacctcgcacatcctcctgctgagtag

SEQ ID NO: 25923 - DNA, 3030 bp, synthetic construct
  misc_feature 1..3030: note = Description of Artificial Sequence: Synthetic coding sequence
  source 1..3030: mol_type = other DNA
atgagcggcgtgagcgagcccctgagccgggtgaagctgggcaccctccgccgccccgaagggccagccgagccgatggtggttgtgccagtggacgtggagaaggaggacgtgaggatcttgaaagtgtgtttttactccaattcctttaacccaggaaagaacttcaagctcgtgaagtgcacagtccagacggaaataagggagattataacatccattctgctctctggccgtattgggcccaatattcggctcgccgaatgttatggtctcagattgaagcatatgaagtctgacgaaatccactggcttcaccctcagatgacagtgggagaagttcaggataaatacgagtgtttacacgttgaagcggaatggcggtatgacctacagatcagatacctcccagaagatttcatggagtccctgaaagaggataggactactcttttgtacttttaccagcagttacggaatgactatatgcagagatacgcaagcaaggtctccgaaggtatggcactgcaactgggttgcctcgaactccgtagatttttcaaggacatgccccataacgcacttgacaagaaaagcaatttcgaactgctcgagaaggaagttggcttggacctgttctttcccaagcaaatgcaggagaaccttaagcctaagcagtttagaaagatgattcagcaaacatttcagcagtacgcatcactgagggaagaagaatgcgtgatgaagttttttaacactctggctggttttgcgaacatagaccaggagacctataggtgcgagttaatacagggttggaatatcaccgtggacttagtaattggacctaaagggatccggcagcttacatcgcaggatgccaaaccaacctgtttggctgagttcaaacagataaggagtattagatgtcttcccctagaggaaggccaagctgtgctgcaattgggaatcgagggggcccctcaggctctgtccattaagacgagttccctggccgaggctgagaacatggcggatctcattgacggatattgtcggctgcagggagaacaccaagggtcgctgattattcatcctagaaaagacggcgaaaagaggaacagtctcccgcaaatacccatgttaaacttggaagctagacgctcacatttgtctgagagctgttctattgaatcagacatttatgccgagattcctgacgaaacgttgagacgaccgggcgggccccagtacgggatcgccagagaggatgtggtgctgaaccggatcctaggggagggcttctttggtgaagtctacgagggagtctacactaaccacaaaggtgagaagatcaacgttgcggtgaaaacctgcaaaaaggactgtacactcgacaacaaagagaaattcatgtccgaagctgtgatcatgaaaaacctagatcacccccacatcgttaaattaatcgggatcattgaggaagaacctacgtggattatcatggaactgtatccatacggcgagcttggacactatctggagaggaataaaaattctctgaaggtgctgacccttgtcctctacagcctccaaatttgtaaagctatggcctacctggaaagcatcaactgcgtgcaccgtgacattgctgtgaggaacatcctcgtcgctagtcccgagtgcgtgaagctcggcgattttggactcagcaggtatatagaagatgaggactactataaggcctcagtcacgcggttgcccattaaatggatgagtccggagtcgatcaactttcggagatttaccactgcaagcgacgtctggatgttcgccgtgtgcatgtgggaaattcttagcttcgggaagcaacccttcttttggctggaaaacaaggatgtcatcggcgtgctggagaagggcgatagactacccaaaccggatctgtgtcccccagtgctgtacaccctgatgacaagatgttgggattacgacccctcagatcgaccgcgctttacagaactggtatgtagcctgtccgacgtttaccagatggagaaggacattgctatggaacaggagcgaaacgcacggtatcgaactcctaaaatacttgaacctaccgccttccaagagccaccacccaagcccagcaggcccaagtatcgcccccccccacagacgaacctccttgcgcctaagctgcagtttcaggtcccggagggtctgtgtgccagttcacctacactgacctcaccaatggaatatccgtctcccgtcaactcccttcacacgcctcctttgcacaggcacaatgtgtttaagcggcattctatgcgcgaggaggacttcatccagccctcttcacgggaggaagctcagcagttatgggaggcagaaaaagtgaagatgcgtcagatactggacaagcaacagaaacagatggtggaggactaccagtggctccggcaggaggaaaagagcctggaccccatggtgtacatgaatgataagtctccgctgacccctgaaaaagaggtcggatacctggaatttacaggcccaccccaaaagccacctcgcttgggtgcccagagcattcagccaaccgctaatctcgaccgaacagatgatctggtgtatctgaacgtgatggagctcgtgcgcgccgtgcttgagctcaagaacgagttgtgtcaactgcccccagaaggctatgtcgtcgttgtgaagaatgttggtcttacgctgcgcaagctcatcggatcagtcgatgatctgctgccttcactaccttccagtagccggaccgaaattgagggcacccagaaactgctcaataaggacctagcagaactgattaacaagatgaggctagctcagcagaacgccgtcacttctctgagtgaggagtgtaaacggcagatgttgacagctagccacaccctggcagtggatgctaagaatcttctcgacgccgtcgaccaggcgaaggtgttggccaacttagcacacccccctgctgaatag

SEQ ID NO: 25924 - DNA, 3030 bp, synthetic construct
  misc_feature 1..3030: note = Description of Artificial Sequence: Synthetic coding sequence
  source 1..3030: mol_type = other DNA
atgagcggcgtgagcgagcccctgagccgggtgaagctgggcaccttacgacggcctgaaggccctgccgagcccatggtggtcgtgcccgttgatgtggagaaagaagatgttcgcatactgaaggtctgtttctattctaactcgttcaatcctggtaagaatttcaagttggtgaagtgcaccgtccagacggagatccgagagattatcacttctattctgctttcgggcaggattggtcccaacatcaggctggcagaatgttacggtctcagactcaaacacatgaaatccgacgaaatacattggctgcatccacagatgaccgtgggagaggtgcaggataaatatgagtgcttgcacgtcgaggccgaatggagatatgacttacagatcagatatctgcctgaggacttcatggaaagcctgaaggaagatcggaccacgcttctgtatttctatcagcaactgagaaatgattacatgcaacgatacgcatctaaagtctcggaagggatggctctacagctgggatgcctcgaactccggcgtttcttcaaggatatgcctcacaatgctctagataagaaaagtaactttgaattgctggagaaggaggtgggcctggacctgtttttcccgaagcagatgcaagagaatctgaagccgaagcaatttcggaagatgatccagcaaacgtttcagcagtacgcaagcctgcgtgaagaagagtgcgtgatgaagtttttcaacaccctggccggctttgccaatatcgaccaggagacttacagatgtgaactcatccaagggtggaatattacagtcgatcttgtaatcgggccgaaggggatccggcagcttacctcccaggatgcaaagccgacatgcctagcagaattcaagcagatcaggagtatacggtgtttaccattggaagaagggcaggccgtcctgcagctggggatcgagggagccccccaggctctctcaataaagaccagcagtctcgccgaggccgaaaatatggctgatcttatcgatggatactgcagattgcagggagagcaccagggaagcttaattattcacccaagaaaagacggggaaaaacggaattctttaccccagatccccatgctgaacctggaggcacgacgctcccatctgtcggagagttgcagtattgagtccgatatttacgccgagattccggacgagaccctgaggcgcccgggcggcccccagtatggaattgcccgcgaagatgtggtactgaatcgcatcctcggtgagggattttttggagaggtgtatgaaggcgtgtataccaatcacaaaggagaaaaaatcaacgtcgctgtcaagacatgtaagaaagactgtaccctcgataataaggagaaattcatgtctgaagctgtgatcatgaaaaacctggatcatccccatattgtgaaactcatagggattatcgaggaagagcccacctggattatcatggagctgtacccatatggagagctgggacactacttggagagaaataagaattcgctcaaagtactgaccctggtgctgtacagtttgcagatctgcaaggccatggcctatttggagtccatcaattgcgtacatagagatattgctgtcagaaatattctggtagccagtccagagtgcgtgaaactgggagactttggcttaagccgctatatcgaggacgaagattactataaagcttctgtgacaagactccccataaagtggatgagcccagaaagcatcaactttcgtcgcttcacaaccgcttccgacgtgtggatgtttgctgtttgcatgtgggaaatcctgtcttttgggaagcagccattcttttggctggaaaataaggatgtgataggggtgctggaaaagggtgatagactccccaaaccagatctgtgtcccccagtgctgtataccctcatgacacggtgttgggactacgacccatccgaccgacctcggttcacagaactggtgtgcagcttgagcgatgtgtatcagatggaaaaggacattgcaatggagcaggagcgcaatgctagatataggacacctaaaattctggagcccaccgcatttcaggaaccccccccaaaacctagcagacccaagtaccgtcctccaccccagactaaccttcttgcacccaaactgcagttccaggtccctgaaggactgtgtgcgtcatcgcccaccttgaccagccccatggagtacccaagcccagtgaattcgttacatactcctcctttgcaccggcacaacgtcttcaagcgccactctatgcgggaagaagatttcattcaaccctcctcacgggaggaggcccaacagctgtgggaggccgagaaggtgaagatgcggcagattcttgacaagcaacagaaacagatggtggaggattaccagtggctgaggcaggaagagaagtctttggaccccatggtgtatatgaacgacaagagcccactgacccccgagaaagaagtgggttatctggagttcaccggccccccacagaaacctccgaggttgggggcacagtctatccaaccaaccgccaatttggatagaactgacgatctcgtgtatctcaacgttatggagttggtgcgtgcagtactggagctgaagaacgaactgtgccagcttccccccgaaggttacgttgttgtcgtgaaaaacgtgggcctcaccttgaggaagcttattggttcagtcgacgacctgctgccaagcctcccatcgagctcacgtacagagatcgaaggaacccagaagctgctgaataaggatctggcagagctgatcaataagatgcggttagctcagcaaaacgcagtaacctcgctgagtgaggagtgcaagcgccagatgctgaccgccagtcacacactcgccgtggacgccaaaaatctcctcgatgccgtagaccaagccaaggtgttggctaacctggctcacccccccgccgaatag

SEQ ID NO: 25925 - DNA, 2904 bp, synthetic construct
  misc_feature 1..2904: note = Description of Artificial Sequence: Synthetic coding sequence
  source 1..2904: mol_type = other DNA
atgagcggcgtgagcgagcccctgagccgggtgaagctgggcaccctacgacggcccgagggaccagccgaacccatggtggtggtgcctgttgacgttgagaaagaggatgtgcggatcttaaaggtttgcttttattcaaacagcttcaaccccggtaagaactttaagcttgtcaagtgtacagttcagacagagatccgcgaaatcatcacttccatccttctgtcaggccgaatcggcccgaacatcagactggcggagtgctacggcctccgcctgaaacatatgaagagcgacgagatccactggctgcaccctcaaatgactgtgggtgaagtgcaggataagtatgaatgtctgcacgtggaagcagaatggcgctatgacttgcagattcgatacctgcctgaagactttatggagtccttaaaagaagatagaacgacccttttgtacttttatcaacagctacgcaacgactatatgcagcgttatgccagcaaggtctctgagggcatggcgctccagttgggctgtctggagttgagaaggttcttcaaggatatgcctcataatgctctagacaaaaaatcaaatttcgagctgttagagaaggaggtgggcctggatctgttctttccaaagcagatgcaggagaatctgaagccaaaacaattccggaagatgattcaacagacatttcaacagtacgcttccttgagggaagaagagtgcgttatgaaattcttcaacactcttgcaggctttgcaaatatcgaccaggagacatacaggtgcgagctgattcagggatggaatataactgtcgaccttgtgatcgggcccaagggtatccgccagctgacatcccaggacgccaagcccacatgtttggccgaattcaagcagatcaggtcaataagatgcctgccactggaggaggggcaggccgtgctgcagttaggaatagagggtgccccccaggccttgtctatcaaaacgagttctctggccgaagctgagaatatggccgacctgatcgacggctactgtcgcctgcagggggagcatcagggttccctgattatccaccccaggaaagacggagagaaacgcaactcactgcctcagatcccgatgctcaatctggaggcaagacggtcgcatctgtcagagtcatgtagcatcgagtccgacatctacgccgaaattcctgacgagacgctgagaagaccaggaggacctcagtacggcatcgccagggaagatgttgttttgaatagaatcctgggagagggcttcttcggcgaagtctacgagggtgtttacaccaatcacaagggggaaaaaattaacgtggccgttaagacatgcaaaaaagactgcacactcgataacaaagaaaaattcatgtccgaggcagtgatcatgaagaatttagatcatcctcacatagtgaagctgatagggatcatcgaggaggagccaacttggatcattatggaactttacccctatggagagctgggacattatttggaacgaaataaaaatagcctcaaagtgctgacccttgtgctgtactcactccagatatgtaaggcgatggcctacctggagtccataaattgcgttcatcgggacattgccgtgaggaacatactggtggcttctcccgagtgcgtgaagcttggcgacttcgggcttagtagatacatcgaggatgaggattattataaggcgagcgtaactcgcctgcccatcaagtggatgagtcctgaatccattaactttcgacgcttcacaaccgcctccgacgtttggatgtttgccgtgtgtatgtgggaaatattatccttcggcaagcaaccctttttctggctcgaaaacaaagatgtgatcggagtgctggagaagggagaccggcttccgaagccagacttatgccctccagttctttacacactcatgaccaggtgctgggactacgatcccagcgacaggccccgatttaccgaactagtctgttctctgtcagacgtatatcagatggagaaggatattgccatggagcaggagcggaacgccaggtaccgcacacctaagattcttgagccaaccgccttccaggaaccacctcctaagcccagcagaccaaagtaccgaccaccgcctcagactaacctactggccccaaagctgcaattccaggaagaagactttattcagccatcaagcagggaggaagcacagcagctctgggaagcggaaaaggtaaagatgcgacagatcttagataaacagcagaagcagatggtcgaggattaccagtggttgagacaggaggagaaatctctggatccaatggtgtacatgaacgacaagagccctctcacaccagaaaaagaggtcgggtatctggagttcacggggccacctcagaagccaccccgcttgggtgctcagtctattcaacccaccgccaatctcgatcgcacagatgatctggtctacctgaatgtcatggagttagtgcgggccgtactagaactgaaaaatgagctgtgtcagcttcctccagagggatatgtggtggtggtgaaaaatgtgggactcacattacgcaaactcattggctccgtagatgatcttttaccgagtctgccctctagcagtcgaaccgaaattgaggggacccagaagctgctgaacaaggatctggccgaactgatcaacaagatgaggttggctcagcagaacgccgttacttccctgagcgaggaatgcaagcgccagatgttaaccgcctctcacaccctggccgtggacgcgaagaatctgctggatgctgtggaccaggccaaggtcctcgccaacctggcacatccaccagccgagtag

SEQ ID NO: 25926 - DNA, 2904 bp, synthetic construct
  misc_feature 1..2904: note = Description of Artificial Sequence: Synthetic coding sequence
  source 1..2904: mol_type = other DNA
atgagcggcgtgagcgagcccctgagccgggtgaagctgggcaccctgcgacgaccggaaggtccagctgagccaatggtcgttgttcctgttgacgtcgagaaagaggatgtgcggattctgaaagtttgtttctatagtaacagctttaaccctggaaagaactttaaacttgtcaaatgtacagtccagactgaaatcagagagattatcactagtattctattaagtggccggattgggccaaacatccggttggctgagtgttatgggcttaggctaaaacacatgaagtcggacgaaatccactggcttcatccacagatgaccgtcggggaggttcaagataaatacgaatgtctgcacgtggaggccgaatggagatacgaccttcagatcagatacctgcctgaagattttatggagtcgctgaaggaggatcggactaccctgctgtacttctatcaacagctgagaaacgattacatgcaaaggtatgccagtaaggtgtccgaaggaatggctctacagctgggttgtcttgagttacgtcgattctttaaggacatgccccacaatgctcttgacaaaaaatcaaacttcgagctgttagagaaggaggtaggactcgatctcttctttccaaaacagatgcaggagaacctgaaacccaagcagtttaggaagatgatccagcaaacattccagcagtatgcgagtctgagggaagaggaatgcgtgatgaagttcttcaatactttagctggattcgctaacatagaccaggaaacgtacaggtgcgaacttattcagggatggaacattacagtcgatcttgtgattggccctaaagggatcagacagttaacgagccaggacgctaagccaacatgcctcgcagaatttaagcaaatcagaagtatcaggtgcctcccgttggaggaaggccaagcagttttgcagctcgggatagagggtgctccacaagccctgagcatcaaaaccagcagtctggccgaggcagaaaatatggcagatctgatagacgggtactgtagattacagggcgagcatcagggttctctcatcattcatccgcgcaaagatggcgagaaaagaaactccttgccgcagatacccatgctcaatttagaagctagacgtagtcacctaagcgaaagctgctccattgagtcagatatctacgctgaaatcccagatgagacactcagaaggccaggaggcccgcaatacggcatagcccgggaagatgtggtgctgaacagaattctgggagaaggcttcttcggcgaagtgtatgagggcgtgtacacaaatcacaaaggcgagaagataaacgtggccgtcaagacttgcaaaaaagactgtacactagacaacaaggagaaattcatgagtgaggccgtcataatgaaaaacctggatcatccacacatcgttaagctcattggcataatcgaagaagaacctacctggatcatcatggaactgtacccttacggcgagcttggacattatctcgaaaggaacaagaacagcctcaaagtgctcactctagtgctgtatagtctccaaatctgcaaagcgatggcttacctcgagagcatcaattgcgttcatagagacatagcagtgcgtaacatattagtggcgtcccctgagtgtgtgaagttaggggacttcggccttagcaggtatatcgaggacgaagactactataaggcatccgtgacaagactgccaatcaaatggatgtcccctgagtccattaacttcagacggtttaccaccgcctctgacgtgtggatgtttgctgtatgtatgtgggagatactgagcttcggaaaacagccttttttttggctggaaaacaaggatgttatcggcgtgcttgaaaaaggtgataggctaccaaaaccggacctgtgccccccagttctctacaccctgatgacaaggtgttgggactacgacccaagcgacaggccacgctttacagagttggtgtgttctttgtcagatgtataccaaatggagaaggatattgctatggagcaggagcgcaatgcccgctaccggacacccaagatcttggaacccacagccttccaggagcccccccccaagcccagccgacccaagtaccgacctcccccccaaaccaacctgcttgcccccaagcttcagttccaggaggaggacttcatacagccgagtagccgtgaggaggcgcagcagctgtgggaggcagaaaaggttaagatgcggcaaattctcgataaacagcagaagcaaatggtggaagattaccagtggctgcggcaggaggagaagagcctggaccccatggtgtacatgaacgacaaatccccccttactcccgagaaagaggtgggctacctcgaatttacaggcccaccccaaaaaccacctcggttgggagcccagagtatccagcctaccgcaaatctggatcgaaccgacgacctggtctatctgaacgtcatggaattggtccgcgccgttctcgagctcaaaaatgaactgtgtcagttgcctccagagggatatgtggtggtggtcaagaacgtcggcctcactctgaggaaattaattgggtcggtggacgacctgctgcccagcctgccatctagctcccgcacggaaatcgaagggacgcagaagctgctgaacaaggatctggctgaattaatcaacaagatgagattagctcagcagaacgccgtgaccagtttgtctgaagagtgtaagagacagatgctaactgcctcacataccctcgcggtcgatgcaaaaaacctcctggacgcggtggaccaggccaaggttttggccaatcttgctcaccctcctgccgagtag

SEQ ID NO: 25927 - DNA, 2409 bp, synthetic construct
  misc_feature 1..2409: note = Description of Artificial Sequence: Synthetic coding sequence
  source 1..2409: mol_type = other DNA
ctgctgcccgagcggatgagcggcgtgagcgagcccctgagccgggtgaagttaggcaccctacggcgccccgaaggtcctgccgaacctatggtggtggtccccgtggacgtcgagaaggaagatgtgagaatactgaaggtgtgtttctattccaattcatttaatcccggcaagaacttcaaactcgtcaagtgtactgtccaaacagagatcagagaaatcatcacctctatcctcttatccggtaggatcggtccaaatatcaggctggcagagtgctatgggctacggttaaagcatatgaagtctgatgagatccactggctgcacccgcagatgaccgttggggaggtgcaggacaaatacgaatgcctgcatgtcgaggcggagtggcggtatgacttacagatcagatacctgcccgaggacttcatggagtccttgaaagaggaccggactactctactctatttttaccaacagctcagaaatgactacatgcagagatacgctagtaaggtgtcagagggcatggcccttcagctgggatgtctggaactccgcagattcttcaaggatatgccccacaatgctttagataagaaatcgaactttgagttactggagaaggaagtggggctcgatttgttctttcctaagcagatgcaggagaatctcaaacccaagcagttccgcaaaatgattcaacaaacttttcagcaatacgcctcattacgcgaggaagaatgcgttatgaagttttttaataccctagcaggtttcgccaatattgatcaagaaacctaccgctgcgagctgatacaaggttggaatattacagtcgatttggtgatcggaccaaagggcatccgacaattgaccagccaggacgcaaagccaacatgcctggcggagtttaagcagatccggtctatcaggtgcctgcctctggaggaggggcaagcagtactgcagctcgggattgaaggcgccccccaggccctatccataaaaactagttcgctggccgaggccgaaaatatggccgatctgattgacggttattgtcgactccagggagaacatcaagggtcactgattatccatccacggaaagatggcgaaaagcgaaactccctgcctcaaatcccgatgcttaacctggaggctaggcggtcccacctgtctgagtcctgttctatcgagtccgacatttacgccgaaattcctgacgagaccctgcggcgccccggaggccctcagtacgggattgctagggaggatgttgtgctgaaccgcattctgggcgagggattctttggagaggtgtacgagggagtctacactaaccataaaggagaaaagattaatgtcgcagtgaaaacatgcaaaaaagattgcacccttgacaataaggagaaattcatgtccgaggctgtcatcatgaagaacttggaccatccccacattgtgaagctcatcggaataattgaagaggagccgacgtggatcatcatggaactctacccatacggggagcttggccattatttagaacggaacaagaattccctgaaggtgttgaccttagtactgtatagtttgcagatctgtaaggcaatggcctatcttgagagtatcaactgtgtccatcgcgacattgccgtccgcaacattcttgtagcgtcccctgaatgtgtaaagttgggcgattttgggctgagtcggtacatagaggacgaggactactataaggctagtgtgacccgtttgcctataaagtggatgtcacccgagtccattaactttagaagatttactactgcttctgatgtctggatgttcgctgtgtgtatgtgggagatcctttcttttgggaagcagccttttttttggctcgagaataaggacgttatcggagtgttggagaagggcgataggttgccgaagcccgacctgtgtccacccgtgctgtacacccttatgacgagatgctgggactacgaccccagcgatcggcctagattcacagaactcgtttgttcccttagtgacgtgtaccaaatggaaaaggatatcgctatggagcaagagaggaatgcacggtaccgaactccaaagattctggagccaacagcctttcaagaaccacccccaaagccctcacgccctaagtaccgcccgcccccacagactaacctcctggcacctaagttgcagttccaggtaccagagggtctctgtgcaagctcccctacattgacttcacctatggagtatccttctcctgttaactctctgcacactcccccactccataggcataacgtctttaagaggcatagtatgcgggaggaagacttcattcaaccctcatccagggggcccgctgccgttggcggctag

SEQ ID NO: 25928 - DNA, 3030 bp, synthetic construct
  misc_feature 1..3030: note = Description of Artificial Sequence: Synthetic coding sequence
  source 1..3030: mol_type = other DNA
atgagcggcgtgagcgagcccctgagccgggtgaagctgggcaccttgcggcgtccagaaggccccgccgagcccatggttgttgtgcccgtggacgtggagaaagaagatgtgaggattctaaaagtatgtttctattcaaactcatttaatccgggcaagaattttaagctcgtaaagtgtaccgtacagacggagatcagggaaatcataacaagtatcctgctttccggacggattgggcctaatatccggctcgctgaatgctacggtttgcggctaaagcacatgaaatcagacgaaattcattggttgcacccacagatgaccgtgggtgaggttcaggataagtatgaatgtttgcatgttgaggcagagtggcgatacgacttgcagatcagatacttaccagaagattttatggagtcactgaaagaagatagaaccactctgctgtacttctaccagcagttgagaaacgattacatgcaaaggtacgcttcaaaagtgtcagaggggatggctttgcagctgggatgtctcgaactgcgccggtttttcaaagatatgccccacaacgctcttgacaaaaagtctaatttcgagctacttgagaaagaagtgggcctcgacttgttttttcccaaacagatgcaggagaacttgaagcctaagcaatttcgcaaaatgatccagcagactttccagcagtacgcttccctgcgagaggaggaatgcgtcatgaaattttttaataccctggctggttttgccaacattgaccaggaaacttaccggtgcgagctgatccaggggtggaatataaccgtggatctggtgattggccctaaggggattcgacagttaaccagccaggatgccaaacccacgtgcctggctgagtttaagcagattcggtcaatccggtgcctgccactggaggaggggcaggccgtcctgcagctgggtatagaaggagctcctcaggctctttccatcaaaacatccagcctggccgaggccgaaaacatggccgacctgattgacggctattgtagattgcagggagaacaccagggctcgttgataattcaccccagaaaagacggcgaaaaacggaatagtctgcctcagatacccatgctgaacctggaagccagacgcagtcacctgtcggaaagctgctctatcgaatctgatatatatgcggagattccagacgagacactgaggcgacccggcggcccacagtatggtattgcccgggaagacgtcgtgttaaaccgaatcctgggagagggtttcttcggcgaggtctacgaaggcgtatataccaatcataaaggagagaagattaatgtcgccgttaaaacctgcaaaaaagattgcaccttggacaataaggaaaagtttatgtcagaggcggtgatcatgaagaacctcgaccatccccacatcgtgaaactgatcggcattatcgaggaggagcctacctggattatcatggaactgtacccatacggagagttgggccactacctggagcgaaacaaaaattccctgaaagtactcaccctggtgctgtactcactacaaatatgtaaggccatggcatatctcgaatccattaattgtgtacatagggacatagctgtccgtaacatcttggtcgcatcgcctgagtgcgtgaagcttggggacttcggtctgtctagatatattgaggacgaagattattacaaagcttccgtgacacgcctgcccattaaatggatgagccctgagagtattaattttcggagattcacgacggctagcgacgtctggatgttcgccgtttgcatgtgggagatcttaagctttgggaaacaaccatttttttggctagaaaataaagatgtaataggagtcctggaaaaaggtgatagactgccaaagcctgatctgtgccctcccgtgctgtacaccctcatgaccaggtgttgggactacgacccttctgataggccgagatttaccgagctggtctgcagccttagtgatgtgtaccaaatggaaaaggatattgcaatggaacaggagcgcaacgcccgctataggacccccaagatcctggaaccaaccgctttccaggagcctccccccaagccctcccgccccaaataccgcccaccaccacagactaacctgcttgcgcctaagctgcagtttcaggtgcccgagggactctgtgcaagtagtccaacactgacgagcccaatggagtacccatcacccgtgaatagtctccacactcctcctttgcatcgccacaacgtcttcaaacggcattctatgcgggaggaggattttatacaaccatcctctcgagaggaagcacagcagctgtgggaggcagagaaagtcaaaatgagacaaattctggacaagcagcagaagcagatggtagaggattatcagtggctgaggcaggaggaaaaaagcctagatcctatggtttacatgaacgacaagtcacctcttacccccgagaaggaggtggggtatctcgagtttaccgggccacctcagaaacccccacgtctgggagcgcaaagcatccagcccactgctaatctggatcgaacagatgacctcgtttatctgaatgtgatggagctggtgcgcgcggttttggaactcaaaaatgaactctgtcagctgcctcctgaagggtacgtggtggtggtaaaaaacgttgggctaacacttagaaagttgattggttccgtggatgatttactgccatctctgccctctagcagccgaaccgagatagaaggtacccaaaagctcctgaataaggacctggctgaactaatcaacaagatgcgacttgctcagcagaacgctgttacctccctgtcagaggagtgcaaaagacagatgttgactgcttctcatacactggcagttgacgctaaaaatctgctcgacgcggtggaccaggctaaggtgcttgccaacctcgcccaccccccagctgagtag

SEQ ID NO: 25929 - DNA, 969 bp, synthetic construct
  misc_feature 1..969: note = Description of Artificial Sequence: Synthetic coding sequence
  source 1..969: mol_type = other DNA
atggccgaccgggacagcggcagcgagcagggcggcgccgccctggggagcggggggagtctcgggcaccctggatcagggtccggcagtgggggagggggcggaggaggaggtggcggggggggtagcgggggcggcgggggcggtgccccgggaggactgcagcatgaaactcaggagctcgcttcgaaacgggttgatatacagaacaagagattctatcttgatgtgaagcagaatgccaaaggacgcttcctgaaaattgctgaggttggagccgggggcaacaaaagcaggctcaccttgtccatgtctgtagcagttgagtttcgtgactatttaggggactttatcgaacactacgctcaactgggtccttcccagcccccagatttggcccaggcacaggacgaaccacgccgcgctctcaagagcgaatttctggtgagagagaataggaaatactacatggacttaaaagaaaatcagcggggaaggttcctaagaatccgacaaacggttaatcggggccctggcttaggatccactcagggccagaccatcgccctgccagcgcagggcttgatagaatttagggacgccctggcgaagctgattgacgattacggggtggaggaagaacccgcggaattgccggaaggaaccagcctgacggttgacaacaagcggtttttttttgacgttggatccaacaaatacggagtctttatgcgggtgagcgaggttaaaccgacctaccggaatagtatcacagtcccatataaagtatgggctaagttcggacataccttctgtaaatatagcgaggagatgaaaaaaatccaggaaaaacagcgcgaaaagagagctgcatgtgagcagctacaccagcagcagcagcagcagcaggaagagactgcggcagccaccttgctcttacaaggggaggaagagggcgaagaggattag

SEQ ID NO: 25930 - DNA, 588 bp, synthetic construct
  misc_feature 1..588: note = Description of Artificial Sequence: Synthetic coding sequence
  source 1..588: mol_type = other DNA
atgggccgggcccgggacgccatcctggacgccctggagaacctgaccgcagaggagctcaaaaaatttaaactcaaactgctatccgtgccactcagagagggctatggccgcattccccgcggggcgctgctgtctatggatgccctcgacctcacggacaagctggtttctttctacctggagacctacggcgctgagctgacggccaatgtgctgcgtgacatgggcctgcaggaaatggcaggccaactgcaggcagcgacccatcaaggctctggtgccgcccctgccgggattcaagcgccacctcagtccgctgccaaaccaggactgcacttcatagatcagcatagggcagcactaattgcccgggtgacaaacgtcgaatggcttctggacgcactgtatggaaaagtgctcaccgacgagcaatatcaggccgtgagagcagaacccaccaatcctagtaagatgaggaagttattctcatttacccccgcctggaattggacctgcaaggatctgttgctgcaagctttacgggagtcccaaagttacctcgtggaggatctcgaacggagctag

SEQ ID NO: 25931 - DNA, 531 bp, synthetic construct
  misc_feature 1..531: note = Description of Artificial Sequence: Synthetic coding sequence
  source 1..531: mol_type = other DNA
atgggccgggcccgggacgccatcctggacgccctggagaacctgacggcggaggagctcaagaaattcaagctgaaacttctgagcgtgccgttgagggagggctacggccggattcccagaggtgctctcctcagtatggatgccttggatctgacagacaagttggtatcattctacttggaaacttacggagcggaattaaccgcaaatgttctcagggacatggggttgcaggagatggccggccagcttcaagctgcaactcatcagggactgcacttcatcgaccagcacagggccgcactcattgcacgtgttactaacgttgaatggctactcgatgcactctacggcaaggttcttactgacgaacagtaccaggcagtgagggcagagccaaccaatcctagcaaaatgagaaaattattcagttttacacctgcttggaactggacatgtaaagatcttttactgcaggctttgcgtgaatcacagtcttatcttgtggaggatcttgagagaagctag

SEQ ID NO: 25932 - DNA, 408 bp, synthetic construct
  misc_feature 1..408: note = Description of Artificial Sequence: Synthetic coding sequence
  source 1..408: mol_type = other DNA
atgggccgggcccgggacgccatcctggacgccctggagaacctgaccgccgaggaattgaaaaagttcaagctacaggctgctactcaccaaggaagtggggctgccccggccggtattcaggcgcctcctcaaagtgccgctaagccaggcctccattttatagaccagcatcgagccgccttgatcgcgagagtgactaatgtggagtggctcctggacgccctctacgggaaagtactgacagacgagcagtatcaagccgtgcgcgccgagcccactaacccttccaagatgcggaagttattttccttcacaccagcctggaattggacatgcaaggaccttctccttcaggctctaagggagtctcagagctacctcgtcgaagacctggagcgcagttag

SEQ ID NO: 25933 - DNA, 1311 bp, synthetic construct
  misc_feature 1..1311: note = Description of Artificial Sequence: Synthetic coding sequence
  source 1..1311: mol_type = other DNA
atgcggctggcccggctgctgcggggcgccgccctggccggccccggtcctggtttgagggcagcgggtttttcacgctctttttcatctgacagtggtagctcacctgctagcgaacggggggtgcctggccaagttgacttttatgcaagattctctccctcccctttgtccatgaaacagttcctggacttcgggtctgtgaacgcctgcgagaaaacctccttcatgtttctgaggcaggaactgccagtgcgcctagctaacattatgaaggagatttctttactgccagacaacctgctaagaacgccctccgtgcagttagttcagagctggtacatacagagcctgcaggagctgcttgactttaaagataaatcagccgaggacgctaaggcaatctatgatttcaccgacacggtaatccgcattagaaatagacataacgacgtaatcccgaccatggcacagggggtgatcgagtacaaggaatcattcggagtggacccggtcacttcccagaatgtgcagtactttcttgatcgcttttatatgtcccggatcagcattagaatgttgctgaaccaacattcactgctgttcggggggaaaggaaaggggtcgcccagtcacagaaaacatattgggtcaattaatcccaactgcaacgtgcttgaggttataaaggacggctatgaaaatgcaagacgactctgtgacttgtactatattaactctcctgagctggagctggaggagctgaacgcgaaaagtcccggacagcctatccaagtggtctacgtgccatcccatctctatcatatggtgttcgagctcttcaagaatgccatgagggccacgatggaacatcatgctaaccgaggggtttacccaccaatccaggtgcatgtcacattgggaaatgaggacctgactgtcaagatgtctgatcgcggaggaggcgtccccctcagaaaaatcgatcgactcttcaactatatgtattctaccgcaccccggcccagagtcgagacttcgcgggcagtgcctttggctggctttgggtatggcttgcccatttccagattgtacgcgcaatacttccaaggagacctgaagctgtactccttagagggctatggaaccgatgctgtgatatacatcaaagccctaagcacagatagcatcgaacggctacccgtttacaataaagctgcctggaagcactacaacaccaaccacgaagcggacgactggtgtgtgccgtcccgagagcccaaggatatgaccacttttagatctgcttag

SEQ ID NO: 25934 - DNA, 1371 bp, synthetic construct
  misc_feature 1..1371: note = Description of Artificial Sequence: Synthetic coding sequence
  source 1..1371: mol_type = other DNA
atgcggctggcccggctgctgcggggcgccgccctggccggccccggccccggcctgagggccgcggggttttctcgaagtttttcgagcgacagcggtagttcgccagcttctgaacgtggagtgcctggccaggtggatttttatgcgcgattttcaccttcgcccctctctatgaagcagtttctggacttcggcagcgtgaacgcatgtgagaagactagctttatgtttctgcggcaggagctccctgtaagactggctaacatcatgaaggaaatctctctgctgccagataatctcctacgaactccatcagtgcaacttgtgcagtcctggtacatacagtccctgcaggaactgttggatttcaaagataaatctgccgaggacgcaaaggctatctatgaacgcccacgtaggacatggctgcaggtaagctccctttgttgtatggcttgcaagatgatcttcacagatacggtaatcagaattcgcaaccgccacaatgacgttattccaacaatggctcaaggagttattgaatacaaggagagttttggcgtcgatccggtcactagccagaatgtgcagtactttttggacaggttttacatgtcaagaatatctatccgcatgctactgaaccaacattctctcctgttcggtggtaaaggcaaagggtccccctcccaccggaagcacataggcagtattaatcccaactgtaatgttctggaggtgataaaagacgggtatgagaatgcaagacgcttgtgtgacctctactacataaatagccccgaattggagctggaagagttgaacgccaagtcccctggacaacccattcaggtggtatatgtgccttcccacctgtatcacatggttttcgagctgttcaaaaacgctatgcgcgccacaatggaacatcacgccaacagaggagtgtatccccccatacaagttcacgtcaccctgggtaatgaagaccttacggttaaaatgagcgatagaggaggcggcgtgccactgcgcaaaattgacagactcttcaattacatgtactctactgcgccgcggcctagggttgagacgtcgagggccgtccccttagccggctttggatatggtttgccaatatcccgtctctatgctcagtactttcagggcgatctgaagctgtattcgctggaggggtatggcaccgacgccgtgatctatatcaaagcgctgagtacagacagcatagaacggcttcccgtctataacaaggccgcctggaagcattataacacaaatcacgaagctgatgattggtgcgtcccttcgcgggaacccaaggatatgacaacctttcgcagtgcgtag

SEQ ID NO: 25935 - DNA, 1311 bp, synthetic construct
  misc_feature 1..1311: note = Description of Artificial Sequence: Synthetic coding sequence
  source 1..1311: mol_type = other DNA
atgcggctggcccggctgctgcggggcgccgccctggccggccccggccctggtctgagggcagccgggttctctaggtctttctctagcgactctggcagctcccccgcatctgagaggggtgttcccggccaggttgacttctatgcccggttttctcctagtcccctttccatgaaacagttcctggatttcgggtccgtgaacgcatgcgagaaaacctccttcatgtttctgagacaggaattacctgtgagattagccaacatcatgaaagaaatctccttattgccagacaatttactgcggaccccttccgtgcagttggtacagtcctggtatatccagtccttacaggaactgctcgattttaaggacaagtcagcagaagacgctaaagcaatctacgatttcactgataccgtgatacgtattcgcaataggcacaatgatgttattccgaccatggcccagggggtaatcgaatacaaagagtcttttggtgtggacccagtgacatctcaaaacgtgcaatactttcttgatagattctatatgtccagaatttccatccgaatgctactgaatcagcactcactattgttcggaggcaagggaaaaggaagtccttctcacaggaagcatatcggttccattaatcccaactgcaacgttcttgaggttatcaaagacgggtatgaaaatgcgcggcggctgtgtgacctgtactatatcaactctcctgaactggagcttgaggaactgaacgctaagtcaccaggccagcctatacaagtcgtgtacgtgccctcacacctgtatcacatggtctttgaactattcaagaatgctatgcgggctacaatggaacatcacgcaaatcggggagtctacccccccattcaggtccatgtgaccctggggaatgaagacctcaccgtcaaaatgagcgatcggggtggcggtgtcccattacggaaaatagaccggctgtttaactacatgtattcgacagccccacggcccagggtcgagacaagtcgcgccgtccccctagccggattcggatatggtcttcctattagccgtctgtacgcacaatattttcagggtgatttgaagctttatagtctggaaggttacggcaccgatgctgtgatctacatcaaagcactctcaaccgacagcattgagcgtctgcctgtctataacaaggctgcgtggaaacactacaacaccaaccacgaggccgacgattggtgcgttccatcccgggagccaaaagatatgacaacttttcgatccgcctag

SEQ ID NO: 25936 - DNA, 1083 bp, synthetic construct
  misc_feature 1..1083: note = Description of Artificial Sequence: Synthetic coding sequence
  source 1..1083: mol_type = other DNA
atgttcctgcggcaggagctgcccgtgcggctggccaacatcatgaaagagataagtctgctgcctgataatcttctgcgcacaccctcggttcagctggtccagagttggtacattcagtcactgcaggaactcctggacttcaaagataagtccgcagaagatgctaaagcaatctatgacttcaccgatactgtgattaggatccggaaccgccacaatgacgttattccaacgatggcccagggtgtgatcgagtataaagagagcttcggcgtggatcctgtgaccagccagaatgtgcagtatttcctcgatcggttctacatgtcgagaatatccatccgcatgttgctaaaccaacattctctcctcttcggaggtaaaggcaaaggttcaccctcacatcgcaagcacattggctctattaaccctaattgcaatgttctggaagtgatcaaagatggatacgaaaacgcaaggagactctgtgatttatactatattaatagtcccgagttagaacttgaggaattaaatgcaaagtcccctgggcaaccaattcaagtcgtatacgtcccatctcacttgtaccatatggtgttcgagttgttcaagaatgccatgagagcaacaatggaacatcacgccaatcgcggtgtttaccccccaatccaggttcatgtgactctgggaaacgaggacctcacagtcaaaatgagcgacaggggaggaggggtccctctacgaaaaatagatcggctgtttaattacatgtactctacagctcctagaccaagggtcgagaccagccgggccgtgccgttagctggtttcggatacggcctacccatatcacgtctgtacgcacaatacttccagggcgatctgaagctgtactcactggagggttatggcacagatgcagtcatctatatcaaggctctttctaccgactctatcgaacgccttcccgtttataataaggccgcttggaagcactacaatactaaccacgaggccgatgactggtgtgtcccgagtagggagccaaaggacatgacaacatttcgaagcgcatag

SEQ ID NO: 25937 - DNA, 846 bp, synthetic construct
  misc_feature 1..846: note = Description of Artificial Sequence: Synthetic coding sequence
  source 1..846: mol_type = other DNA
atggcccagggcgtgatcgagtacaaggagagcttcggcgtggaccccgtaacttcccaaaatgtgcagtactttcttgacaggttttatatgtccagaatctctattaggatgcttctcaaccaacacagtttgctttttggaggcaagggcaaagggtccccctcccacaggaagcacattggctcaattaatcccaattgtaacgtattggaggtgatcaaagacggctacgaaaacgcccggcgcctctgtgatctctactatatcaattcaccagaattagagctggaagagttaaatgctaagtccccaggtcagcctatccaggttgtctatgtgccgagtcatctgtaccacatggtcttcgagctgttcaaaaacgccatgcgggccaccatggaacaccacgccaaccggggcgtctatcctccaattcaggtgcacgtcactcttggtaatgaagatctgactgttaagatgtccgataggggaggaggtgtgcccctgaggaaaatcgataggctcttcaattacatgtacagcacggctcccagacctcgggtggagacaagtcgggcagtgccactagctggctttggttatggcttacccataagccgcttgtacgcacaatacttccagggagacctgaagctgtacagcttagaggggtacgggacggacgccgtgatctacatcaaggcgcttagcaccgacagcattgaacgcctgccagtatacaacaaggcagcttggaaacactacaacacgaatcatgaggccgacgattggtgcgtaccgagtcgcgaacccaaagatatgactacattccgctccgcatag

SEQ ID NO: 25938 - DNA, 1032 bp, synthetic construct
  misc_feature 1..1032: note = Description of Artificial Sequence: Synthetic coding sequence
  source 1..1032: mol_type = other DNA
atgaaggagatcaacctgctgcccgaccgggtgctgagcacccccagcgtccagctcgtgcagtcctggtacgtgcagtcactcctcgacattatggagtttctggacaaagaccccgaggaccatcggacgctttcacagttcacggacgccctagtgactatccggaatcgacacaatgacgtcgtgcccacgatggcacagggggttcttgagtacaaggatacatacggggatgatcccgtgtccaaccagaacatacaatacttcttagacaggttctatctcagccggatttctataaggatgctcattaaccagcacacactgatctttgacggatctacaaatcccgctcaccccaagcacatcgggagtattgaccctaattgtaacgtatcagaggtggtcaaagacgcgtatgatatggccaagttactgtgcgataagtattatatggcttcacctgatctcgagatccaggagatcaacgccgccaactccaagcaacccatacatatggtgtacgtgcctagccatctgtaccatatgctgtttgagctcttcaagaatgccatgcgagctacagtcgagtcccatgagtctagcttaatcctgcccccaatcaaagtgatggtggctctgggtgaggaagatctgtcaataaagatgtctgatcggggaggcggcgtgcctcttaggaagattgagaggcttttttcatacatgtactccaccgcgcccacccctcagcctggcactggtggtactcccctagccggcttcgggtatggattgccgatatccaggctgtacgctaagtattttcagggtgatttgcagcttttttcgatggagggattcggcaccgatgccgtgatttatctcaaagcactctccacggattcagtggaacggttacctgtctacaataagagcgcctggagacattaccaaaccatacaggaggctggcgactggtgcgtgccgagtacagagccgaagaacacatccacgtaccgggtgtcgtag

SEQ ID NO: 25939 - DNA, 1224 bp, synthetic construct
  misc_feature 1..1224: note = Description of Artificial Sequence: Synthetic coding sequence
  source 1..1224: mol_type = other DNA
atgcggtgggtgtgggccctgctgaagaacgccagcctggccggcgcaccgaagtacatcgagcacttctcaaagttctctccgtcccctttgtccatgaagcagtttttagactttgggtcctcaaacgcttgtgaaaaaacaagttttacatttttgcgacaggagctgccagtgcgattggccaacataatgaaagaaatcaatctcctccctgatcgagttctgagtacaccttccgtgcagctcgtgcaatcttggtacgtgcagtcccttttggacataatggagtttcttgacaaggaccccgaagatcaccgcacactgagccagttcacggacgcgctggtgactatacggaaccggcataatgatgtcgtccccacgatggcacagggggttcttgaatataaagacacttacggcgatgacccagtcagcaaccaaaatatccaatattttctggaccgattctacctctcgcgcatctccatccgaatgctgattaaccagcacacactcatttttgacgggtccacaaaccccgcacaccctaaacacatcggaagcatagaccccaactgcaacgtttcagaggtagtcaaagatgcatatgacatggcaaagctgctatgcgacaagtattatatggccagtccggatctcgagattcaggagattaacgctgccaatagcaaacagcctattcatatggtatacgtccctagccacctctatcacatgttgtttgaactctttaaaaacgctatgcgcgccactgtagaatcacatgagagctcactgatcctacctcctatcaaagtaatggttgctttgggagaggaggacctcagcataaagatgtctgatcggggaggcggcgtccccctgcggaaaattgagaggctgttcagctacatgtatagtactgctcccactcctcagcccggtacggggggaacccccctggccggcttcggatacggacttcctatctcgcgactatatgcaaaatatttccaaggcgatttacagctcttttctatggaagggttcggtaccgacgccgtgatctacttgaaggcactgtcaacagacagcgtcgaacggctgcctgtttacaataagagcgcttggagacattaccagacaattcaagaggctggggactggtgtgtgccttctaccgagcccaagaataccagcacttacagagtgagctag

SEQ ID NO: 25940 - DNA, 849 bp, synthetic construct
  misc_feature 1..849: note = Description of Artificial Sequence: Synthetic coding sequence
  source 1..849: mol_type = other DNA
atgcccctgctgacccagcagatccaggacgaggacgaccagtactcccttgttgctagcttggataacgtacgaaacctaagcacaatcctgaaggcgattcacttccgggaacatgctacctgctttgccaccaagaatggcatcaaggtgaccgtcgaaaatgcaaaatgtgttcaagccaacgcttttatccaagccgggatcttccaagagtttaaggtacaggaagagtccgtcacgttccggatcaatctgactgtgctccttgattgtctttcaatttttggatcatctcccatgccggggaccctaacagccctgagaatgtgttaccagggctatgggtatcctctgatgctctttttggaggaagggggtgtagtcaccgtatgtaagattaacacacaagaacctgaggagacactggacttcgacttctgttcaacgaacgtgattaacaagataatcctgcaatccgaagggctgagggaagccttctccgagttagacatgactagcgaggtgcttcagattacaatgagcccagacaaaccatatttccggctgtccacattcgggaatgccggtagcagtcacctggattaccctaaggattctgatctgatggaggcatttcactgtaatcagacccaggtcaatagatataaaattagcttacttaagcctagcacaaaagcgctcgtcctctcctgtaaagtgtccataagaactgacaatcggggattcctgagtctgcaatacatgatccgcaatgaggatggccagatctgctttgtggagtactattgttgccctgacgaagaggttcccgaaagcgaaagctag

SEQ ID NO: 25941 - DNA, 849 bp, synthetic construct
  misc_feature 1..849: note = Description of Artificial Sequence: Synthetic coding sequence
  source 1..849: mol_type = other DNA
atgcccctgctgacccagcagatccaggacgaggacgaccagtacagcctggtggcgagtctggataacgtgcggaatttgagtactattctcaaggccatacattttagagagcacgctacatgctttgctaccaaaaatggaatcaaagtcactgtggagaatgctaaatgtgttcaggctaatgcattcatccaggcaggcatttttcaagaattcaaggtgcaggaggagtccgtgacatttcgcatcaaccttaccgtgctgctggactgcctcagcatctttggatctagcccaatgcccggaactctgactgccctaagaatgtgctatcaggggtacggttaccctctgatgttgtttctggaagaaggtggagtcgtgactgtctgcaaaattaatacccaggaaccagaggaaaccctggatttcgatttttgttctacgaatgtcatcaacaagatcatcctccagtctgagggactgagagaggcctttagtgaattggatatgacctcagaagttctgcagattactatgagccctgacaagccatatttccggctgagcaccttcggcaatgcaggctcaagccacttggactaccccaaggattccgatctaatggaagccttccattgcaatcagacacaggtgaataggtataaaatctctctcctgaaacctagcaccaaagcacttgttcttagctgcaaagtgtcaatacgtaccgacaaccgcgggttcctgagcctccaatatatgatcaggaatgaagacggtcagatttgctttgtggagtattattgttgccccgacgaagaggttcctgagtcggagagttag

SEQ ID NO: 25942 - DNA, 741 bp, synthetic construct
  misc_feature 1..741: note = Description of Artificial Sequence: Synthetic coding sequence
  source 1..741: mol_type = other DNA
atgcccctgctgacccagcagatccaggacgaggacgaccagtactcattggtcgccagcttagataatgtcagaaacttgagcaccatattaaaagccattcacttcagagaacacgccacatgcttcgccaccaaaaacgggataaaagtgacggtggagaatgccaagtgtgtccaggcaaatgccttcatccagggcacacttactgcactgagaatgtgctatcaagggtatggataccctcttatgttgtttctcgaagaaggtggcgtggtgactgtctgcaaaattaacacccaggagcctgaagagactttggacttcgacttctgcagcactaacgtgatcaataaaattatcttgcagtctgaagggttaagggaggccttctctgaactggatatgactagcgaggtgttgcagatcactatgtcccccgacaagccgtattttagactgagcacattcggcaacgcaggaagctcgcatctagattaccccaaagactccgacttgatggaggcatttcactgcaatcaaactcaggtgaatagatataagatctcactactgaaaccctccacaaaggctttggttctctcttgcaaagtgagcatccgaactgacaaccgtgggttcctctcacttcagtacatgatccggaacgaagatggccaaatatgctttgtcgagtactactgttgcccggatgaagaggtgcccgagtccgaatcctag

SEQ ID NO: 25943 - DNA, 1755 bp, synthetic construct
  misc_feature 1..1755: note = Description of Artificial Sequence: Synthetic coding sequence
  source 1..1755: mol_type = other DNA
atgaaccagcacgagctggccgtgcacaagaagaagatcgaggaggtggaaacttggctcaaagctcaggtactggagcggcagccgaaacagggtgggagcatcctgctcatcactgggccccctggatgtgggaaaactacaactctcaagatcctctcaaaagagcatggcatccaagtgcaagagtggatcaatcctgtgcttccagatttccaaaaggacgattttaaaggcatgttcaataccgagtccagttttcatatgttcccataccagagccaaatcgctgtgttcaaggagttcctcctgcgggccacaaagtacaataaactgcagatgctgggagacgatctgaggaccgacaagaaaatcatcctcgtggaggacctccctaaccaattctacagagatagtcatacactccacgaagttctcaggaagtacgttagaatcggccggtgtcctctcatctttataatctccgacagcttgtcaggggataacaatcagcgactcctatttcccaaggaaatccaggaggagtgcagtatttccaacataagctttaatccagtggcccccacaatcatgatgaagttcttgaacagaatcgtcacaatcgaggccaacaagaacggtggaaagatcacagttcctgacaagacctcactcgagctgctctgccaaggctgcagcggcgacatacgtagcgctatcaacagtctgcaattctcctcctctaaaggagagaataatttacggcctagaaagaagggcatgtccctgaaatccgatgccgttttgagtaagtctaagagaagaaagaaacccgacagagtgttcgaaaatcaggaagtccaggcaataggaggcaaggacgtttcactctttctatttcgcgctctgggcaagatactgtactgcaagagagcctccctcacagagctcgacagtccccgattaccatcccacctcagcgagtatgagcgggacactctgctagtggaacctgaggaagttgtggaaatgagccatatgcccggggatctgttcaacctctacctgcatcagaattatattgacttctttatggagattgatgatattgtgcgggcatctgagtttctgtcctttgcagacatactgtccggagactggaatacaaggtccctactccgggagtactccacatccatcgcaacacgaggcgttatgcactccaataaagcgaggggatacgctcactgccagggcggggggtcttcgtttcggcccctgcacaaaccacagtggttcctcatcaacaagaagtatagggaaaattgccttgcggccaaggccctatttcctgatttctgtctcccggcactttgtctgcaaacacaactcctcccctacctggctttgcttaccatccctatgaggaaccaggctcaaatctcattcattcaggacatcggacgcctgcccttgaaacgacacttcgggagactcaaaatggaagcgttgacagatcgggagcatggtatgattgacccagattcgggcgacgaggcacagctcaatggtggccattccgccgaggaaagcttgggggagccgacccaggccacagtgcccgagacatggtccctcccacttagccagaacagcgcttctgagctgcccgcatcacagcctcagcccttttccgcccagggcgatatggaagaaaacattattattgaagattacgagtccgatgggacctag

SEQ ID NO: 25944 - DNA, 2013 bp, synthetic construct
  misc_feature 1..2013: note = Description of Artificial Sequence: Synthetic coding sequence
  source 1..2013: mol_type = other DNA
atgaaccaggtgaccgactgggtggaccccagcttcgacgacttcttggaatgcagtggagtatctactattacagccacatccctgggcgtcaataactctagccaccgcagaaagaacggaccatctaccctggagtccagtagattccccgctaggaaacgagggaaccttagttctcttgagcagatctatggcctcgaaaactctaaagagtacctttcagagaacgaaccttgggtcgacaagtacaagcctgaaacacaacacgagctggcggtccataaaaaaaagatagaggaggtggagacatggctcaaagcacaggttctcgagcgacaacccaaacaggggggcagcatcttgctgatcactggaccacccggctgcggcaagactactaccctcaagatactgagtaaggaacatgggatccaggtgcaggagtggattaatccagtcctgccagactttcaaaaggatgactttaagggtatgtttaatacagagtcgtcttttcatatgtttccctatcaaagccagatcgctgtgtttaaggagttccttctaagagcgaccaagtacaacaaactgcaaatgctgggcgacgatctgaggacagataagaagatcatcctcgtcgaagatctgcctaaccaattctaccgggattctcatacgctacacgaggtccttcggaagtatgtccggatagggcgatgtcctttgatctttattatttctgattccctgagtggcgataataatcagcggctgctgttcccaaaagagatccaggaggagtgctcaatctcaaacatctccttcaaccctgtggctcctactattatgatgaagtttcttaacaggatcgttactatagaggctaataagaatggcgggaagataactgtgccggataaaacatctttggagttactgtgtcaagggtgtagcggagacatccgcagcgctatcaattcgctccaattttcttcatcaaagggcgagaacaatctgcgcccgagaaaaaagggaatgtccttgaagtcagacgccgtgctaagcaagagcaagagaagaaagaagccagatagggtgttcgaaaatcaggaagtgcaagccatcggcggcaaggacgtgagcctgtttctctttcgggccctgggcaagatcctgtattgtaaacgggccagtctaaccgaactcgactcgccccgtctgcccagccaccttagcgaatacgaaagagatactttactggtggaaccagaggaagtggtggaaatgtcccacatgccaggagacctgttcaatctgtatctgcaccagaattatattgattttttcatggagatcgacgacattgtgagagctagcgagttcctctcttttgctgacatcttatccggcgactggaataccaggagtttgttaagggagtactcaaccagtatcgccactcggggggttatgcatagtaacaaggcccgaggatatgcacactgtcagggtggcggaagttcctttcggcctttgcataagccccagtggttccttattaacaagaagtatagagagaattgtctcgccgcaaaggctttgtttcctgatttctgtctgccagccttatgcctccagacccagcttctgccgtatctggctcttcttacaatccctatgcgaaaccaggcacaaatttcatttattcaggacattggccggctacctctgaaacgacatttcggaagactgaagatggaggccctgaccgaccgcgaacacgggatgattgaccccgactcaggagacgaagcccagctcaacggtggacactctgcagaggagagcctaggggaaccaacacaggccaccgtgcctgaaacctggagcctccctctcagccagaattcagctagtgagctgcccgcttctcagccccaaccgttctcagcccagggagatatggaggaaaatatcattatcgaggactacgagtctgatgggacctag

SEQ ID NO: 25945 - DNA, 2013 bp, synthetic construct
  misc_feature 1..2013: note = Description of Artificial Sequence: Synthetic coding sequence
  source 1..2013: mol_type = other DNA
atgaaccaggtgaccgactgggtggaccccagcttcgacgacttcctggaatgctctggagtgagcacaatcacagctacgagtctgggggtgaacaatagctctcaccggcggaagaacgggccctccacgctggaatcatcaagatttcccgcccgcaagcgggggaacctgtccagcctggaacaaatatacgggctggagaactcaaaagagtatctgtctgagaatgaaccctgggtggataagtataagccagagacccagcatgagcttgctgttcacaagaagaagatagaggaagtcgaaacctggctgaaagcacaggtcctcgagagacagcccaaacagggaggaagtatcctgctgatcactggccccccaggctgcgggaaaacgacaactctcaagatactatccaaagagcacggcatccaggttcaggaatggataaaccccgtccttcccgactttcaaaaagatgacttcaagggaatgtttaataccgaatccagctttcacatgttcccttatcagagtcagatcgcggtatttaaagaattcctcctgagggctacaaaatacaacaaactccagatgctgggggatgacctgcggactgacaaaaaaatcattctcgttgaagacctgcctaaccaattctaccgggatagccataccctccacgaagtgctccgcaagtacgtgcgtatcggccgctgccctctaattttcattatttccgacagcttgagtggcgacaacaaccagcggctgcttttccccaaagagatccaggaagaatgctccatctcaaatatctctttcaaccctgtggctccaacgattatgatgaaatttctgaatcgcatcgtgacaatcgaggcaaataagaatgggggtaaaattaccgttcccgacaaaacatcgttggaactattatgtcaaggctgctcgggcgacatcaggagcgccataaatagcctccaattctcctcgagcaaaggtgagaacaacctcagacctcggaaaaaaggcatgtctctcaaatctgacgcagttctgagtaaaagtaaacggagaaagaaaccggatagggtctttgaaaaccaggaggtccaggcaattggaggaaaagacgtctccctgttcctgtttagggctctgggcaaaattctctattgcaaaagagccagcttaaccgaactggattcacccaggttaccatcacatttgtcagagtatgagagagatactctactggtggagccggaagaagtggtggagatgtcccatatgccaggcgatctattcaacctatatctacaccagaattatattgacttcttcatggaaatcgacgacatagtccgagcctctgagttcttgagctttgctgacatcttaagcggcgactggaatacccgcagtcttctcagggagtattctacctccatcgcaacacggggcgttatgcactcaaacaaagcccgggggtacgcgcactgccagggcggaggttcttcttttcgaccacttcacaagccacagtggttcctgataaacaagaagtatagagagaactgcctcgccgctaaggctttgttccctgatttttgtttgccagctttgtgcctccagacgcaactcctgccatatttagcattgctgacaattcctatgcgcaaccaggcgcagatcagttttattcaagacatcggacgcttgccgctgaaaagacatttcgggaggctgaaaatggaggccctcactgaccgcgagcacggtatgattgatcctgactctggggacgaagcccaacttaatgggggccactcggccgaggaatccctcggcgagcctactcaagccaccgtgccagagacatggtctctgcctttgtcccagaactcagcttcagaactgcccgccagtcaacctcagcccttttctgcgcagggtgatatggaggaaaacataattatcgaggattacgaatcagatgggacttag

SEQ ID NO: 25946 - DNA, 2013 bp, synthetic construct
  misc_feature 1..2013: note = Description of Artificial Sequence: Synthetic coding sequence
  source 1..2013: mol_type = other DNA
atgaaccaggtgaccgactgggtggaccccagcttcgacgacttcctagaatgtagcggagtttctaccataacagccaccagcctgggtgttaataattcaagccatcgccggaaaaatggaccttccacactagagtcttcccgtttccctgcccggaaacgcggtaatttgtcctctttggagcagatttatgggcttgagaatagcaaggaatatctttcagagaatgaaccttgggttgacaagtataagccagaaacacagcacgaactggctgtccacaaaaagaagattgaggaagtggagacctggctaaaagctcaggtgttggaaaggcagcctaaacagggaggttcaattctgctgattacagggccgcctggctgtgggaaaaccactacactcaaaatcctaagtaaagaacatggcatccaggtgcaggaatggattaaccctgttctccccgatttccagaaagatgattttaaaggcatgtttaacaccgaaagtagcttccatatgttcccatatcagagtcagatcgcagtattcaaggagttcctgctgagggccaccaagtacaacaagttacagatgctgggcgatgacctgcgtacagacaagaaaatcattctagttgaggatctgcctaaccagttctatagagactcacacactctgcatgaagtcctccggaagtacgttcggatcggtagatgtcctctgatatttatcattagcgattcccttagcggcgacaacaatcagcgcctcttattccccaaagagatccaagaagaatgcagtatcagtaacatcagttttaacccggtggctccaaccattatgatgaagttcctaaatcggatcgtaaccattgaggcaaacaaaaacggaggtaagatcacagtgcctgataaaaccagccttgagctgttgtgtcagggatgctcaggtgacatccggtcagctatcaactctcttcagttcagtagtagtaagggcgaaaacaacctccggcccaggaaaaaaggtatgagcctgaagagtgatgccgtgttatctaagtctaagcgtagaaaaaaaccagaccgggtgttcgaaaatcaggaggtgcaagcaattggaggaaaggacgtgagtctctttttattcagagcattgggtaagatcctatactgcaagcgcgcatctctgaccgagttggatagtccaagactcccgtcacacctgtctgagtatgagcgggatactctactggttgaaccagaagaggtcgtggagatgtcccatatgcccggagacttgtttaatctttacctgcatcaaaactatatcgacttcttcatggaaatcgacgacattgtgagagccagcgaattcttgagctttgcagacattctgagtggggattggaatacccgctctttgctccgagaatactcaaccagtatcgctacgaggggagtgatgcactctaataaggcgcggggctacgctcactgccagggtggagggtcatccttcaggcccctccacaagccccaatggtttctcattaataagaagtaccgggagaattgtttggccgctaaggctttattcccagatttctgtctgcccgccctctgcttgcagacacagctgctgccctatctggccctcctgactatacccatgaggaatcaggcgcagatcagctttattcaggacatcggtaggctgccactgaagaggcattttgggagactgaagatggaagcgctaactgaccgggaacacgggatgattgaccctgactccggagatgaggctcaactcaatgggggtcactccgctgaggaatctcttggggaacccacacaggccactgtgcctgagacctggtctctccctctgagccagaatagtgcgtcagaattgcctgctagtcagccccaaccattttcagcgcaaggcgacatggaggaaaacatcattatcgaagactacgagtctgatggtacctag

SEQ ID NO: 25947 - DNA, 2013 bp, synthetic construct
  misc_feature 1..2013: note = Description of Artificial Sequence: Synthetic coding sequence
  source 1..2013: mol_type = other DNA
atgaaccaggtgaccgactgggtggaccccagcttcgacgacttcctggagtgctcgggtgttagcaccataaccgcaacttctttgggggttaacaacagtagccatagacggaagaatggtcctagcacattagagtcaagcagatttccagctcgtaagcgcgggaacctgagttcgctggagcagatttatgggctagagaatagtaaggaatatctttctgagaatgaaccctgggtggacaagtataaacctgaaacccagcacgagctagctgtacacaagaagaagatagaggaagtggagacatggcttaaagcacaagtcctggaaaggcagccaaagcaagggggcagtatcctcctgattacgggtccgcctggatgcggcaagacgacaaccctgaagatactctccaaagaacatggcattcaagtgcaggaatggatcaatcctgttctacccgatttccagaaagacgattttaaggggatgttcaacaccgagagctcctttcatatgttcccataccagagtcagattgcagtcttcaaagagtttctgctccgggcaaccaaatacaacaagctccagatgctgggagatgacctgcgcacagacaagaagataatactcgtagaggatctgcccaaccagttttaccgggactcacatacgttacacgaagtcttgcggaagtatgtgaggattgggcgctgccccctgattttcatcatctccgatagcttatctggcgacaataaccaaaggctgctgttccctaaggagattcaggaagaatgcagtatttcgaatatctcctttaaccctgtcgcccctacaatcatgatgaaatttctgaatcggatcgtcacaatcgaagcaaataaaaatggtgggaagattactgtacccgacaagactagtttggaactgctgtgtcaggggtgttcgggcgacatccggagtgccataaatagcctgcagttttctagcagcaagggggaaaacaatctgaggcctaggaaaaagggtatgtcattaaaatctgacgcagtcctgtcaaaatccaagcggcggaagaaaccagaccgtgtttttgaaaaccaggaagtgcaggccatagggggcaaggatgtatcattatttctattccgcgctttgggcaagattttatactgcaagcgggcttccctgaccgagctcgacagtcctcgcctcccgtctcatctgtctgagtatgaacgcgataccctgctggttgaaccagaggaagtggttgagatgagtcatatgcccggggatctctttaatctatacctacaccaaaactacatagattttttcatggagatcgacgacatcgtaagggcctccgagttcctgtctttcgctgatatcttgtcgggcgattggaatacaagaagccttcttagagaatactccacttctatagctacacggggagtgatgcattccaataaggctaggggctacgcccattgccagggaggaggaagttcgttccggcccctccataaaccccagtggtttctcatcaacaagaaatatagagaaaactgcttggctgcgaaagccctgttccccgacttttgcctgccagcgctgtgcctgcagacacagttgcttccataccttgcccttttgaccataccgatgagaaatcaagcgcagatctcattcatacaggatatcggcaggctgccactaaaaagacactttggaagactgaaaatggaggccctgacggatagagagcatggaatgattgaccccgactcaggcgatgaagcccaactaaacggcggtcatagcgctgaggagtccttaggggagccaacgcaagcgactgtcccagagacatggtctttgccactgtcccagaattccgcctctgaactgccagctagtcagccgcaaccttttagtgctcagggtgatatggaagagaacataatcatcgaggattacgagtcagacggaacttag

SEQ ID NO: 25948 - DNA, 1518 bp, synthetic construct
  misc_feature 1..1518: note = Description of Artificial Sequence: Synthetic coding sequence
  source 1..1518: mol_type = other DNA
atgttcaacaccgagagcagcttccacatgttcccctaccagagccagatcgcagtcttcaaggagtttttactgcgggctaccaagtataacaaattacagatgctaggggatgacctgcgcacagataaaaagatcattcttgtggaagacctgcctaaccagttctaccgggattcgcacacactccatgaagtgctcaggaagtacgttcgaatcggcaggtgtcccttaatcttcatcatctccgattcactctcaggtgataataaccagaggctcctgttcccaaaggagatccaggaggagtgtagcatatccaacataagcttcaatcccgtcgcgcctacaattatgatgaagtttctgaatcgtatagttaccattgaggccaataaaaatggcggcaagattaccgttcccgataagacatctctcgaacttctgtgccaaggctgcagcggcgatatccgtagtgcaatcaattctctgcaatttagtagcagcaaaggcgagaataacctgcgcccccgcaaaaaaggcatgtctctcaaaagtgacgctgtgttgagcaagagtaagcgaagaaagaagccagaccgggtgttcgagaatcaggaggtacaggcaatcggtggaaaagatgtcagtctgtttctgttcagagcactggggaaaattctttattgcaagcgtgcctctctgactgagcttgactccccacggctgcctagccacttgtcagaatatgagcgcgatactctgctggtggagcccgaagaggtggtggagatgtcacacatgcccggagacctgttcaatttgtatctgcaccagaattatattgacttctttatggaaatcgacgatattgtccgggctagcgaattcctgagcttcgcagacatcctctccggtgattggaacacgcgctctctgctgagagagtactcaacctccatcgctaccaggggggtcatgcactccaacaaagcccgaggctatgcccactgtcagggcgggggctctagcttcagaccattgcacaaaccacagtggttcttgatcaataaaaagtatcgcgaaaattgtcttgcagccaaagcgttgtttcccgatttctgcctgccagccttatgcctccagacgcagctgcttccctacctcgccctgttgacaatcccaatgcggaatcaagcacagataagcttcatacaggatatcggccgactgcctctgaaaaggcacttcgggagactcaagatggaggccctgaccgacagagagcatggaatgatcgaccccgacagcggcgacgaagctcagcttaatggcggacactccgccgaggaatctctcggggaaccaactcaagctaccgtccctgagacttggtccctgcctttgagtcagaactcggccagtgagctccccgctagccagccccagccattcagcgcacaaggagatatggaagagaatattattattgaggactatgagtctgacggaacctag

SEQ ID NO: 25949 - DNA, 2013 bp, synthetic construct
  misc_feature 1..2013: note = Description of Artificial Sequence: Synthetic coding sequence
  source 1..2013: mol_type = other DNA
atgaaccaggtgaccgactgggtggaccccagcttcgacgacttcctggagtgcagtggcgtgtctacgatcaccgcgacttctctgggtgtgaacaattctagccacagaagaaagaatgggccctccaccctggaaagctctagatttcccgctcgtaagagaggcaacctgtcatccttagaacagatctacggccttgagaactcaaaagagtacttgtcagagaacgagccttgggtagataaatataagccagaaacgcaacatgagttggccgtgcataagaaaaaaatcgaggaggtcgaaacttggttaaaagcccaggtcctagagcgccagcccaagcaggggggcagcatccttctgatcaccggtcctccggggtgcgggaagactactaccctgaaaatcctgagtaaggagcatgggatccaggtacaggaatggattaacccggtgctacctgattttcagaaggatgatttcaagggcatgttcaatacagaatccagtttccacatgttcccttatcagtctcagatcgccgtgttcaaggagtttctgcttcgcgctaccaagtataacaagctgcaaatgttgggagacgaccttcgcaccgataagaaaataatcttggtcgaggatctccccaatcagttctatcgagatagtcatactttgcacgaagtcttgaggaagtacgtgcggatcggccgatgtcccctaatcttcataatttctgactcactgtcaggggacaacaaccaaagactgcttttccctaaggaaattcaggaagagtgttctatttctaacatatccttcaatccggttgctccaaccattatgatgaaatttctaaatcggatcgtcacaatcgaggccaataagaatggcggcaaaatcacagtgcccgacaagacgagtctcgagctgctctgccagggctgttccggtgacatccggtcggctattaactccctccagttttcaagctctaaaggagaaaacaacttacggccccgtaagaaaggtatgagcctgaaatccgacgctgtgcttagcaaaagcaagcgtcggaaaaaacccgacagagtgttcgagaaccaggaagtccaagccattgggggcaaagatgtgagcctgttcctcttccgcgcactgggtaagatcctctattgcaaaagagcctcgctgacggaactagacagcccacgcttgccctcccatctatctgaatacgaaagggacacactgctagtcgagccagaggaagtggttgagatgagtcacatgcccggcgacctgtttaatctgtacctgcaccagaattatatcgactttttcatggaaatagatgacatcgtgagagccagcgaattcctgagttttgcggacattttgtccggtgactggaatacgagatccttgttgcgcgagtatagtacgtctatcgcaacacgcggcgttatgcatagcaacaaggccagggggtatgctcattgtcaggggggagggtcatctttccggcctctgcacaaaccacaatggttccttattaacaagaaataccgggaaaattgtctcgcagccaaggccctgttccctgacttctgtctccccgcgctgtgtttacagacacaactgcttccgtacctagcccttctcaccatcccgatgcgtaatcaggctcagatctcattcatccaagatatcggaagattacctctgaagaggcactttggtagattgaaaatggaagccttaacagacagagagcacgggatgatcgaccctgattctggagacgaagctcagctcaacggaggccacagcgcggaggagtcactcggcgaacccacccaggcaacagttccggagacttggagtctgcctttatctcagaattctgcctccgaactcccagctagccagcctcagcccttctctgcccagggcgatatggaggaaaacattatcattgaggactacgaaagcgacgggacatag

SEQ ID NO: 25950 - DNA, 2046 bp, synthetic construct
  misc_feature 1..2046: note = Description of Artificial Sequence: Synthetic coding sequence
  source 1..2046: mol_type = other DNA
atgagcaagaccttcctgcggcccaaggtgagcagcaccaaggtgactgattgggtggatccatcattcgacgattttctggaatgctcaggagtaagcaccataacggctacttccctaggcgtgaacaattcttctcatcgtagaaagaacggaccctccacacttgagtcatctcgatttcctgcccggaagagagggaacctgagttctctggaacagatttacggcttggagaacagtaaagagtacctgagtgagaatgaaccatgggtggacaagtacaaaccggaaacacagcatgaactcgcagttcacaaaaagaagatcgaagaggtggaaacctggttgaaagcccaggttctcgagagacagccgaaacaggggggttctattcttctgattaccggcccgcctggatgtggcaaaacaacaaccttgaaaatactgagcaaggagcacggtatacaggtgcaggaatggattaatcccgtgctaccggacttccagaaagacgattttaagggcatgttcaataccgagtccagttttcacatgttcccttaccagtcccagattgctgtgtttaaagaatttctcctaagagccactaagtacaataaactccaaatgttgggggatgacctgcgcaccgacaaaaaaattattctcgtcgaagatttgcctaaccagttctaccgggactcccacaccctccatgaggtgcttcgaaaatacgtccggattggccggtgtcccctgatttttatcatcagtgattccctctcgggagacaataaccagcgcctgctcttcccaaaagaaatacaggaggagtgctcaatcagcaatataagttttaaccccgttgcacctacgataatgatgaagtttttgaaccgtatcgtcaccattgaagctaataagaatggtggaaagattacagtgcccgacaagaccagcctcgagttgttgtgccagggctgctctggtgatatacgcagtgcaattaactcactacagttctccagttcgaaaggggaaaataatctgagacctaggaaaaagggaatgtctctgaagtccgacgctgtcctcagtaaatcaaagcgccgaaaaaagccggacagggtcttcgagaaccaggaggtacaggcaatcggcgggaaggacgtcagcctatttctctttagagccctgggcaagatactctattgtaagagagctagcctgacggagctagacagccccagactgccctcacacctcagcgagtacgaaagggacactctgttggtggagcctgaagaagtagtcgaaatgagccatatgccaggcgacttgttcaatctctatcttcatcaaaactatatcgacttcttcatggaaattgacgacattgtgcgggcatcagagtttctcagcttcgcagacatcctgagcggagactggaacaccaggtctttactcagggaatattccacctccatcgcaacacgaggtgtcatgcacagcaacaaggctagaggctacgcacactgtcaggggggaggctcgtcgtttcggccgctccataaaccccagtggttccttattaataagaagtaccgggagaactgcctagccgctaaggctctgttcccagatttctgccttccagccttgtgcctgcagacgcagctgctgccatacctggcccttctgactattcctatgcgcaaccaggcccagatcagctttatccaagatattggccggctaccccttaagcggcatttcggcaggctgaagatggaagctctcactgaccgcgagcatggtatgattgacccggatagtggagatgaagctcaactgaacggaggacacagcgcagaggagagcctgggagaaccaacccaggctacagtccccgaaacatggtcgctgccactttcccagaattctgccagtgagctccctgcttcacagccacagcctttttctgcccagggagacatggaggagaacatcattatcgaggattatgaatcggacggtacttag

SEQ ID NO: 25951 - DNA, 510 bp, synthetic construct
  misc_feature 1..510: note = Description of Artificial Sequence: Synthetic coding sequence
  source 1..510: mol_type = other DNA
atgaaccaggtgaccgactgggtggaccccagcttcgacgacttcctagaatgtagcggcgtctctacaatcacagcaacaagcctgggggtgaacaactcgagccatcggcggaaaaacggaccctctaccctggagagttccagatttccagctcgtaaacgcgggaatttgagctcactagagcagatttacggactggagaatagcaaagaatatctgtcagagaatgagccatgggtggataaatacaaaccggaaacacaacacgaactcgctgtgcacaagaagaagatcgaggaagtggagacatggctcaaggcccaggtgctggagagacagcctaaacagggcggttccatactcctgataactgggcccccaggttgcggcaaaactacaacgttaaagattttaagtaaggaacacggaatccaagtgcaggagtggataaacccagtactgcccgacttccaaaaggacgatttcaagggcatgtttaacacctag

SEQ ID NO: 25952 - DNA, 66 bp, synthetic construct
  misc_feature 1..66: note = Description of Artificial Sequence: Synthetic coding sequence
  source 1..66: mol_type = other DNA
atgaaccaggtgaccgactgggtggaccccagcttcgacgacttcctggagtgcagtggagtctag

SEQ ID NO: 25953 - DNA, 2046 bp, synthetic construct
  misc_feature 1..2046: note = Description of Artificial Sequence: Synthetic coding sequence
  source 1..2046: mol_type = other DNA
atgagcaagaccttcctgcggcccaaggtgagcagcaccaaggtgaccgactgggtcgaccccagcttcgacgactttctggagtgttccggcgtctccacaatcacggccacatctctgggagttaacaattctagtcaccggagaaagaatggcccaagcacactggaatccagcaggttcccagcccgcaaaagaggaaaccttagttctctagaacagatttacgggttagaaaactccaaggagtacctctcggaaaatgaaccctgggtggacaaatacaaacctgaaacccagcatgagctggctgtacacaagaaaaagatcgaagaggtagagacctggctgaaagcccaagtgctagagcgccagcccaagcagggggggtctattttgctcatcacaggacctccaggctgcggaaaaaccacaacactcaaaatactgtcaaaggaacatggcattcaagttcaggagtggattaaccctgtcctcccagattttcaaaaagacgattttaagggtatgttcaataccgaaagtagcttccatatgttcccttatcagagccagatcgcggtgttcaaggaatttcttctgcgcgccaccaaatacaacaagctacagatgttgggcgacgatctccgcactgacaaaaagattatcctcgtggaagatctgcccaatcagttttatcgcgattcgcacacgctccacgaggtcctgagaaagtacgttcgaattggccggtgcccactgatcttcattatctctgatagcttaagcggcgacaacaatcaaagactattgttcccaaaagaaatccaggaggagtgtagcatctcgaacatctccttcaatcctgtcgcccccactattatgatgaagtttctcaatcgcattgtcacaattgaagccaacaaaaacggcggtaaaattaccgtgccagacaaaacctcacttgaactgctctgtcagggctgcagtggtgatataagaagcgccatcaactcacttcagtttagttcttcgaaaggggagaataacctgcgcccacggaaaaagggaatgtcgctgaaatctgacgctgtgctttctaagtccaagcgtagaaagaaacccgaccgagtgttcgaaaaccaggaggttcaggctatcggcggaaaagacgtttcactctttctgtttagggctcttggcaagattctttattgtaaaagagccagcctgactgagctagacagcccccggctcccctctcacctcagcgaatatgagcgcgacacattgttagtcgaacctgaagaggtggtggaaatgtcccacatgcctggagatctctttaacctgtacctacatcagaactacattgacttttttatggagatcgacgatatcgtgagggcctctgaatttcttagtttcgcagatatattaagcggcgactggaacacccgctcgttacttcgggaatacagcacaagcatcgccacccgtggagtgatgcactctaacaaagcaagggggtacgcccactgtcagggtggcggatcgagctttagaccactgcataaacctcagtggttccttattaacaaaaaatacagggagaattgtcttgctgccaaggcacttttccctgacttttgtctccctgcattgtgtctgcagacccagctcctgccctatttggcactactaactatccccatgaggaatcaagctcagatttctttcatccaggatattggtcgcctgccgctgaagagacattttgggaggctcaaaatggaagcactcactgatcgcgagcatggcatgatcgaccccgattcgggtgatgaggctcagctaaatggaggccactccgcagaagaatcactcggcgaaccaacccaggctacagtacctgagacatggtcactgcctttgagccaaaattcggcttccgaactccccgcaagccaaccgcagcccttctctgcccagggagacatggaagagaacatcatcattgaagactatgagtctgatggcacatag

SEQ ID NO: 25954 - DNA, 1518 bp, synthetic construct
  misc_feature 1..1518: note = Description of Artificial Sequence: Synthetic coding sequence
  source 1..1518: mol_type = other DNA
atgttcaacaccgagagcagcttccacatgttcccctaccagagccagatcgcagtctttaaggaattcttgttgcgggccactaagtataataagttgcagatgcttggcgacgacttacggactgataagaagatcattttggtcgaagatttacccaaccagttctatcgggacagtcatactctccacgaggtgctgcggaaatacgtgagaattggacgatgtccgttgattttcatcatcagcgactccctcagcggcgacaataaccagaggcttctcttccccaaggagatccaggaggaatgttccattagtaacatctctttcaatccagtggcccccacaatcatgatgaagttccttaaccgcattgttaccattgaggccaacaaaaacggaggtaaaataaccgtgcccgacaaaacttctttagagctgctctgtcaagggtgctccggtgacattcggtctgctattaacagcctccagttctcctctagcaagggggagaacaatctgaggccacggaaaaaggggatgtctctaaagagtgatgctgtactgagcaaaagtaagagaagaaagaaacccgatagggtattcgagaaccaggaagttcaagcaataggtggaaaggacgtgtcccttttcctttttagggcactgggaaaaattctatactgcaagcgtgcctccctcactgagttggatagtccacggctcccgtcacacttgtctgagtatgagcgcgatacactcttggtggaacccgaagaggtggtcgagatgtcgcacatgcctggagatctgtttaacctgtatctgcaccagaactacatagattttttcatggagatcgacgacattgtccgagcgtctgagttcctcagcttcgccgatatattgtctggggactggaacactcgatctttactgcgggaatacagcacctctatcgccaccagaggggtgatgcacagcaacaaggcacgcggatatgcccactgccagggcgggggcagttccttccggccactgcataaaccgcagtggtttttaatcaataagaagtacagagagaactgcttggccgctaaggcccttttcccggatttttgtctgcccgctctgtgcctgcagactcagctgctcccttatttggccctcctgacgatcccaatgagaaaccaggcccagatatcgtttatccaggacattgggcggctcccgctcaaacgacactttgggagattgaaaatggaggcactcacagacagagaacatggaatgatcgatcctgattccggagatgaggctcagctgaatggcggtcactccgctgaagagagcctgggcgaaccaacacaggctacggtgcctgagacctggagtctgccgctgagccagaacagtgcatccgagctgcccgccagccagccccagcctttttccgcccagggcgatatggaggaaaacataattatcgaagactatgaatccgacggcacgtag

SEQ ID NO: 25955 - DNA, 1488 bp, synthetic construct
  misc_feature 1..1488: note = Description of Artificial Sequence: Synthetic coding sequence
  source 1..1488: mol_type = other DNA
atggacagcctggccgagagccggtggccccccggcctggccgtgatgaaaactatcgatgacctgttgcgatgtggcatctgtttcgagtacttcaacatcgccatgattatcccccagtgtagccacaactactgctccctctgcatcagaaagtttctctcgtacaagacacaatgccccacctgttgcgtcacagtcaccgagcccgatctgaagaataatcgcatcttagacgaacttgtcaagagtctcaatttcgccagaaaccaccttctgcagttcgccctggaaagtccggctaagagcccagctagtagcagttccaaaaatctcgcggtgaaagtctacacacccgtggcttcaaggcagtcactcaaacaggggtccagattgatggacaatttcttaattcgcgaaatgagcggttctaccagcgagcttctgatcaaagagaacaagtccaagttttcaccacagaaagaagcttctccggctgctaaaaccaaggagacccggtctgtggaggaaattgcacccgacccatcagaagcaaaaagacctgaacccccttctaccagcaccctgaagcaggtgaccaaagtggattgtccagtgtgcggcgttaacattcccgaaagccatatcaataaacatctagacagctgcttgtcaagggaggaaaagaaggaatcccttagatcatcagttcacaagcgcaaacccttaccaaaaaccgtgtataatcttctgagtgaccgtgacctcaaaaaaaaactgaaagagcacgggctctctatccagggcaataaacagcaactgattaagcggcaccaagaattcgtccacatgtataatgctcaatgtgacgcgctccatcccaagtccgccgcagagattgtccgggagatcgagaatattgagaagacccgtatgaggttggaagcaagcaagttgaacgagtccgttatggtgtttacaaaagatcagacagagaaggagatcgacgagatccactccaaatatcggaagaaacacaaatccgagttccagctgctcgtggatcaagctcgaaaagggtataaaaagattgcggggatgtcacagaagaccgtgactatcaccaaggaggacgagtcaacagaaaagctgagtagcgtgtgcatgggccaggaggacaacatgacttctgttaccaatcacttcagccagagcaagctggatagtccagaggaactcgaacctgaccgagaagaagactcgtcaagctgtatagacatccaggaggttctttcttctagtgagagcgactcatgcaactcttcctcctccgacattatccgggatctgctggaagaggaagaggcatgggaggcctctcataagaacgatttgcaggacacggaaatatccccccggcagaatagaaggacgagggcagcggagagcgcggaaattgaacctcgcaacaaaagaaatcggaactag

SEQ ID NO: 25956 - DNA, 279 bp, synthetic construct
  misc_feature 1..279: note = Description of Artificial Sequence: Synthetic coding sequence
  source 1..279: mol_type = other DNA
atggacagcctggccgagagccggtggccccccggcctggccgtgatgaaaactattgacgacttactgcgatgcggcatttgctttgaatatttcaatatcgccatgataatcccacaatgcagtcataactactgctctctttgtattcgcaagtttctctcctacaagacacaatgccctacttgctgtgtgacggttactgagccagacctcaaaaacaaccgcattctcgatgagctggtgaaaagcttgaacttcgccaggaaccacctatag

SEQ ID NO: 25957 - DNA, 1092 bp, synthetic construct
  misc_feature 1..1092: note = Description of Artificial Sequence: Synthetic coding sequence
  source 1..1092: mol_type = other DNA
atggccgtgaccatcaccctgaagaccctgcagcagcagaccttcaagattagaatggaaccagacgagacagtgaaagttctcaaggaaaagattgaagccgagaaagggagggatgcttttcctgtagcaggacagaagctgatctacgccggcaaaatcctgagcgatgatgtacccatccgtgactacaggatcgatgagaagaacttcgtggttgttatggtgacaaagaccaaggcaggacagggcacctccgctccccctgaagcgtctccgaccgctgccccagagagcagtacctcttttccccccgctccgacctcagggatgagccaccctcctccagctgctagggaagacaagagtccgtccgaggaatcagccccaaccacaagccctgaaagcgtgtccggaagtgtcccgagtagcggatcttctggcagagaggaagatgctgccagtacactggtgactggctccgagtatgaaaccatgctaacagaaatcatgtccatgggatacgagcgtgagagagttgtagccgccttaagagcaagctataacaatcctcatcgggcagtagaatacctattgacaggaattccaggcagccccgaaccagagcatgggtcggtacaggagtcccaggtgtcagaacagcctgcaactgaggccgcgggggagaatcccttggaatttcttcgcgatcagccgcaatttcagaacatgcgccaagtaattcagcagaatccagctctgcttcctgctctcctgcagcaactcggccaggagaaccctcagctgctgcaacaaataagcagacatcaggagcagttcattcagatgttgaacgagccgcctggtgagcttgctgatatcagcgacgtggagggagaggtaggggccattggggaggaagccccacaaatgaactatatacaggtaacaccgcaggagaaggaagccatcgagcgcctgaaagctctggggttccccgagagtttagtgatccaggcttactttgcttgtgagaagaatgagaatctggccgcaaattttctgctgtcccaaaattttgatgacgagtag

SEQ ID NO: 25958 - DNA, 597 bp, synthetic construct
  misc_feature 1..597: note = Description of Artificial Sequence: Synthetic coding sequence
  source 1..597: mol_type = other DNA
atgctgaccgagatcatgagcatgggctacgagcgggagcgggtggttgccgctctcagagcctcctataacaacccacatcgcgcggtggagtatttactgactgggattccgggatcaccagagcctgagcacggatcagttcaggagagccaagtgagtgaacagcccgcaaccgaggcggctggcgaaaaccccttggaatttctgcgagaccagccacagttccagaacatgcggcaggtcattcaacagaacccagcgctgctgcctgcactcctgcagcaactgggccaagagaatccccagctcttgcagcaaattagtagacaccaggagcaattcattcagatgctgaatgaacctcctggtgagttagctgatatcagcgacgtggaaggtgaggttggagccattggcgaagaggcgcctcagatgaactatatacaggtaacaccacaagagaaggaagcaattgaaagactgaaggcgctgggattcccagaatcactagttattcaggcatactttgcttgcgaaaagaacgaaaatctcgcagctaacttcttgctgtctcagaatttcgatgatgaatag

SEQ ID NO: 25959 - DNA, 1092 bp, synthetic construct
  misc_feature 1..1092: note = Description of Artificial Sequence: Synthetic coding sequence
  source 1..1092: mol_type = other DNA
atggccgtgaccatcaccctgaagaccctgcagcagcagaccttcaagatcagaatggaacctgacgaaaccgtcaaggtcctaaaggagaagattgaggcagagaaaggccgtgacgctttcccagttgcaggccagaagctgatatatgcaggcaaaatcctctcagatgacgtgcccatcagggactaccgcatcgatgaaaagaactttgttgtggtgatggttactaaaaccaaggccggacaagggacatcggctcctcccgaggcttcaccaactgctgccccagagtcgtccacttcattcccaccagcacctaccagtggcatgtctcacccaccaccggccgcccgagaagataagtctcccagcgaggaatccgctcctaccacatcccccgagtcggtgagcggatctgtgccctcctccggaagctcaggaagggaagaggacgccgcttccaccctcgttactggcagtgaatacgagacaatgcttaccgagatcatgagcatgggctatgaacgggaacgggtggtcgctgccctccgcgcctcctacaataaccctcatagggctgtggagtacctgctgactggaatccccggaagtcctgagcctgaacatggcagtgtgcaggagtctcaggtgtccgaacaacctgcaactgaggctgccggggaaaatccactggagtttttacgagaccagccccagtttcagaatatgcggcaggtcattcaacagaaccctgccctactaccagcgctgttacagcaactgggccaggaaaacccccagctgctgcagcagatttccagacaccaggagcaattcatccagatgttgaatgagccacctggcgagcttgcagacatatctgatgtcgagggggaagtgggagcgatcggagaagaggccccccagatgaactacattcaagtcaccccccaggaaaaagaagcgatcgagcggttaaaagctctgggcttccccgaaagcctcgttatacaggcttacttcgcctgtgagaaaaacgagaacctcgctgccaactttcttctaagtcaaaactttgacgacgagtag

SEQ ID NO: 25960 - DNA, 927 bp, synthetic construct
  misc_feature 1..927: note = Description of Artificial Sequence: Synthetic coding sequence
  source 1..927: mol_type = other DNA
atggccgtgaccatcaccctgaagaccctgcagcagcagaccttcaagatcagaatggagcccgacgagactgtcaaggtgctgaaggagaagattgaggcagagaagggtagagacgcgttccctgtggccgggcaaaaacttatctacgcagggaaaatcctgtctgatgatgtgccaattcgggattaccggattgatgagaaaaactttgttgtggtgatggtgactaagaccaaggccggccaaggtacttccgcccctccagaggcttccccgaccgctgccccagagagttccactagcttccctccagccccaacatcaggcatgagccacccacctcctgctgcaagagaagacaaaagcccaagtgaggaatcagccccaaccactagcccagagtctgttagcggctccgtgccctcctctggcagttcgggaagagaagaggacgcggcttctacacttgtcactggaagtgaatacgaaactatgctcacagagatcatgagcatgggctatgaaagggagagggttgtcgccgccttgagggcaagttacaataaccctcaccgggcagtggagtacctcctgaccgggatacccgggagccccgagcctgagcacgggtccgtccaagagtcacaagtgtcggaacagcctgcaacagaagctgcaggtgaaaatccattggagttcttgcgcgaccagcctcagttccaaaatatgagacaggttatccagcagaatcctgccctattgccagctctgttgcaacagctggggcaagaaaatcctcaactgctccagctcaaggcgctcggcttcccagaatctctggtgatccaagcctactttgcttgcgaaaagaatgagaacctggccgcaaattttctgttgtcccagaacttcgatgatgaatag

SEQ ID NO: 25961 - DNA, 1230 bp, synthetic construct
  misc_feature 1..1230: note = Description of Artificial Sequence: Synthetic coding sequence
  source 1..1230: mol_type = other DNA
atgcaggtgaccctgaagaccctgcagcagcagaccttcaagatcgatatcgatccagaggagaccgtgaaggcactgaaagagaagatcgagtctgagaaaggcaaggatgcatttcccgtagcaggtcagaagcttatctacgccggtaagatccttaacgacgacacggctctgaaagaatataagattgatgagaagaacttcgtggtggtcatggttactaaacccaaagctgtctcaacccctgcaccagccactactcagcagtctgctcccgcttctaccactgccgtcacttccagcacaacgacaacagtggcccaggctcctacaccagttcctgcactggcaccaacgtctactccagcttctattaccccagcatcagccaccgcgtcaagtgagcctgctcccgcttcagcggctaaacaggaaaagcccgctgagaaacccgccgagacacccgttgcaacgagcccgacagctacggacagcacctcgggagatagctcccggagcaatctctttgaagatgccacctccgccctcgtgacaggacagtcttatgaaaatatggtgacagagataatgtctatgggatacgagcgggagcaggtgatagcagcgcttagagctagcttcaacaatcccgaccgcgccgtggagtacctgctaatgggaatccctggggaccgggaatcccaggccgtggttgacccaccccaggcagcttccaccggcgcgccacagtcaagtgcggtcgccgcagcggctgccactaccacagctaccacaacgaccacctccagtggcggccaccctttagagtttctcaggaaccaaccccaatttcagcagatgagacagataatccaacagaatcccagtctcttacccgcactgctgcagcagatcgggagggagaatccacagctacttcagcagatctcccaacaccaggagcactttatccagatgctgaacgagcccgtgcaggaggcgggcggccaaggagggggtggaggtggcggcagcggcggaattgccgaggccggatctggacatatgaattatattcaagtgacccctcaagaaaaagaggcgatagagaggcttaaggcattagggtttccggagggtcttgtaatccaggcctacttcgcttgcgagaagaacgaaaacctggctgcgaattttttgttacagcagaacttcgacgaagactag

SEQ ID NO: 25962 - DNA, 519 bp, synthetic construct
  misc_feature 1..519: note = Description of Artificial Sequence: Synthetic coding sequence
  source 1..519: mol_type = other DNA
atggtgaccaagcccaaggccgtgagcacccccgcccccgccaccacacagcagtcagccccagcaagtactacagccgtgaccagttccacaacaaccacagtcgcgcaggctccaacacctgtgcccgctctggcaccgactagcaccccagccagtattacacccgcatcagctacagcgtcctccgaacccgcaccagcttccgccgcaaagcaggagaagcccgccgaaaagccggcggagacccctgttgccacatcccccaccgccactgactctacatccggcgactcaagccgtagcaacctgtttgaagacgccacctcagcactggtaaccggccagtcatacgagaatatggtcactgaaatcatgtccatgggttacgaacgggagcaagtcatcgcagcactgcgggcatcatttaataatcccgaccgtgccgttgagtatctgctcatgatcatcgttaaaacagggaacaaaaagaaaaagcagccccttctcggaaagtag

SEQ ID NO: 25963 - DNA, 1014 bp, synthetic construct
  misc_feature 1..1014: note = Description of Artificial Sequence: Synthetic coding sequence
  source 1..1014: mol_type = other DNA
atggtgaccaagcccaaggccgtgagcacccccgcccccgccaccacacaacagtcagcccctgcctccacaactgccgttaccagtagtacgactacaaccgtagctcaggctcccacacccgtccctgctctggcgccgaccagcacaccggcctccataacacccgcttcagctactgcctcctccgagcccgcaccagcttccgccgccaagcaggaaaaacccgccgagaagcctgctgagactcccgttgcgacgagccccaccgctacggactctacaagcggagattctagtaggtccaacttatttgaggatgctacaagtgcccttgttaccggtcaatcatatgagaatatggtgacagaaataatgagtatggggtacgagcgagagcaggtgatcgccgcgctgcgcgcatcgtttaacaatccagaccgggcggttgagtacttgctaatggggatacccggggacagagaaagccaggctgttgtcgaccctcctcaggccgccagcacaggagcacctcaaagttctgcagtggcagctgctgctgccaccacgaccgctaccacaactacaacctcctcaggtggtcaccctctggagttcctccgaaaccagccccagtttcagcagatgaggcagatcatccagcagaaccccagtctactgcccgcattgcttcaacaaatcggtcgtgagaatccccagctgcttcagcagatttctcagcatcaggagcactttatccagatgctcaatgagcccgtgcaagaagctggtggacagggaggcgggggtggaggtgggtctgggggcatcgcagaggctggttcagggcacatgaattatatccaagtgacacctcaggagaaggaggctattgagagactgaaggctctcgggttccctgaggggcttgtgatccaggcctatttcgcttgcgagaaaaacgaaaacctcgccgccaattttttgttacagcaaaatttcgatgaggattag

SEQ ID NO: 25964 - DNA, 441 bp, synthetic construct
  misc_feature 1..441: note = Description of Artificial Sequence: Synthetic coding sequence
  source 1..441: mol_type = other DNA
atgcaggtgaccctgaagaccctgcagcagcagaccttcaagatcgacatagatccagaggagaccgtgaaagccctgaaggagaagatcgaatccgaaaaagggaaggatgccttcccggtggcaggccaaaaacttatctacgccgggaagatcctcaatgatgacactgccctgaaggagtataagattgacgaaaaaaatttcgtcgtggtgatggtgacaaagccgaaggctgtcagcacaccggctcccgctaccacacaacaatctgctcccgcttccacaacagctgtgacatcatccacgactacaacagttgctcaggcacccacccccgttcctgccctcgcacctacaagcaccccggcctccattacgccagcctctgccaccgctagttcggagcccgcacctgcttctgctgcgaaacaggagtag

SEQ ID NO: 25965 - DNA, 243 bp, synthetic construct
  misc_feature 1..243: note = Description of Artificial Sequence: Synthetic coding sequence
  source 1..243: mol_type = other DNA
atggtgaaggccctgaaggagaagatcgagagcgagaagggcaaggacgcattcccggtcgcgggacagaagcttatctatgccgggaagatcctgaacgacgatactgccctgaaagaatacaagatcgatgagaaaaatttcgttgtggtgatggtgaccaaaccgaaggcggtctctactcccgctccagctaccacacagcagagtgctcccgcttcaacgaccgccgtaacttcttag

SEQ ID NO: 25966 - DNA, 345 bp, synthetic construct
  misc_feature 1..345: note = Description of Artificial Sequence: Synthetic coding sequence
  source 1..345: mol_type = other DNA
tgaaccgccagcagcgagcccgcccccgccagcgccgccaagcaggagaagccagcggagaagccggccgagacccccgtcgctacctccccaaccgccacagatagcacctctggggattcatcccgctccaatctgttcgaggacgcaacaagtgctctcgtgacaggccagtcgtacgaaaacatggttaccgaaataatgtcaatgggttatgagcgggaacaagtgatcgcagcactcagggcaagcttcaataacccagacagggctgtggagtatttactcatgattattgtgaaaactggtaataagaaaaagaagcagccactgctgggtaaatag

SEQ ID NO: 25967 - DNA, 3939 bp, synthetic construct
  misc_feature 1..3939: note = Description of Artificial Sequence: Synthetic coding sequence
  source 1..3939: mol_type = other DNA
atgagccggatcgagaagatgagcatcctgggcgtgcggagcttcggaatcgaggataaggacaagcaaatcataacattcttctctcctcttactatcctagtcggacccaacggggccgggaagactaccatcatagagtgcctgaaatatatatgcacaggcgactttccccccgggacaaaaggcaacacttttgtgcacgatcctaaagtcgcccaggaaacagacgtccgtgcacaaatccgactgcagttcagggacgtgaatggagagctcatcgcagtgcagcgttcaatggtatgcacccaaaagagcaagaagacagaatttaagaccttagaaggcgtgatcacgagaactaaacatggcgaaaaggtctctctgtcctccaaatgcgcggagattgatcgtgaaatgatttcctctctaggtgtatctaaggccgtgctgaataatgtgatattttgccaccaggaggactctaattggccgctgtccgagggaaaagcattaaagcagaaattcgacgagatcttttctgctacgcgttacattaaagccctcgaaaccctcaggcaggtgcgccaaacacaggggcagaaagtcaaggagtaccaaatggaacttaaatatctgaaacagtataaggaaaaggcttgtgaaattcgggaccagataacatccaaggaggcgcagttgactagcagcaaagagattgtgaaatcatacgaaaatgaactggatccgttgaagaaccggctgaaagagatcgaacataatctgtcaaaaattatgaaactcgacaatgaaatcaaggcgttagacagccgaaagaaacagatggagaaggacaactcagagcttgaggagaagatggagaaggtgttccaggggaccgatgagcagctgaatgacttgtaccataatcatcagagaaccgtacgcgagaaggagcgcaagctagtggattgccatcgtgagctggagaagctgaacaaggagtctcgcttgctgaatcaagagaagagtgagcttctggtggaacagggccggcttcaactacaggccgacagacaccaggagcatataagggcccgcgattcactgattcagagtctcgccacccagctggagctcgatgggtttgagaggggcccgttcagcgagcggcagattaaaaatttccacaaattggtccgtgaaagacaggagggagaagccaagaccgcaaaccagcttatgaatgatttcgctgaaaaagaaacactgaaacagaaacagatcgacgagatccgcgataaaaagacaggtttagggaggatcattgaactcaagtccgaaatactgagcaagaagcagaacgagctgaaaaatgtgaaatacgagttgcagcaactggagggcagcagcgaccggattctggagctggaccaggaactaatcaaagccgagagagaactcagtaaggccgagaagaacagcaatgtggagacactgaaaatggaggtcattagcctgcagaatgagaaggctgatctcgataggactttaagaaagttagaccaagaaatggaacagctaaaccatcacaccacaacaaggacccaaatggaaatgctgacgaaggataaagccgataaagatgaacaaattaggaaaatcaagtccaggcactctgatgagctcacctccctccttggctattttccgaacaaaaagcaactggaagactggctccattccaaaagcaaagaaattaaccagacacgcgacagactggccaaattgaacaaagaactagccagctccgagcagaacaagaatcacatcaataatgagctcaagcggaaagaggagcagctctcatcctacgaagacaaactgttcgacgtttgcggaagccaggattttgagtccgatctcgatcgtctgaaagaagagatcgagaagagttcaaaacagcgcgctatgttggctggagctaccgccgtgtactctcagttcattacacaactgacagatgagaatcagagctgttgccccgtttgccagcgcgtcttccagacggaagccgagctgcaggaggtgatttccgacttgcagagcaagctgcggttagcgccggataagctgaagtctaccgagtcagaactgaagaagaaggaaaagcgtcgagacgagatgttgggacttgtccctatgcgacagtccatcatcgacttgaaagaaaaagaaattccggaacttcggaataagctccagaatgtgaaccgggacatccagaggctaaagaacgacatcgaggaacaggaaactcttctgggtacaatcatgcccgaggaggaatctgccaaggtctgtctgacagacgtgaccatcatggaacgctttcaaatggaactcaaggacgtggagcgaaagatcgcgcagcaggccgcaaaattacagggcattgatttagaccgcacagtccagcaagtgaaccaggagaagcaagaaaagcagcataaactagataccgtatccagcaaaattgagctgaataggaagttgatccaagaccagcaagaacagatccagcacctgaaaagcacaacgaatgaactgaaaagtgagaagctgcaaatcagcacaaacctgcagcggaggcagcaattagaggagcagactgtcgagctgtcgacagaggtacagtcattataccgcgagatcaaagatgccaaggagcaggtgagtccactagagacaacactcgagaaatttcaacaggaaaaagaggaacttatcaacaagaagaacacctccaacaaaattgcccaagataagctgaacgatataaaggaaaaggtcaagaatatacacgggtatatgaaagacattgagaattatattcaggatggaaaggatgactacaaaaaacaaaaagagacagaactcaacaaagtaatagctcaactgtccgaatgtgagaagcacaaggaaaagataaatgaagacatgaggctaatgaggcaggatattgacacgcagaagattcaggagaggtggctgcaagataacctaactctgcggaagagaaacgaggaactcaaagaagtggaggaggagagaaaacagcacctgaaagagatgggtcagatgcaggtcctgcagatgaagagcgagcatcagaaattggaggaaaatatcgacaacattaaacgtaaccataatctggccctgggacggcagaagggctacgaagaggaaattattcactttaaaaaggaattgagggagccgcagttccgggacgcagaggaaaagtaccgcgaaatgatgatagtcatgaggacaacagagttggtgaacaaagacctcgatatatactataagaccctcgaccaggccataatgaagtttcattccatgaagatggaggagataaataaaatcattagagacttgtggcgttctacgtacagggggcaggacatcgagtatattgagattcgaagtgacgctgacgaaaacgtgagcgctagcgataagcgccgcaactataattatcgggtcgtcatgctgaaaggggacactgcccttgacatgcgcggacggtgcagtgcgggacagaaggtgcttgcctctttaatcatccggctggccttggccgagaccttctgcctaaattgtggcatcattgccttggacgagccaaccactaatctcgaccgagaaaatattgagtcattggcacacgcccttgttgagatcattaaatcacggtcacagcagcgcaactttcaactgctggtcatcacacacgacgaagacttcgttgagctattgggaaggtccgaatacgtggagaaattttaccggatcaaaaagaacatcgatcagtgtagcgagatcgtcaagtgttcagtatcttcccttggtttcaacgtgcactag

SEQ ID NO: 25968 - DNA, 3522 bp, synthetic construct
  misc_feature 1..3522: note = Description of Artificial Sequence: Synthetic coding sequence
  source 1..3522: mol_type = other DNA
atgatcagcagcctgggcgtgagcaaggccgtgctgaacaacgtgatcttttgtcatcaggaggattcgaattggccgctgtccgaggggaaagcacttaagcagaagtttgacgagatattctcagccacacggtacattaaggctttagagactttgcgacaggttcgccagactcagggacaaaaagtcaaagaataccagatggagctgaagtacctgaagcagtataaagaaaaggcttgcgaaatccgggaccaaatcacgtcgaaggaggcccagcttacctcctctaaggagatcgttaagtcctacgagaacgaattggacccactaaagaaccgtttgaaggagattgaacacaacctgagtaaaatcatgaagctggataatgagattaaggctcttgattcaaggaaaaaacaaatggaaaaagacaactctgaactggaggaaaaaatggaaaaggtgtttcaggggacagacgaacagctgaacgacctataccataaccaccagcgcaccgtgcgtgaaaaggagcgcaaactcgtagactgccatagagagctcgaaaagttgaataaggaatcccgcctgctcaaccaggagaagtctgaactcttggtggaacagggtcggcttcaacttcaagcagaccgacatcaggagcacatccgagcccgcgacagcctaattcagagtctggcaactcaactggaactggatgggttcgagaggggccctttctctgagcgccagatcaaaaactttcacaagctggttcgtgagcgacaagagggcgaagcaaagaccgcaaaccagttgatgaacgacttcgccgagaaggaaacgctcaagcagaaacagatcgatgagatacgcgacaaaaaaacaggtctgggcagaattatagagctgaagagcgagattttgagtaagaagcagaacgaactcaaaaatgtgaagtacgagctgcaacagctagagggatccagtgatcggattctggaactggaccaggagctaatcaaggccgagcgtgagctgtccaaggccgaaaaaaattctaatgttgagaccctcaaaatggaggtgatcagcctgcagaacgaaaaagccgatttggaccgcactctgaggaaactcgatcaggaaatggagcaattgaaccatcacacaaccactcggactcagatggagatgctgactaaagacaaggccgacaaagatgaacagatccgcaagatcaagtcccgtcacagcgatgaattaacctccttactcggctacttccccaataaaaagcagttggaagactggcttcatagtaaatccaaagaaatcaaccagactagggatcgtctcgctaaactcaacaaagagttagcctcttctgaacaaaataagaaccacatcaataacgagctcaagcgtaaagaggagcagctgtcatcttacgaagataagctctttgacgtgtgcggatcgcaggacttcgagtcggacttggacaggctgaaagaagagatagagaagtcctccaagcagagggcgatgctggccggtgccactgcggtgtattcccaatttatcacacagcttactgacgagaatcaaagttgctgtcccgtgtgtcagagagtctttcagacagaagcagaattacaggaagttataagcgacttacagagcaaactgcgcctggcaccagataagctgaagtccacagagtccgaactgaaaaaaaaagaaaagagaagagatgagatgctgggtctagtgccaatgcgtcagtccatcatcgatctgaaggagaaggaaattcccgaactgaggaataaactgcagaatgtcaaccgcgatatccagcggctcaagaatgacatcgaggagcaggaaacactcttgggtacaataatgcccgaagaggagtccgccaaggtttgtctcactgacgtcaccataatggagcgctttcaaatggagctgaaggacgtggagcggaagatagctcagcaggcggccaaactgcagggaatcgaccttgacagaactgtgcagcaggtcaaccaggagaagcaggagaagcaacacaaattggacacagttagctctaagatcgagctgaaccgcaagcttattcaagatcagcaagagcaaattcagcacctgaagagcaccacaaatgaactgaaatctgagaagcttcagattagcactaacctgcagcggagacagcagctggaggagcaaactgttgagttgtctacagaggtgcaaagcctctatcgggagattaaggatgccaaggaacaagtatcgccacttgagaccaccctggaaaagttccagcaagaaaaggaggagctcattaataaaaaaaacacgagcaataagattgcccaagacaaactgaatgacattaaagagaaggttaagaatattcatggctatatgaaggacatcgagaactacatacaggatggaaaggatgattacaaaaagcaaaaggaaacagagctaaataaggtgatcgcgcagttatccgaatgtgaaaagcacaaagagaaaatcaatgaagacatgcgtctgatgagacaagacattgatacccaaaagatccaggagcggtggttacaggacaatctgacactacgaaaacggaacgaggaactgaaagaggtggaggaggagaggaagcagcacctgaaggagatggggcagatgcaggtattgcagatgaagtcagagcaccagaaattggaagaaaacattgataatatcaagcggaatcacaaccttgcgcttggcagacagaagggatatgaggaggagataatacactttaaaaaagagttgagagagccccagtttcgagatgcggaagaaaagtaccgagaaatgatgatcgtgatgagaaccaccgagctggtgaataaagacctcgacatttactataaaactctggatcaggccattatgaaatttcattctatgaaaatggaggaaatcaataagattatccgagatctttggcggagtacataccgtggacaggatatcgagtacatcgagattcgctctgatgctgatgaaaatgtgtccgcttccgataaacggcggaattataattacagggtggttatgctcaagggcgacactgcgctggacatgagagggaggtgcagcgctgggcaaaaagtgttagcctctttaatcatcagactcgcactggccgaaaccttctgccttaactgcggcattattgccctcgatgagcctacaactaatttggatagggagaacattgagagtctggcccacgcactcgtagaaataattaagtccaggagtcaacagagaaattttcagctgctggttatcacccacgatgaggattttgttgagttgctcggccggtcagagtacgtggaaaaattttatcgcatcaagaagaacatcgaccagtgtagtgagattgttaagtgttccgttagtagtctaggctttaacgtacactag

SEQ ID NO: 25969 - DNA, 1020 bp, synthetic construct
  misc_feature 1..1020: note = Description of Artificial Sequence: Synthetic coding sequence
  source 1..1020: mol_type = other DNA
atggccatgcagatgcagctggaggccaacgccgacaccagcgtggaggaagaatcctttgggcctcagcccatctcccggcttgagcagtgcggcatcaacgcaaatgacgttaagaagttagaagaagccggattccacaccgttgaggccgttgcatacgctccaaagaaagaactgatcaacattaaaggtatttctgaagcgaaggcagataaaattctggcggaggcagccaagttggtccccatgggctttactaccgccacggagttccaccagcgccgcagcgaaatcatccagatcaccaccgggtcaaaggagctggacaaattactgcagggcggaattgagacaggcagtatcactgagatgttcggtgagtttaggaccgggaaaacccagatctgtcatacactcgctgttacttgccagctgcctatagaccggggagggggtgagggcaaagctatgtacatcgataccgagggcacttttagaccagaacggttactggctgtagcggagagatacgggcttagcggaagtgatgtgctcgacaacgtggcctatgccagggccttcaatactgatcaccaaactcagctgctgtaccaggcctccgctatgatggtagagagcagatatgcactgctcatcgttgactcagcaaccgccctgtataggacagactactctggccggggcgagttgagtgcaaggcagatgcacctagccaggttcctgcgcatgctcctaagactggcggatgagtttggagtggccgtggttatcaccaatcaggtagtggcacaagtggacggggctgctatgtttgcagcagaccccaaaaaaccaattggcggaaatattatcgctcacgcgtctaccaccagattgtacctgcggaaggggcggggagaaaccaggatatgtaagatttatgattcaccctgcttgccagaggcagaggcaatgtttgccataaacgcagacggagtgggggatgctaaagactag

SEQ ID NO: 25970 - DNA, 729 bp, synthetic construct
  misc_feature 1..729: note = Description of Artificial Sequence: Synthetic coding sequence
  source 1..729: mol_type = other DNA
atggccatgcagatgcagctggaggccaacgccgacaccagcgtggaagaggagtcttttggtccccagccgatttctcgccttgagcagtgcggaattaacgcaaatgatgttaagaagttggaggaagcaggcttccacaccgtggaggctgtggcctacgcacccaagaaagagctgattaacatcaaaggcatctccgaggccaaagccgataaaatccttctactgagccacaggtacgggctgtcgggtagcgacgtgctggacaatgtcgcgtatgctcgtgcatttaacacagatcatcagacccagcttttatatcaggccagcgccatgatggttgagagtcgttacgccctgctgatcgttgacagcgctactgccctctaccgcactgattacagcgggcgcggagagttgtctgctagacaaatgcatctggccagattcttaaggatgttgttaaggcttgccgacgagttcggagtcgcagtggtcataactaatcaggtggtggctcaggttgatggggctgctatgttcgccgccgacccaaaaaaacctatcggcgggaatatcattgcgcacgcaagcacaactagactgtacctccgcaaagggcgtggagagacccgcatctgcaagatctacgattccccttgcctgcccgaggccgaggccatgttcgctatcaacgcagacggagtgggggacgccaaggactag

SEQ ID NO: 25971 - DNA, 1023 bp, synthetic construct
  misc_feature 1..1023: note = Description of Artificial Sequence: Synthetic coding sequence
  source 1..1023: mol_type = other DNA
atggccatgcagatgcagctggaggccaacgccgacaccagcgtggaggaagagtcgtttgggcctcagccaatctccaggctcgaacagtgcggcattaatgctaatgacgtcaaaaagcttgaagaagcaggctttcataccgttgaggccgtcgcctatgcgccaaaaaaagaactgataaacatcaaaggaatttccgaggccaaggcagacaaaattctcacagagtccaggtcggttgcccggctcgagtgtaactctgtcatcctggtgtattgcacactgcgactgtccggaagctccgatagccccgcctccgcttctcgggtcgtgggcaccacaggtgggattgagacaggatcaatcaccgagatgttcggcgagtttagaaccggcaagacgcagatctgtcatacactcgctgtgacatgccaacttcccatagaccgcggggggggtgaggggaaggccatgtacattgacacagaaggaaccttccgtccagaacgcttgctggcagtcgcagagagatacggcctgtccgggagcgatgtgttggataacgtcgcttacgctagggccttcaatacagaccatcagactcagctcctgtaccaggcttccgccatgatggttgagtcaaggtacgccctccttatcgtcgactctgctactgccctttaccgcaccgattacagtggaagaggagagctctccgcccggcagatgcatttggctagattcctgagaatgctgctgagactcgcagacgagtttggagttgcagtcgtcattactaatcaggtcgtggctcaagtggatggggcggccatgttcgccgcggaccctaagaaacctataggcggcaacatcatcgctcatgcttctacgacacggctatatttacgaaagggccggggagagactagaatctgcaaaatttatgactctccatgtctccccgaggctgaagctatgtttgcaattaatgccgatggagttggggacgctaaggattag

SEQ ID NO: 25972 - DNA, 843 bp, synthetic construct
  misc_feature 1..843: note = Description of Artificial Sequence: Synthetic coding sequence
  source 1..843: mol_type = other DNA
atggccatgcagatgcagctggaggccaacgccgacaccagcgtggaggaggaaagttttggcccacagccgatctctcggcttgagcagtgtggcatcaacgccaacgacgtaaagaagctggaagaagcaggctttcacacagtggaagccgtcgcttatgccccaaagaaagaactcattaacattaagggcatttccgaggccaaggcagacaagatcttggccgaagccgctaaacttgttccaatgggtttcactacagctacagaattccaccagcgccgttccgagatcatccaaattactacaggaagcaaagagttggataagctgttacagggtggtattgagacaggcagtatcactgagatgtttggagaattcagaactgggaagactcagatctgtcacaccctcgcagtgacctgccagttgccaattgatagaggcggaggtgaaggaaaagctatgtatatcgatacggagggcacttttcgccccgaaaggctgctggccgtggccgaaaggtatggcttatccggttccgacgtcctggacaacgtcgcctacgcacgggcttttaacaccgaccatcaaactcagctattgtaccaggcgtcagccatgatggttgagagtcgctatgctttactgatcgtggactctgctacagcactgtaccgcacggactactccggccgcggagaactgagcgccaggcaaatgcacctggcaaggtttctgagaatgttactccgactcgccgatgagattgtgagtgaagaaagaaagagggggaaccagaacctgcagaatctgaggttgtctttgagctcatag

SEQ ID NO: 25973 - DNA, 456 bp, synthetic construct
  misc_feature 1..456: note = Description of Artificial Sequence: Synthetic coding sequence
  source 1..456: mol_type = other DNA
atggccatgcagatgcagctggaggccaacgccgacaccagcgtggaagaggagtcattcgggcctcagcctatctctcggcttgaacagtgtgggataaatgccaacgatgtaaaaaagttggaagaggctggatttcacacagtggaggcagttgcttatgcccccaaaaaggagctgatcaacatcaagggcatctctgaagcgaaggccgacaaaatcctcgccgaagccgcaaagctggtgcctatgggctttactaccgctactgagttccaccagaggcggagcgaaataatacagatcaccactggctctaaggagttggataagctgctgcagggcggcattgaaactggatccataacagagatgtttggcgaattcaggacaggcaagacgcaaatctgccacaccttggcggtgacctgtcaagtctggagtctctggcagtag

SEQ ID NO: 25974 - DNA, 228 bp, synthetic construct
  misc_feature 1..228: note = Description of Artificial Sequence: Synthetic coding sequence
  source 1..228: mol_type = other DNA
atggccatgcagatgcagctggaggccaacgccgacaccagcgtggaggaagagagctttggcccacagcccatttctaggcttgaacagtgtgggattaacgccaatgatgttaaaaaactcgaggaggccgggttccacaccgttgaggctgtcgcttatgctcccaagaaggaacttattaatatcaagggaattagtgaggcaaaggccgataagattctgtag

SEQ ID NO: 25975 - DNA, 519 bp, synthetic construct
  misc_feature 1..519: note = Description of Artificial Sequence: Synthetic coding sequence
  source 1..519: mol_type = other DNA
atggccatgcagatgcagctggaggccaacgccgacaccagcgtggaggaggaatcgtttggtcctcagcccatttcacgcttggagcagtgtgggataaatgcgaatgatgttaagaaactcgaagaggcgggtttccatacagtcgaggccgtggcatacgcaccgaagaaggagctgatcaacatcaaagggatctctgaggccaaggcagataaaattttggctgaggctgccaaactggttcccatgggttttactactgcgaccgagtttcaccaacgcaggtcagaaatcatccagattaccaccggatcaaaggaactagacaaactgctgcagggtggtatcgaaaccgggagcatcaccgaaatgttcggggagttcaggaccggaaagacacagatctgccacaccctggccgtaacctgccagttgcccatcgatcgcggtggaggagaggggaaggcaatgtatatagacacagaaggcaccttccgacctgagcgcttgttgtag

SEQ ID NO: 25976 - DNA, 303 bp, synthetic construct
  misc_feature 1..303: note = Description of Artificial Sequence: Synthetic coding sequence
  source 1..303: mol_type = other DNA
atggccatgcagatgcagctggaggccaacgccgacaccagcgtggaggaggagtcattcggtccccagcccatctctcgcttggaacaatgtggcataaacgctaacgatgtgaagaaactggaggaggcgggattccacacagtggaagcagtggcctacgccccgaaaaaggagctgataaatattaagggtattagcgaggcgaaggccgacaaaatactggtcgaactccggctggacctttctcagaagtgcctcgaaaattccgaacttggaaggcctaggtctgtgatccgctag

SEQ ID NO: 25977 - DNA, 1023 bp, synthetic construct
  misc_feature 1..1023: note = Description of Artificial Sequence: Synthetic coding sequence
  source 1..1023: mol_type = other DNA
atggccatgcagatgcagctggaggccaacgccgacaccagcgtggaagaggagtcttttgggccacagcccatttcccgactggagcagtgcggcatcaatgccaacgacgttaagaaactcgaggaagcgggattccacacggtggaggcggtagcttatgcccctaaaaaagagcttattaacatcaaagggatcagcgaggctaaagccgataaaatcctgaccgaatcccgctcagtcgctaggctggagtgtaacagcgttatattagtctactgcacgctaaggctgagcggctcctccgactcccccgcctccgcctcacgggtagtcggaaccacgggcggcatagaaactggatccatcacggaaatgtttggagagtttcgtacaggaaagacccagatctgtcacacactggcagttacctgtcagttaccaattgatcgcggtgggggagaggggaaggccatgtatatcgatacggaagggacatttagaccagaacgcttactggcggtcgcagagcggtacgggctgtcagggtccgacgtcctggacaatgtggcttacgcgcgcgcgttcaacacagaccaccagacccagctcctgtatcaggcttctgcaatgatggtggagtctagatacgccctcttaatcgtagattctgctacggctctgtatcggaccgattactcaggccggggagagcttagtgctcgacaaatgcacttggctaggtttctcaggatgctgctcaggctggccgacgagtttggagttgctgtggtgataacaaaccaggttgttgcgcaggtagacggcgccgctatgttcgcagcagatccaaagaagccgattggcggaaacataatcgcccatgcttccacaactagactgtatctgagaaagggcaggggcgaaactcggatttgtaaaatatatgatagcccttgcctgcccgaagctgaggcaatgttcgctatcaatgccgacggtgtcggcgacgccaaggactag

SEQ ID NO: 25978 - DNA, 729 bp, synthetic construct
  misc_feature 1..729: note = Description of Artificial Sequence: Synthetic coding sequence
  source 1..729: mol_type = other DNA
atggccatgcagatgcagctggaggccaacgccgacaccagcgtggaggaggaatccttcggaccccagcctatctctcggctggaacagtgcggtataaacgcaaacgacgtgaagaagttagaggaggccggcttccacactgtcgaggccgtcgcatacgctccgaagaaggagcttataaacattaaggggatctcggaagcaaaagctgataagattcttgctgtggctgagcggtacggactttcaggctcagatgttctagataatgtggcatacgctcgcgcattcaataccgatcatcagacccagctactgtaccaagcctccgcaatgatggtggaatcgcgatacgctttactgatcgtcgactccgccaccgcgttgtatagaaccgactactccggccgcggcgaactgtctgccaggcagatgcacctggcgcgatttctgcgcatgttgctacggttggccgacgaattcggcgttgcggtcgtgataacgaatcaagttgtggctcaggtcgatggggcagcaatgttcgctgcggatccgaagaagcccataggcggaaacatcatcgcgcatgcgtctacaactagattgtatttgcgaaagggaaggggagagaccagaatatgtaagatttatgactccccttgcctccccgaagccgaggctatgttcgccataaacgccgatggagtcggggatgctaaagactag

SEQ ID NO: 25979 - DNA, 1053 bp, synthetic construct
  misc_feature 1..1053: note = Description of Artificial Sequence: Synthetic coding sequence
  source 1..1053: mol_type = other DNA
atgggcagcaagaagctgaagcgggtgggcctgagccaggagctgtgcgatcgtttgtcccggcatcagattctgacttgtcaagacttcctttgcttaagccccctcgaattgatgaaggttaccggcttgtcataccgaggggtccacgagctgctctgcatggtgagcagggcctgtgcacccaagatgcagactgcctatggtattaaggcccagagatcagccgactttagcccagcattcctttctacaactctgagcgctcttgacgaagctcttcatggaggggtcgcctgtggatccttgacagagatcacggggcctcctggttgtggaaaaacccagttctgcatcatgatgagtatactcgccaccctgcccactaacatgggagggctggagggcgctgtggtgtatatagacacagagtccgcattcagcgccgagcgactggtggagattgctgaaagtcgatttcctaggtattttaatactgaagagaagctgctcctaacgtcttcaaaggtgcatttatatagagagcttacatgtgatgaggtgctccagcgcattgagtccttggaggaggaaattatctcgaagggtattaagctggttatcctggactcagtggccagtgtggtgaggaaggagtttgacgcacagctacaggggaatctaaaggaacggaataagtttctggcccgggaagccagcagcttgaagtacctcgctgaagaattctccattcctgtcatcctgaccaatcaaattaccacacacctgtcaggtgccttggccagtcaggcggacttggtctcccccgcagacgatctttcactttccgaggggactagcggatcctcttgcgtgattgctgctttaggaaatacctggtctcactcggtcaatacaagactgattctccagtaccttgatagcgaaaggcgccagatccttatcgccaaatccccactggcccccttcacttccttcgtgtatacgataaaggaggagggcctcgtgcttcaggcctatgctcagtgctag

SEQ ID NO: 25980 - DNA, 1101 bp, synthetic construct
  misc_feature 1..1101: note = Description of Artificial Sequence: Synthetic coding sequence
  source 1..1101: mol_type = other DNA
atgggcagcaagaagctgaagcgggtgggcctgagccaggagctgtgcgataggctctctaggcaccaaattttgacttgtcaggacttcctatgtctgtctccgctggaattaatgaaagtgactggactaagttaccgaggggtccacgagctgctttgcatggtgtctagggcctgcgctcccaagatgcagaccgcctacggcatcaaggcccagcgatctgcggattttagtcctgccttcctttctactaccctttccgcgctggatgaggctttacatggcggcgtagcttgcggctctctcacagaaatcacagggccccctggctgtggtaagacgcagttttgtattatgatgagcatcctcgcgacactgccgaccaacatgggcggccttgagggagccgtggtgtatattgacactgaatccgccttctctgcagaacgactcgtggagattgccgaatcacggttccctagatactttaacaccgaggagaagctgctcttaacctctagtaaagtgcacctgtaccgggagctaacctgtgatgaggtactgcagaggatcgaatcactggaggaggagattatcagtaaagggattaagctcgtgatccttgactcagttgcatccgttgtacggaaagagttcgatgctcaactccaggggaatctgaaagagaggaacaagttcttggcacgagaagcttccagtctgaaatatttggccgaggaatttagcattcccgtaattctaacaaaccagattactactcacctgtctggcgcgttagcctctcaagctgacctcgtgtctccggcggacgacctctctctttctgaagggacaagtgggtcttcttgcgttatagccgccttaggtaacacatggtctcactctgtgaatacgaggctgattctccagtacctggactcggagcgacgccaaatactgatcgctaaaagccccctggcaccattcacttcattcgtatacacaataaaggaggaaggtcttgtcctgcaggagttttggcatatatgcatctccgggttttcaatacagaaccgccttaaggaaaatgagagttag

SEQ ID NO: 25981 - DNA, 1053 bp, synthetic construct
  misc_feature 1..1053: note = Description of Artificial Sequence: Synthetic coding sequence
  source 1..1053: mol_type = other DNA
atgggcagcaagaagctgaagcgggtgggcctgagccaggagctgtgcgacagattatcgaggcatcagatcctgacttgccaggatttcttatgtttatcacctctggagttgatgaaagtgacagggctgagctataggggagtacacgaacttctgtgtatggtaagtcgcgcctgtgcacccaaaatgcaaactgcttatgggattaaggctcagcggagtgcagatttcagcccagcatttctttctacaacactcagtgccttagacgaggcccttcatggtggcgtggcctgcgggagccttaccgaaattacgggacctcctggttgtggaaaaactcagttttgtatcatgatgtccatcctggctaccctccctacaaatatggggggcctggaaggtgctgtcgtctatattgacaccgagtcagcattctcagccgagcgcttagtcgaaatcgccgagagccgattcccaaggtactttaacacagaggaaaaattactgctaacatctagcaaggtgcacctgtacagggagcttacctgtgacgaggtactccaaagaattgagagtttagaagaagagattatatctaaaggaatcaaattggtcatcctggattccgtggccagtgttgtgcgcaaggagtttgacgctcaactccagggaaatcttaaagagcggaataaattcttagccagggaagccagcagcctcaagtacctggctgaggagttctcaattccagttatcctaactaaccagatcacgacacatctcagcggagccctggccagccaagccgacctggtttccccggccgacgatttgtccctttcagagggcacaagcggttcctcgtgcgtgattgcggctctgggcaatacttggtctcactcagtcaacacacgcctcattctgcagtaccttgatagcgagcggcgtcagattctaatcgccaagtcacctctggcccccttcacatcattcgtgtacacaatcaaggaggaaggcttagtcttacaggggcaggaaaccccttag

SEQ ID NO: 25982 - DNA, 1053 bp, synthetic construct
  misc_feature 1..1053: note = Description of Artificial Sequence: Synthetic coding sequence
  source 1..1053: mol_type = other DNA
atgggcagcaagaagctgaagcgggtgggcctgagccaggagctgtgtgaccggttatcccgacaccaaatcctgacgtgtcaggactttctttgtttaagcccacttgaactaatgaaggtaacaggtttatcttacaggggcgtgcacgagcttctgtgcatggtatccagagcctgcgctccgaagatgcagacagcctatggcattaaggcccaaagatctgctgacttctcaccagcattcctctccactactttaagcgcgcttgacgaagccctccacgggggtgtcgcttgcggcagcctgaccgaaattactgggccgccaggatgtgggaagacacaattctgtatcatgatgagtatactcgcaaccctgcccactaacatgggcggcctggaaggtgctgttgtgtatatcgacaccgaaagtgccttttctgccgagagattagtggaaattgcagaatcacggttcccaagatattttaacaccgaggagaagctacttctgacatcgtctaaggtgcacttgtatagggaattgacatgtgacgaagtcttgcagcgcatcgagagtcttgaggaagagattatttctaagggtatcaaactggtgatcctggattccgtagctagtgtggttcggaaggagtttgatgcccagctgcaaggaaatttgaaagaaaggaataagttcctggcaagagaagcttcgtcactgaagtatttggccgaagagttctctattcccgttatcctgactaaccaaataacaacccatctgagcggtgcactggcaagccaagcagatttggttagtccagcagatgatttgtccttgtctgaggggacctctggcagttcgtgcgtcatcgccgctctgggcaacacttggtcccacagcgtgaatacccgcttaatcttgcagtacttggactcagagaggagacagattctcattgcaaagagtccccttgccccttttacctcctttgtgtatactatcaaagaagaagggcttgtgttgcagggccaggaaaagccctag

SEQ ID NO: 25983 - DNA, 402 bp, synthetic construct
  misc_feature 1..402: note = Description of Artificial Sequence: Synthetic coding sequence
  source 1..402: mol_type = other DNA
atgggcagcaagaagctgaagcgggtgggcctgagccaggagctgtgtgaccgactttcacgccatcagatcttaacatgtcaggacttcctgtgtctgtctcccctggaactgatgaaagtgacaggtctgtcctataggggcgtgcacgaacttctttgcatggtcagtagggcttgcgccccaaagatgcaaaccgcctacggcattaaggcacagcgaagtgcggatttctcccccgctttcctgagcaccacactcagcgcactcgacgaagccttgcacgggggggtggcttgcgggagcctgactgaaatcactggacctcccgggtgcggcaaaacacagttctgtatcatgatgtccattctcgccactctcccgacaaacatgggcggctag

SEQ ID NO: 25984 - DNA, 1155 bp, synthetic construct
  misc_feature 1..1155: note = Description of Artificial Sequence: Synthetic coding sequence
  source 1..1155: mol_type = other DNA
atgggcagcaagaagctgaagcgggtgggcctgagccaggagctgtgcgaccgtctctcgagacaccagatcctcacgtgccaagatttcctgtgtctttcaccactggagctgatgaaagtgacagggttatcctacaggggtgtccatgaactcctttgcatggtgagtcgggcctgcgcacctaagatgcaaacggcttacggaataaaagctcagaggtctgccgacttttcgccagcttttctctcaacgacgctgagcgccctggacgaagcactgcacggaggtgtcgcctgcggctctctgactgagatcaccggaccccccggctgcggcaagacccagttctgtatcatgatgagcatcctcgctaccctcccaacaaacatgggcggcctcgagggcgctgttgtatatatagatacagaatcagctttcagtgcagagcgcctagtggagattgccgagagccggtttccacgctatttcaacaccgaagaaaagttactgcttacatcctccaaggtccatctgtacagggagctaacatgtgacgaggttttgcaaaggatcgaatccctggaagaggagatcatctccaaagggattaagttggtgatcctcgacagcgtggcttctgtggtcagaaaggagttcgatgcccaactgcaaggtaatttaaaagaaaggaacaagtttctcgcccgagaggcgagttccctgaagtatcttgctgaagagttctcaatcccagttatactaactaaccaaataaccactcacctgagcggagccctggcctctcaggccgatcttgtgtcacccgccgacgacctgagtctcagtgagggtacgtctggatctagctgcgttattgctgcattagggaatacctggtcccacagtgtgaacacacgcctcattttgcagtacctggattctgaacgccgacaaattttgattgccaagagtccattggccccatttacctctttcgtttatacgattaaggaggaggggctagtgctacaggagacaacattctgctccgtgacccaggcagagctcaactgggcccctgaaatcctcccaccacaacctcccgaacagctggggctgcagatgtgtcatcatacacagctaatcttttag

SEQ ID NO: 25985 - DNA, 1101 bp, synthetic construct
  misc_feature 1..1101: note = Description of Artificial Sequence: Synthetic coding sequence
  source 1..1101: mol_type = other DNA
atgggcagcaagaagctgaagcgggtgggcctgagccaggagctgtgtgataggctgagccgtcaccagattttaacttgccaggactttctgtgcttgtctccgctggagctcatgaaggtgaccgggctgagttatcgaggcgttcacgagctgctgtgtatggtgtctagggcctgtgctcccaagatgcagactgcttacgggataaaagcgcagagatccgccgacttctcgccagccttcctgagtactaccctgagcgctttggacgaagcactgcatggaggggtggcatgcgggagcttgacagaaataacaggccctccgggatgtggaaaaacgcagttctgcataatgatgtcaatactggctaccctacctacaaacatgggaggtctcgaaggcgctgttgtttacatcgatacagagtcagctttctctgctgagcgcctcgtggaaattgcagagagccgcttcccaagatacttcaataccgaagagaagctcttactgacctcctctaaggtccacctgtatagggagctgacgtgtgatgaagttttgcagcgaatagaaagccttgaagaagagatcatctccaaaggaattaaactggtgatattagattccgtagcttccgttgtcagaaaagagttcgatgcccagctgcaagggaatctaaaagaacgaaacaaattccttgctcgggaggccagtagcctcaaatatctcgcggaagagtttagcatccccgtcatactgacgaaccaaatcacaacacacctaagtggggccctggcatctcaggctgaccttgtttcacctgcggacgatctcagcttgtctgagggaacctctgggtcgagctgcgtgattgccgccttagggaatacgtggtcacatagtgtgaatacccgcctgatcctgcagtacctggattccgagcgccgccaaattcttatcgcgaaatctcccttagccccttttacatcattcgtgtatacaatcaaagaggaggggctggtgctgcaggagttctggcatatctgtattagtgggttctctattcagaaccggctcaaagagaacgaatcgtag

SEQ ID NO: 25986 - DNA, 228 bp, synthetic construct
  misc_feature 1..228: note = Description of Artificial Sequence: Synthetic coding sequence
  source 1..228: mol_type = other DNA
atgggcagcaagaagctgaagcgggtgggcctgagccaggagctgtgtgatcgactctcgcggcaccagatactcacctgccaagacttcctttgcctgtctccactggagttgatgaaagtgaccggtctaagttatcgaggcgtccacgaattgctatgtatggtgtcaagagcatgcgcccctaaaatgcagactgcctacggcataaaggcccagaggtcctag

SEQ ID NO: 25987 - DNA, 1131 bp, synthetic construct
  misc_feature 1..1131: note = Description of Artificial Sequence: Synthetic coding sequence
  source 1..1131: mol_type = other DNA
atgcggggcaagaccttccggttcgagatgcagcgggacctggtgagtttccctctgtcaccggccgttcgcgttaaactggtaagcgccggattccagacggctgaagagttgctggaagttaaaccttccgagctttctaaagaagtgggaatcagtaaggccgaagcccttgaaacactgcagataattaggcgcgagtgcttaaccaacaaaccacgctatgcgggcacttctgagtctcacaaaaagtgtactgctctggagctgcttgagcaggaacatacccaggggtttatcatcaccttttgcagtgccttggacgacattctggggggcggggtgcccctgatgaagacaaccgaaatctgcggggctccaggcgtgggcaaaacgcagctgtgtatgcaactggccgtggatgtgcagatccctgagtgcttcggtggggtggccggtgaagctgtgtttattgatactgaggggagttttatggtggaccgggtagtagacctggcgacagcatgtatacagcacctccaattaattgccgaaaagcacaagggggaggaacacaggaaagcccttgaagatttcaccttggacaacattctctcccatatatactattttcgatgccgggattacacagaacttcttgctcaggtttacctccttccagactttctgtctgagcacagtaaggtgagacttgtgatcgtcgacggcattgcctttccatttaggcatgacctggatgacttgtcgttgcggactcgacttctaaatggcctcgcccagcagatgatcagtctggcaaacaaccatcggttagctgtgattctgacaaatcagatgaccaccaagatagataggaatcaggctttgctggtaccggccttgggtgaatcctggggtcatgccgcaactatcagactgattttccattgggaccggaaacagaggctggcaactctgtataagtcacccagccagaaagagtgtaccgtactgttccaaatcaagcctcaggggttccgcgatacagttgtgacctccgcttgctctttacagacggaggggagcttaagcacgcgcaagcgtagcagagatccagaagaagagctctag

SEQ ID NO: 25988 - DNA, 987 bp, synthetic construct
  misc_feature 1..987: note = Description of Artificial Sequence: Synthetic coding sequence
  source 1..987: mol_type = other DNA
atgggcgtgctgcgggtgggcctgtgccccggcctgaccgaggagatgatccagctgctgcgttcgcacaggatcaagactgtggtggacctggtaagcgctgatctcgaggaagtggctcagaaatgcggcctgtcctataaggccttggtagctctccgacgcgtgctgcttgcccaattctccgcctttcctgttaatggtgctgacctttatgaggagttaaagacatccacggctatcctgtcgactggcatcgggagaatccgcctgtcagggaacgcccgttggctgatgccaaaggtgacggagatcgtaggagggccaggctcagggaagactcaggtgtgtctttgcatggctgcaaatgtggcccacggactgcagcaaaacgtactctacgtcgattccaacggaggcctcaccgcgagtcgcctcctgcagctgctgcaggctaaaactcaggatgaggaagagcaggctgaggccctgcgcaggatacaagttgtacacgcattcgacattttccagatgttagatgtcctccaagagctaagaggaactgtggcacagcaagtgaccggcagctccgggaccgtgaaggtggttgttgtagactctgtgacagcagttgtttcccctctgctcggcggtcagcaacgcgagggattagccttgatgatgcagctcgcccgagagctcaagacacttgctcgggatctgggcatggctgtcgtggtcaccaatcacatcacaagggatagagatagcgggcgactgaaaccggcactgggcaggtcgtggagcttcgtgccttcaactaggatcttactagacacaatcgagggcgcgggtgcctcgggcggccggagaatggcctgcctggcaaagtctagtcgccagcctaccggctttcaggaaatggtggacattgggacgtggggaactagcgagcagtcagctacgctgcagggagatcaaacatag

SEQ ID NO: 25989 - DNA, 987 bp, synthetic construct
  misc_feature 1..987: note = Description of Artificial Sequence: Synthetic coding sequence
  source 1..987: mol_type = other DNA
atgggcgtgctgcgggtgggcctgtgccccggcctgaccgaggagatgatccagctgctgcggtcacaccgcatcaaaactgtggtggatttggtgagtgccgatcttgaagaagtggcgcaaaaatgcgggctgtcctataaagctctcgttgctctcagacgagttctgctcgcccagtttagcgctttccccgttaacggagccgacctgtacgaggagctgaaaacttccacggctattttatccaccggcatcgggagcttggacaaactcctagatgctggcctttataccggtgaggtaaccgaaatcgtgggcggccctggctctggaaagacacaggtgtgcttgtgcatggccgccaatgttgcacatgggctccaacagaatgtgttgtacgtggacagcaacggtggccttacagcctcacgtctcctccagctgctccaagcaaaaacacaggacgaggaagaacaggcagaggcactgaggaggattcaagttgttcatgcttttgatatcttccagatgctggatgtgttgcaggagcttcgcggaacagtggcccagcaggttaccggtagttctggcactgtgaaggtggttgtggtggacagtgtcactgcagtggtgagtccactgctgggaggccagcagagggagggccttgccttaatgatgcaactggctcgcgagctgaaaacactggctcgggacttgggaatggccgtcgtagtgactaaccacatcactcgagatcgggatagcggcaggctgaaacccgccctgggcagatcctggagcttcgtgcccagcacccggatattgctggacacaatagagggtgccggcgccagtggaggcagaaggatggcctgcctcgctaagtcctctcggcaaccgacagggttccaggagatggtggacatagggacatggggaacaagcgagcagagtgcaactcttcaaggcgaccaaacgtag

SEQ ID NO: 25990 - DNA, 651 bp, synthetic construct
  misc_feature 1..651: note = Description of Artificial Sequence: Synthetic coding sequence
  source 1..651: mol_type = other DNA
atgggcgtgctgcgggtgggcctgtgccccggcctgaccgaggagatgatccagctgctgcgcagccatagaataaaaacggtagtggacctggtgtcggccgacctcgaggaggttgcccagaaatgtggcctgagttacaaggccgaggcactcagaagaattcaggtcgtgcacgcttttgacattttccagatgttggacgtgctgcaggagttgcggggtacggtcgctcagcaggtgaccgggtcaagtggaacggtgaaggttgtcgttgtggattctgtcacagcagtcgtgagtcccctgctgggaggccagcagcgggagggcctggctctgatgatgcaactggcccgagaactgaaaaccctggcccgggatctgggcatggcagtggttgtgaccaaccacatcaccagagatcgtgattccgggcggcttaaacctgcactgggtcggagctggagctttgtcccgtcaacaagaatcctgctggacaccattgagggggcaggcgcatccggcgggcgccgcatggcctgcctcgccaaatctagcagacagcccacgggattccaagaaatggtggatatcggcacatgggggacctctgagcagtcagccacacttcaaggtgaccagacatag

SEQ ID NO: 25991 - DNA, 357 bp, synthetic construct
  misc_feature 1..357: note = Description of Artificial Sequence: Synthetic coding sequence
  source 1..357: mol_type = other DNA
atgggcgtgctgcgggtgggcctgtgccccggcctgaccgaggagatgattcagctgctgcgctctcaccgtattaaaacagtggttgatctggtgtcggcggatttggaggaggtcgcccagaagtgcggcttgagttataaggcactggtggcactgagaagggtcctcttagcacagtttagtgcgtttcccgtgaacggggccgacctgtacgaagaacttaaaaccagcactgctatcctgtctaccggaattggacgacatggtggtcgcacacaggtgggaacttgggaggattgcagttgtcttcgaagccctcagggcgacagaggtgtgggttccgggatgctgtag

SEQ ID NO: 25992 - DNA, 852 bp, synthetic construct
  misc_feature 1..852: note = Description of Artificial Sequence: Synthetic coding sequence
  source 1..852: mol_type = other DNA
atgggcgtgctgcgggtgggcctgtgccccggcctgaccgaggagatgattcagctactgcgatctcatcgcatcaagactgttgtggaccttgtgagtgccgatttagaagaggtcgctcagaagtgcgggctgagttacaaggcactggtcgctcttcggagagtgcttctggcccagttcagtgccttccccgtcaatggtgccgacttatacgaagagttgaagacatccacggccattttgtctactggtatagggagtctggataagctcctggatgctggactatatacaggtgaggtgacagagatcgttgggggaccaggcagcgggaagacacaagccgaggctctgagaagaatacaggttgtccacgcattcgacatctttcagatgctcgacgttctgcaagagctgcggggaaccgtggcccagcaggtcactggctcttcgggcaccgtaaaagttgtagtggttgatagcgtaacagctgtggtgtccccgttgctggggggacagcagagggaaggacttgcccttatgatgcagcttgcccgagaattgaaaacactcgcacgggacttgggaatggctgtcgtggtaaccaatcacatcacgagggatcgggatagcggacgactcaagcctgctcttggccgaagttggtcattcgtgcccagtacaagaatattattggacaccatcgagggtgccggagcaagcggggggcgaagaatggcatgccttgctaagtcttcccggcagcctactggcttccaggaaatggtagacatcgggacatggggcacaagcgaacaatcagccacactccaaggggatcagacctag

SEQ ID NO: 25993 - DNA, 1047 bp, synthetic construct
  misc_feature 1..1047: note = Description of Artificial Sequence: Synthetic coding sequence
  source 1..1047: mol_type = other DNA
atgggcgtgctgcgggtgggcctgtgccccggcctgaccgaggagatgattcagcttctgagaagtcacaggatcaagaccgtggttgacttggtgtctgctgacttggaggaggtggcacagaagtgtgggctgtcctacaaaacctggcgtgcccacagctcagggaatctcggtgggctgcagctcccacaggtccccgccggccgcagttggagcggcgttcgcaatgccctcaaaaaagcgggactcggccacgggggtacagatggcctgagcctgaacgcctttgatgagaggggaacagccgtgtccacatctagactagataagttacttgacgcgggactgtacacaggggaagtgactgagatagtcggcggacccggctccggcaaaacccaagtctgtctatgtatggccgcaaatgttgcgcacggtcttcagcagaacgttctgtacgtggactccaacggcggcctgaccgcctctagactgctgcagctgttgcaagcaaagacacaggacgaagaggagcaggccgaggcccttagaagaattcaagtggtgcacgcatttgacattttccagatgctcgacgtgctgcaggaacttcgcgggactgtggctcagcaggttaccggatcaagcggcactgttaaggtcgtggtggtggactccgttaccgcagtggtgtctccactgctagggggtcaacaaagggagggtctcgcgcttatgatgcagctggctcgagaactaaagacacttgccagagatctgggaatggccgttgtcgtcaccaaccatataacaagggatagggattctggacgactgaaaccagccctaggtagatcatggtccttcgtgccctcgacacggatcctgcttgacaccattgaaggcgctggcgccagcggcggtcgccggatggcctgtctggcaaaaagcagccggcagcccacaggattccaggagatggtggatatcgggacttggggcacatctgagcagagtgcaacactccagggagaccagacctag

SEQ ID NO: 25994 - DNA, 648 bp, synthetic construct
  misc_feature 1..648: note = Description of Artificial Sequence: Synthetic coding sequence
  source 1..648: mol_type = other DNA
atggtgatggccgccctgcccttcagcgaggacctgaagatgcccgacacctgcgtgttaccccactgcccaggaaaggaaaataaggatgtggtggatctggtatccgcagacctagaggaggtcgcccagaagtgcggcttaagctacaaagctctcgttgcactgcgtcgcgtcctgctcgctcagttttcggctttcccagtaaacggcgcagatctgtacgaagagttgaaaacaagtaccgctatcttgtctacgggtattggctccctcgataaactgctcgacgccggtctgtacactggggaagtaaccgagatcgttggcgggccaggatccggcaagacgcaggtctgcctttgcatggcagcgaacgttgctcacggcctgcagcaaaacgtgctttatgtggactcaaacgggggactgactgcttcgcgactgctgcagttgctgcaagctaagacccaagacgaagaggagcaggcagaggctctacggcgcatacaggttgtgcacgcatttgacatatttcagatgctcgatgtgttgcaggagctgagaggcaccgtggcccaacaagacgggattcctgagcacctgaatcacattccccactgccttcacgtgcatctaccctgctag

SEQ ID NO: 25995 - DNA, 711 bp, synthetic construct
  misc_feature 1..711: note = Description of Artificial Sequence: Synthetic coding sequence
  source 1..711: mol_type = other DNA
atgggcgtgctgcgggtgggcctgtgccccggcctgaccgaggagatgattcagctactgagaagccacaggatcaagacggtcgtcgatttagtaagcgccgacctggaagaagtggcccaaaagtgcggcctgtcatacaaagcactggtggccctccgaagggttctcctggcccaattctcagcgtttcctgtgaatggcgccgatctgtatgaggagcttaagactagcacagccatcctgtcaacaggcattggtagtttagataagctcctggatgccggcctctacacgggagaggtgacagaaatcgtagggggacctgggtcaggcaagacccaggtatgcttgtgtatggcggctaatgttgcacatggcctacagcaaaacgtgctttatgtagattccaacggaggtctcacagcttctcggctgctccagttgctgcaggcaaagactcaagatgaagaggagcaggccgaggccctgcgccgaatccaggtggtacatgcatttgacatcttccagatgctcgacgtcctgcaagagctgcgtgggaccgtcgctcagcaagttacaggcagttctggcactgtcaaggtggtggttgttgacagcgtgacagcggtagttagccccttattgggcgggcagcagagagagggtcttgccttaatgatgcaattggcccgcgagttaaagacttag

SEQ ID NO: 25996 - DNA, 1047 bp, synthetic construct
  misc_feature 1..1047: note = Description of Artificial Sequence: Synthetic coding sequence
  source 1..1047: mol_type = other DNA
atgggcgtgctgcgggtgggcctgtgccccggcctgaccgaggagatgatacaattactccggtcccaccgcataaagacagtcgtggacttggtgtcagccgacctcgaagaggtggcccagaaatgcggcctgagctataaaacttggagagcccactcctcaggaaatctcggtgggctgcaactgccgcaggtaccagccggaaggtcgtggagcggagtgcggaacgcgttaaagaaagccggcctgggccacggcggaaccgacggcttgtccctcaatgccttcgacgagagggggacggccgtctccaccagccgattggacaaattgttggacgcaggcctgtacaccggagaagtgacagagatagttggaggacccggcagtggtaaaacccaagtgtgtctgtgcatggctgcgaatgtggcacacgggcttcagcagaatgtgctgtacgtggactcaaacggtggcctgacggctagccggcttctgcagctgctccaggctaagactcaggatgaagaagagcaagccgaagctttgcgccggatccaggtagttcatgcttttgatattttccaaatgctagacgtccttcaggagctccgcggaaccgtcgcccagcaggtgacaggaagttctgggactgtgaaagtagtggtggttgacagcgtcacagctgtcgtgtcacccctcctgggtgggcagcagcgcgagggactggctttaatgatgcaattggcccgtgaactcaagacgcttgcacgtgacctcggcatggctgtcgttgtgaccaatcatattaccagagatagagactccgggcggctgaagccagctctgggaaggagctggtcttttgtgccaagtacccgcatcctgcttgacactattgagggagccggagctagtgggggtcgaaggatggcctgcctcgctaaaagctctagacaacccactggattccaggagatggtcgacatcgggacctggggcaccagtgaacagagtgctactctccagggtgatcagacatag

SEQ ID NO: 25997 - DNA, 1257 bp, synthetic construct
  misc_feature 1..1257: note = Description of Artificial Sequence: Synthetic coding sequence
  source 1..1257: mol_type = other DNA
atgagcggcaccgaggaggccatcctgggcggccgggacagccaccctgcggcggggggcgggtcagtactttgttttgggcagtgccagtacactgctgaagagtatcaggcaatacaaaaggccctccgacagcggctcgggcctgaatacatctcctcacgcatggctggaggagggcaaaaggtgtgctatattgagggccatagagtgatcaacctggccaatgagatgttcggctacaatggctgggcacattcgattacacagcagaatgtcgatttcgtcgacctgaacaacggaaagttttatgtcggagtgtgtgcattcgtgagggtgcagctgaaagatgggagctaccacgaagacgtaggctacggcgtgtctgaggggctgaaatcaaaggctctgagcctggagaaggcccggaaagaggctgtcacagacggccttaaacgcgcgctgagatccttcgggaatgccttaggcaactgcatcctcgataaagactatctgcgctctctgaataagctacctcgccagctgccccttgaagtcgatttgactaaggccaaaaggcaggacttggaaccatcggtggaagaagcccgctacaattcctgcagaccaaatatggcactgggccatcctcagttgcagcaggttacgtctccctccaggccgagtcacgccgtgataccagcagaccaggactgtagtagccgatctctgtcaagctccgctgtggagagcgaagcaactcaccagcgcaaattgcgtcagaaacagctgcaacagcaatttcgggagcgcatggagaaacagcaggttagagtgagtacgccctccgcggaaaaatccgaggctgctcctcctgcccctccggtgacccattctactcctgttacggtgtcggagcccctgttagagaaagacttcctggccggcgtgactcaggagctaattaaaaccttagaagataacagtgagaagtgggcggtgacccctgatgcaggggatggcgttgtgaagccaagttctcgagcagaccccgctcagactagcgacacattagccctgaacaaccagatggtgacgcagaaccgtacaccgcacagcgtctgccatcagaagccccaggcaaagtctggatcgtgggatctgcagacatattctgctgatcaacggacaaccgggaactgggagagtcacagaaaatctcaagatatgaagaaacggaagtacgatccatcttag

SEQ ID NO: 25998 - DNA, 1257 bp, synthetic construct
  misc_feature 1..1257: note = Description of Artificial Sequence: Synthetic coding sequence
  source 1..1257: mol_type = other DNA
atgagcggcaccgaggaggccatcctgggcggccgggacagccaccccgccgctggcggtggatcagtattgtgtttcggccagtgccagtatacagctgaagaataccaggccattcagaaagcccttcgacaaaggctgggaccagagtacatctcgtccagaatggcaggaggaggtcagaaggtgtgttatattgaggggcatcgtgtgatcaatctggcaaacgaaatgtttggatacaatggctgggcccattccattacgcagcagaacgtcgactttgtcgatctgaacaacggcaaattctacgtcggcgtctgcgcttttgtcagggtgcagttaaaggatgggtcttaccatgaggacgttggttacggcgtctccgagggcctgaagtccaaagctttgtccctggagaaggcgaggaaagaggctgttaccgatgggcttaaacgggccctcagaagtttcggtaacgctttggggaactgcatcctcgataaggattatctgcgctctctgaataagttgccaaggcaactgccgctggaggttgacttgaccaaggccaagaggcaggacctcgagcctagcgtggaagaagccaggtataattcatgccgacctaacatggcactcgggcacccccagttgcagcaggtcacctccccctccagaccaagccatgcagtcataccggccgatcaggattgttcctctcgttctctgtcttcatctgcagtggagtcggaggctacacaccagcggaagctcagacaaaagcagttacagcagcagttccgcgagcgaatggaaaaacagcaggttcgggtatccacacctagtgcagaaaaaagcgaagcggcaccaccagcaccgccggtaacccactccacccctgtaaccgtcagcgagcctctgttggagaaggatttcctggccggggtgactcaggaattaatcaaaacactggaggataatagcgaaaaatgggccgtgactcccgacgcgggggacggcgtggtgaagccaagctcccgggctgaccctgcccagacaagcgacactctggctctgaacaaccagatggttactcaaaacagaacccctcactccgtgtgtcaccagaagcctcaggctaagagcggttcatgggatctccaaacatactcagccgatcagaggacaacaggaaactgggagtcccataggaaaagccaggatatgaaaaaacgcaaatatgacccatcctag

SEQ ID NO: 25999 - DNA, 1026 bp, synthetic construct
  misc_feature 1..1026: note = Description of Artificial Sequence: Synthetic coding sequence
  source 1..1026: mol_type = other DNA
atgttcggctacaacggctgggcccacagcatcacccagcagaacgtagatttcgtggatttgaataatgggaaattctatgttggggtttgcgcttttgtgcgagttcagttgaaagacggctcctatcatgaagacgtaggatacggggtgtccgaaggtcttaagtccaaggccctttctctggagaaagcccgaaaagaagctgtaacggacggtttgaaacgggctctgaggtcctttggcaatgcactgggtaattgtatcctggataaggattatctgagatcactcaacaagctcccacggcagctgcccctcgaggtggatctcacaaaggcaaaacgtcaagacctagaacccagcgttgaagaggctcggtacaacagttgtagaccaaacatggccctcggccatcctcagttacagcaggtcacaagcccatcccgcccttctcacgcggtcataccggcggatcaggattgcagttctcggtcactgtctagctccgccgtggagtcggaggccacacaccagcgaaagctgaggcagaaacagttgcagcagcaattcagggaaaggatggagaagcaacaggttcgcgtaagtactcccagtgccgaaaagagcgaggccgcccccccggctccccccgtcactcactcgacccccgtgacagtgagcgaaccgctactcgagaaagacttcctggcaggcgttacgcaagaactgattaagacgcttgaggacaattccgaaaagtgggcagtcaccccagatgccggcgacggggtggttaaaccatcttcacgggccgatcctgcccagacatcagatacccttgcgctcaataaccagatggtgactcagaaccggactccccattcagtctgtcatcagaaaccccaggccaagagcgggagctgggacctccagacctatagcgcggaccagcgcacaacaggaaactgggaaagccaccggaagtctcaggacatgaagaagagaaaatacgatcctagctag

SEQ ID NO: 26000 - DNA, 681 bp, synthetic construct
  misc_feature 1..681: note = Description of Artificial Sequence: Synthetic coding sequence
  source 1..681: mol_type = other DNA
atgagcggcaccgaggaggccatcctgggcggccgggacagccaccctgcagccggtggagggtctgtcctgtgcttcggccagtgccagtacactgcagaggagtatcaagccatccagaaagccctgagacagcggctggggccagaatacatctcctcacgaatggccggtggaggccagaaggtctgctacatcgaggggcacagagtgattaacctggccaatgagatgttcgggtataacggctgggctcacagcattacccagcagaacgtggactttgtggatctgaataacggtaagttctatgtgggagtctgcgcctttgtgagggttcagctcaaggatgggtcataccacgaggacgtggggtacggagtgagcgaggggttgaaatctaaggcactctctctcgagaaggctagaaaagaggccgtgacagacgggctgaagcgcgctctgcggctgcctctcctgggggtcagcgggcggattttgtacagcctgttctccgtgcattctgtcatgtgtgccggcgggctccccaccccaactgcctctgctcagactgcaccctcttctccttgctcatctgctgtacttagatatgctcaagagttctgggaatgcacatggaagctgtatagcggacagcgattgcccgagataaccaagtag

SEQ ID NO: 26001 - DNA, 2244 bp, synthetic construct
  misc_feature 1..2244: note = Description of Artificial Sequence: Synthetic coding sequence
  source 1..2244: mol_type = other DNA
atgcggcggagcctggcccccagccagctggccaagcggaagcccgagggaagatcttgtgacgacgaggactggcagccgggactcgtgactcctcgtaagcggaagtcctcgagcgaaacccagatccaagagtgttttctatctcccttcaggaagcccctctctcagttgaccaaccagcctccatgcttggattccagccagcacgaggcattcatcaggagcattctctctaaacctttcaaggtgcctatccccaactatcagggacctctgggcagtagggctctgggcctgaaaagggccggggtgcgccgggcactgcacgatcctctcgagaaagacgccttagtattgtacgagccgcctcccctcagcgcacacgaccaattgaagctagacaaagaaaaattgcctgttcacgtcgtggtagatccaatactctcaaaagtgctgcggcctcaccaacgcgagggagtgaagttcctttgggagtgcgtaactagtcggcggattccaggctcacatggctgtatcatggcggatgaaatgggcctgggaaagactttgcagtgtatcactttgatgtggactctgttaagacagagtcccgaatgcaaacctgaaattgacaaagccgtagtagttagcccgtcgtcgcttgtcaaaaattggtacaatgaggtggggaagtggctaggcggcaggatccagcctctggcaatagacggcggttcaaaggacgagatcgaccagaaactggagggattcatgaaccaacggggcgctagagtgtccagcccaatacttatcatctcatacgaaacattcaggctgcacgtgggcgtattgcagaaggggagcgtgggtctggtcatttgtgatgaggggcaccggctaaagaattccgaaaaccagacttaccaagctttagacagcctcaatacgtctcggagggtccttattagtggaaccccgatccaaaacgatctactggagtacttttctctagtccacttcgtgaactcaggcatcctgggcacagctcacgaatttaaaaagcatttcgagctgccaattctgaaaggccgggatgcagctgcctctgaggcggacaggcagcttggcgaggaacgactgagggagctcacatctattgtcaaccgctgcttgattcgtaggacaagcgacatcctgtctaagtatctcccagtgaaaatcgaacaggtggtgtgctgtcgactgacccctctacagaccgagctgtacaaaagattcctcaggcaggcaaaacctgcagaggagctcctcgaaggaaaaatgtctgtctcttccttatccagtattacctccctgaaaaagctgtgcaaccacccagcgctgatatatgataagtgtgtggaagaggaggacggatttgtgggcgccctcgatttgttcccacccggatatagctctaaggctctggagccgcagctgtcaggcaaaatgctggtgctggactatatcctggcggtgactaggtcccgctcttctgataaggtcgtgttagtcagcaactacactcagaccctggatttgttcgagaaactttgcagggccaggcggtacttgtatgtgagattagatgggactatgagtattaaaaaacgcgccaaagttgtggagcggtttaactccccctcctctcctgattttgtgttcatgctgagctctaaggccggcgggtgtgggctgaatctcataggagcaaatcggcttgttatgtttgatcccgattggaatcccgccaacgacgagcaggccatggcccgtgtgtggagggacggccagaaaaagacctgttacatttatagattactgtccgcgggcacgattgaggaaaagatcttccagcggcaatcccataaaaaggccctatccagttgcgttgtggatgaggagcaggacgttgaaaggcacttctccctcggggagctcaaagagcttttcatcttagacgaggcctcactttccgatacacatgaccgactccactgccggaggtgcgttaattcccggcagatccggcctccaccagacggctccgattgcaccagtgacctcgccggttggaaccactgtacagataagtggggactgagagatgaggtcctccaagctgcatgggatgcggccagtaccgcaatcacctttgtcttccatcaacggagccacgaagagcagagagggttaaggtag

SEQ ID NO: 26002 - DNA, 2244 bp, synthetic construct
  misc_feature 1..2244: note = Description of Artificial Sequence: Synthetic coding sequence
  source 1..2244: mol_type = other DNA
atgcggcggagcctggcccccagccagctggccaagcggaagcccgagggcaggagctgcgacgatgaagattggcagcctggactcgtaacaccaagaaaaagaaagtcgagtagtgagacccaaattcaagaatgttttctgagcccctttcgcaaaccactatctcagctgaccaaccagcccccttgccttgacagcagccagcatgaagcgttcataagatcaatcttaagcaaaccatttaaggtaccaattcctaactaccagggtcccttaggctctagagctctgggattgaaacgcgcaggggttaggcgagcactgcacgaccctttggagaaagacgcgctcgttttgtatgaacctcctccactttcggcacatgaccagctgaaactggacaaggagaagctgccggttcacgtggttgtagaccccattttgtctaaggtgttaagaccgcatcagagggaaggagtaaagtttctgtgggagtgcgtgacgtcacgaaggattccaggaagccacgggtgcatcatggctgacgaaatggggctcggtaagactcttcagtgtattactttaatgtggacactgctacgccagagcccggagtgcaaacccgagatagataaggcagtggttgtcagccccagttccttggtgaaaaattggtataacgaggtgggaaaatggctgggagggcgcatacagcccttagccatcgacggaggttctaaggatgagattgatcagaaactggagggcttcatgaatcagagaggcgctcgcgttagttcgccgatcctgatcatttcctatgagaccttcagactccacgtaggggtactccagaagggcagcgttggactggtgatttgcgatgaaggacaccgattaaaaaactccgagaaccaaacataccaagcactcgactcactcaataccagtcgccgcgtactcatcagtggaacccccatccagaacgatctattagagtatttcagtttagtgcattttgtaaattcaggcattctagggactgcacacgaatttaagaaacacttcgaactccctatactcaaagggcgtgacgccgccgcaagcgaagcagatcgccagctaggagaagagaggctgagagagctgaccagtatcgtgaatcgctgtctgataagaaggacatctgatattctctccaagtacctgcccgtgaagatcgagcaggtcgtgtgttgcagacttacgcctctgcaaaccgagttatacaagagattcctccgacaggctaaacctgctgaagaactgcttgaggggaagatgagcgtgagctcattgtctagtattacttccctcaaaaaactgtgtaatcaccctgcattgatctatgacaagtgcgtcgaagaggaagacggcttcgtgggcgctttggacctatttccccctggttactctagtaaagcacttgagccccaattgtcgggcaagatgcttgtgctcgactatattctggccgtgacccgatctcgatcatccgataaagtggtgctcgtttccaactatactcaaactctggacctcttcgagaaactctgtagagccaggcggtacttgtacgtgcggctcgacggcacaatgtctatcaagaagcgcgctaaagtagtagagcggtttaactcaccttccagcccagatttcgtcttcatgctgtcttctaaagcagggggatgtggattaaacctaatcggggcgaacaggctggtaatgttcgatccagactggaaccctgctaacgacgaacaggcaatggcgagggtgtggcgcgacggccaaaaaaagacttgttacatctacaggcttttgtctgcaggtacaatagaagaaaaaatttttcagcgccagtcccacaaaaaagccctgtctagttgcgtggtcgacgaagagcaggatgttgagcgccatttctctcttggtgaactgaaggaactgttcattttagacgaagcgtccctgtccgacacgcacgatagacttcactgtaggcgctgcgtcaatagccgacagattcgcccacctccagacggctcagattgcacatccgacctggctgggtggaaccactgtactgacaagtggggtctgcgggatgaagttctgcaggccgcatgggacgctgcgagtactgctattacttttgttttccaccaaaggagccatgaggaacagaggggactccgctag

SEQ ID NO: 26003 - DNA, 1704 bp, synthetic construct
  misc_feature 1..1704: note = Description of Artificial Sequence: Synthetic coding sequence
  source 1..1704: mol_type = other DNA
atggccgacgagatgggcctgggcaagaccctgcagtgcatcaccctcatgtggaccctgctgaggcagtcgcctgagtgcaagcctgaaatagataaagcagtggtggtatcaccctccagtctagtaaaaaactggtacaacgaggttggtaaatggctgggaggtcgcatccagccactggcaatcgacggtggttcaaaggatgaaatcgatcagaagctcgagggcttcatgaaccagagaggagctagggtgtctagtcctatcctgattatctcatacgagacttttcgcctgcacgtaggtgtgttgcagaaaggctcggtagggctggtcatctgtgatgaaggacatcgactcaaaaacagcgagaaccagacatatcaggctcttgacagcctcaataccagtagacgtgtgttgatcagtgggacccctattcagaacgacctcctggagtacttttccttagtacacttcgtaaatagtgggatcctcgggaccgcccatgagtttaagaaacatttcgagttgcctattctcaaaggcagggacgccgcggcctctgaggccgatagacagcttggcgaggagcgtctccgcgaactaactagtatagtgaaccgctgtctgattcgacgtacctctgatatcctgtccaagtatttgccagtcaaaatcgaacaggtggtctgttgtaggctcacacccctgcaaactgaactctacaaacggtttctgcgccaggcaaagccggctgaggaactgctggaaggaaagatgtccgtcagcagcctgtcctcaataacatccctgaagaagctgtgcaaccaccctgcactgatttatgataaatgtgtggaggaggaagacggatttgtgggggccttagacctctttccgcccgggtacagctccaaagccctggaaccccagctctctggcaagatgctggtgttagattacattctggcggtcacacggtctcgttcatcggacaaggtcgtgctggtttcaaactacacacaaaccctggacctctttgaaaaactgtgtcgcgctaggaggtatctttatgtgaggctggatgggacgatgtctataaaaaaaagggctaaggtggttgagcgctttaatagtccttctagcccagacttcgtcttcatgctctcatcaaaggcgggaggatgcggactgaacctgataggtgccaataggctcgtgatgttcgacccggattggaacccagcaaatgatgagcaggccatggcgcgcgtgtggagagacggccagaaaaaaacctgttacatctatcggctgctgagcgctggcaccatcgaagagaagatctttcaaaggcagtctcacaagaaagccttaagctcttgtgtcgtggacgaagaacaggacgtagagcgccatttttctctgggcgagttaaaggagctctttatcctcgacgaagccagcctgagcgatacacacgaccgccttcattgcagacgatgtgtgaattctcggcagatcaggccaccccccgatggctcagattgcacctccgatttggcagggtggaatcattgcacggacaagtggggattgcgagatgaggtcctgcaggctgcctgggacgccgccagcaccgccatcacatttgtgttccatcagcgcagtcacgaggagcagagaggccttagatag

SEQ ID NO: 26004 - DNA, 1176 bp, synthetic construct
  misc_feature 1..1176: note = Description of Artificial Sequence: Synthetic coding sequence
  source 1..1176: mol_type = other DNA
atgaagtgcctggtgaccggcggcaacgtgaaggtgctgggcaaggcagtgcattcactcagccgcattggagacgagctgtatctcgagcccctcgaagacggcctgtctcttcgaacagtcaactcaagccgaagcgcctacgcgtgctttttgttcgcccctctgttctttcagcagtaccaggccgccaccccaggacaggacctgctgcggtgtaaaattctaatgaagagctttctctctgtctttcggtccctggcgatgctggaaaagactgtcgaaaagtgttgcatctctctaaatggccgctcatctaggctcgttgtccagctgcactgtaaattcggtgtccggaagacacataacctgagcttccaagattgcgaatcactacaagctgtgttcgatccagctagctgccctcacatgctcagggccccagccagagtgctcggcgaagccgtcctccctttcagtccagccctggcagaggtcactctgggaatagggagaggacgtcgagttatcctgaggtcatatcatgaagaagaggccgattcaaccgctaaagccatggtcacagagatgtgtttgggagaggaagacttccaacaacttcaggcacaggagggtgtggcaatcactttttgcctgaaagagtttagaggtctcctgtctttcgcggagtcagctaatctgaacttatctattcacttcgacgcccctggcagaccagctatattcacaatcaaagacagtctcctagacggtcacttcgtgctagccactctgtctgacaccgattcccactctcaggatctgggctcccctgagcgtcatcagcccgtgccccagctccaggcccactccacaccccacccagatgactttgcaaacgacgatatcgactcatatatgattgctatggaaaccaccatcgggaatgaagggtcgcgagtgttaccttccatcagtctgtctccaggacctcagcctcctaaatctcccgggcctcatagcgaggaggaagatgaggccgagccttccaccgtgcccggaactccgccccctaagaaattcaggagcttattttttgggagtatcctggcccctgttcgttccccccagggcccatccccggtgctcgcagaagatagcgagggcgagggctag

SEQ ID NO: 26005 - DNA, 1752 bp, synthetic construct
  misc_feature 1..1752: note = Description of Artificial Sequence: Synthetic coding sequence
  source 1..1752: mol_type = other DNA
atgcccaagcccatcaacgtgcgggtgaccaccatggacgccgagctcgaatttgccatacagcctaataccacggggaaacaactgttcgatcaggtcgtgaaaactgtgggcttaagagaagtgtggttctttggcttacagtacgtggatagtaaagggtactccacctggctgaagctaaacaaaaaggtgacgcagcaagacgtcaaaaaggaaaaccccttacaattcaaatttagagccaaattctttccagaagatgtgagcgaagaattaatccaggagataacacagcgcctgttcttcctgcaggtcaaggaggcgatactgaacgacgaaatctactgccccccagaaacagccgtgctgctggcttcttacgctgtgcaggccaagtacggcgattacaacaaagagattcataagcccggctacctcgccaacgacaggcttctgccccagcgggtgctggagcagcacaagctgaccaaggaacagtgggaggagagaatccagaactggcacgaggagcatcgtggtatgctcagagaggactctatgatggagtatctgaagatcgctcaggatctagaaatgtacggtgtgaattattttgaaatcaaaaataaaaaagggaccgagctgtggctgggcgtggatgctctgggcctgaacatatatgaacacgacgacaagttgactccgaaaatcggattcccgtggtcggaaattcggaatatctcctttaatgataaaaagtttgtcatcaagcccatcgataagaaggcccctgactttgtgttttatgcgccccgccttcgtatcaacaaacgcatcctcgccctttgcatgggtaaccacgagttatacatgcggcgtaggaaacccgataccatagaagtgcagcagatgaaggcccaggcccgtgaggaaaagcatcagaagcagctggagagagcacagctagaaaacgaaaagaaaaaaagagaaattgcagaaaaggaaaaagaaagaatcgaacgcgagaaagaagaactgatggagcgcctcaaacagatagaggagcaaacaataaaagcacagaaggaattagaagagcagacccgaaaagccctggagctcgaccaggagaggaagagagctaaagaggaggctgaacgactggaaaaggagagacgtgctgccgaggaggcaaagagcgcgatcgccaagcaagcggcggatcagatgaaaaaccaagagcagctcgccgcggagctcgccgagttcaccgctaagatagccttgctcgaagaagcaaaaaagaaaaaagaagaagaagccactgaatggcagcataaggcgttcgccgctcaggaagacctggaaaagaccaaagaggaactgaagaccgtaatgtctgcaccaccccctcccccaccgccccctgtcatcccgcctaccgagaatgagcatgacgaacacgacgagaacaacgccgaggcatcggcggaactgtccaatgagggtgtaatgaaccatagatctgaagaggaacgtgtgaccgagacccagaagaacgaaagggttaagaagcagctgcaggccctgtcttccgaactggcccaggcccgagacgagactaaaaagacgcagaatgatgtattgcacgccgaaaacgtgaaagcaggacgcgacaagtacaagaccttgcgacagatcaggcagggaaataccaaacagaggattgatgagtttgaggccatgtag

SEQ ID NO: 26006 - DNA, 1815 bp, synthetic construct
  misc_feature 1..1815: note = Description of Artificial Sequence: Synthetic coding sequence
  source 1..1815: mol_type = other DNA
atgcccaagcccatcaacgtgcgggtgaccaccatggacgccgagctggaattcgccatccagcctaacaccactggaaagcagctgtttgaccaagttgttaaaacagtggggctcagggaggtgtggttcttcggcttacagtacgtggacagcaagggctattcaacttggcttaaacttaacaagaaagtgactcaacaggacgtgaagaaagagaaccctctgcaattcaagtttagggcaaagttcttccctgaggacgtcagtgaggaacttatacaggaaatcacccagcgtctcttttttctgcaggttaaggaagccattcttaacgacgaaatctactgcccccccgaaaccgcagtgctgttggcgtcctacgcggtgcaggccaagtatggagattacaacaaagagatccataaacctggctacctggccaatgatcgcctgctgccccagcgtgtcctggagcagcacaagctgactaaggagcagtgggaagagaggattcaaaactggcacgaagaacacaggggcatgctgagagaggattccatgatggaatatttaaaaatcgcgcaggatctggagatgtacggagtgaactatttcgagatcaaaaacaagaaaggcacagaactctggctcggcgtcgacgctctcgggctgaacatctatgaacatgacgacaagctgacgcctaaaatcggcttcccctggtcagagattagaaatatttcctttaatgataagaaattcgtgatcaagcccatcgacaagaaggcacccgatttcgtgttttacgccccacgactgcgcataaataagcgcatcttggccttgtgcatggggaaccacgagctttacatgcggcgccgcaagcctgacacaatcgaggtgcaacagatgaaagcacaggctcgggaggagaagcaccagaagcaactagagcgcgcgcagcttgagaacgagaaaaagaagagagagatcgccgagaaagagaaagagcgcattgaaagggagaaggaggagcttatggaaaggctcaagcagatcgaggaacagaccattaaagcccagaaagagctcgaagaacagacccgaaaggccctggagctggatcaagaacgaaagagggcaaaagaggaagctgaaaggttggaaaaggaacggcgagcggcggaagaagctaaatcagcgattgcaaaacaggccgcagatcagatgaaaaatcaggagcagctcgccgcagaactggctgaattcacggctaagatcgctctgctggaagaagctaagaagaaaaaagaggaggaagccactgaatggcagcataaggcatttgctgcccaggaggacctagaaaaaaccaaagaagagctcaaaacagtgatgtcagccccacctccaccgcctcccccccctgtgatcccacctacggaaaacgagcacgatgagcacgacgagaataatgccgaggcttcagccgagctgagcaatgagggcgtaatgaatcaccggagtgaagaggagcgcgtgacggaaacacagaagaacgaacgagtgaagaagcaactgcaggctctttctagtgaactggcccaggcacgggacgaaacgaagaaaacccagaacgatgtgctgcatgcagagaatgtcaaagccgggcgggacaagtataagacgttgcgtcaaattcggcaaggcaatactaagcagagaattgacgagttcgaagctatgtggggcccaaaactgtatgccttgtttcagatgagatcgtgccagagctcgattaagcagatgtag

SEQ ID NO: 26007 - DNA, 1020 bp, synthetic construct
  misc_feature 1..1020: note = Description of Artificial Sequence: Synthetic coding sequence
  source 1..1020: mol_type = other DNA
ccccaccccaagatcaacgtgcgggtgaccaccatggacgccgagctggaattcgccatccagcctaacactactggtaagcaactgttcgaccaggtcgtgaagaccgtgggacttagggaagtctggttctttggcttacaatacgtcgatagtaaggggtatagcacatggctgaagttgaacaaaaaggtaacgcagcaggatgtgaagaaagagaacccgttgcaattcaaatttcgggccaaattctttccagaagacgtgtccgaggagctgatccaggagatcacccagaggctgttcttccttcaggtgaaagaggccattctgaacgatgagatatattgccctcctgaaactgccgttttgctcgcttcatatgccgtccaggctaagtatggggactataataaagaaattcataaacccgggtatctagcaaatgataggctactcccacagagggtactcgagcaacacaaactgaccaaagagcagtgggaggaacgcatccagaattggcacgaagaacaccggggcatgctcagagaggattcaatgatggaatatttgaaaatagctcaggacctggagatgtacggggtgaactactttgagattaagaacaaaaagggaactgagctgtggttgggagtggatgcacttggcctgaatatctatgagcacgatgacaaattaaccccaaaaatcgggtttccttggagcgagattcggaatattagctttaatgacaagaagtttgtgatcaaacctatcgataaaaaagctccagatttcgtgttctacgctccacgcctccgcattaacaaaaggattctggctctctgtatggggaatcacgaattgtatatgagacggcggaagccagacactatcgaagttcagcaaatgaaggctcaggcacgggaagagaaacatcagaagcagctggagagatcccgcctaagcaagattaagaagaagaagcgaaaaaaaaagaaaaagaaaaagaagtag

SEQ ID NO: 26008 - DNA, 1815 bp, synthetic construct
  misc_feature 1..1815: note = Description of Artificial Sequence: Synthetic coding sequence
  source 1..1815: mol_type = other DNA
atgcccaagcccatcaacgtgcgggtgaccaccatggacgccgagctagaattcgctattcagccaaacacgacaggcaaacagctgttcgaccaggttgtgaaaacagtgggtctcagggaagtgtggtttttcgggctccaatacgtggactccaaaggatattctacttggctaaaattaaacaagaaggtaacacagcaggatgtgaaaaaggagaatcccctccaattcaagtttcgtgcgaaattcttcccagaggacgtgtccgaggagctgatccaggaaatcacccaacgtttgtttttccttcaagtcaaagaggctatcttaaatgacgagatctactgtcctccggaaactgcagttctgctggccagttacgcagtccaggccaagtacggagactacaataaagaaatccataagccaggctacctagccaacgataggctgctcccccagagggtgctggagcaacataaactgacaaaggaacaatgggaggaacgtattcaaaactggcatgaagagcacagaggcatgctgagggaggatagcatgatggaatatttgaagattgctcaagatcttgaaatgtacggcgtgaattattttgaaattaaaaacaagaaaggcactgaactttggcttggggtggatgccttggggcttaacatctacgagcatgatgataagcttactcctaaaattggcttcccatggagcgaaatccgcaacatttcatttaacgataaaaaattcgtcataaagccaatcgataagaaagctccagatttcgtgttttacgcaccacgccttaggattaataaaaggatattggcactgtgcatggggaaccacgagctgtatatgcgcagacggaagccagataccattgaggtgcagcaaatgaaggctcaagctagagaagagaagcaccagaaacagttggagcgggctcaactggagaacgagaagaagaagagggagatcgccgaaaaagaaaaggagaggattgaaagggaaaaagaagaactcatggaaagactgaagcaaatcgaggagcagactataaaagctcagaaggaactggaggaacaaacccggaaggcccttgagctggatcaagagcgtaagcgcgccaaggaagaggccgagcggctggaaaaggagagaagggccgcagaggaggcaaagagcgccattgctaagcaggccgctgaccaaatgaaaaatcaagaacagctagccgccgaactggcagagttcaccgcgaaaatcgccctattggaggaagctaagaaaaagaaggaagaagaagccacagagtggcagcataaagcatttgcagcccaagaagatttggagaagaccaaagaggaactgaagactgttatgagtgcgccccctcccccgcccccgccaccagtcattcctcctacagaaaacgagcacgatgagcacgatgagaacaatgccgaagcctcagctgagctaagtaatgaaggagtcatgaaccaccggtccgaggaagagagagtgaccgaaactcaaaagaacgagcgcgtaaagaagcagctgcaggccctgtcctccgagctcgcccaggcccgtgacgagactaaaaaaacccagaatgatgtgctgcacgctgagaacgtgaaggctgggcgggataagtacaaaactcttcggcagattagacagggcaacactaaacagaggatagacgagttcgaggccatgtgggggcctaaactatatgctctgtttcagatgcggagttgtcaaagcagtataaagcagatgtag

SEQ ID NO: 26009 - DNA, 774 bp, synthetic construct
  misc_feature 1..774: note = Description of Artificial Sequence: Synthetic coding sequence
  source 1..774: mol_type = other DNA
atggagcggctgaagcagatcgaggagcagaccatcaaggcccagaaagaactggaagagcagacccgcaaagcgctggagttggatcaggagagaaagagagccaaggaagaagctgaaaggcttgagaaggagagacgggcagccgaggaggccaagtcagccatcgcgaaacaggcagccgaccagatgaaaaaccaggagcagctcgccgctgagctggccgaattcacggccaaaattgctctactggaagaagctaaaaagaaaaaggaggaagaagccactgagtggcagcacaaagcatttgccgcccaggaggatcttgagaaaacgaaggaagaactgaagactgtgatgtctgctccccccccaccaccaccccctcctgtaataccaccgacagagaacgagcatgacgagcacgacgaaaataacgccgaagcatcggccgaactgagcaatgagggggtgatgaaccacagatccgaggaagagagggtgacagagacgcagaaaaatgagagggtgaaaaagcagttgcaggccctttcttctgaactagcccaggctagagatgagaccaaaaaaacccagaacgacgtattacatgctgagaatgtgaaggcgggtcgtgacaagtataaaacacttcgtcagatccgacagggaaatacaaaacagagaattgacgagttcgaggcaatgtggggcccgaagctctacgcactgttccagatgcggtcgtgccaatcctcaatcaagcagatgtag

SEQ ID NO: 26010 - DNA, 762 bp, synthetic construct
  misc_feature 1..762: note = Description of Artificial Sequence: Synthetic coding sequence
  source 1..762: mol_type = other DNA
ggcggccggatcgcccgggcccacgagttcgaggccgccgtgagcttctgtacgtccgcttgggctacagagagagatcctgtgtcgcgaaagcagagagagctagaggaacagacacgcaaagcgctcgagctggaccaagaacggaaacgtgccaaggaggaggccgagcgactggagaaagagaggcgggctgcggaggaggccaaatccgccatcgccaaacaggcagcagaccagatgaagaaccaggagcagctggcggccgagttggctgaatttaccgcaaagatcgccctccttgaggaggcaaagaaaaagaaggaagaggaagccacagagtggcaacacaaggctttcgccgcccaggaggacttggaaaagaccaaagaggagcttaagaccgtaatgagcgcgccacccccgccccctcctcccccagtcataccacccaccgaaaatgaacatgacgaacatgatgaaaacaacgcggaggctagtgccgagctgagtaatgaaggagtgatgaatcataggagcgaggaagagagggttacagagacacaaaaaaacgagagggtcaagaagcagctgcaggctttatcctcggagcttgcacaagctcgcgacgagaccaagaaaactcagaatgacgtactccacgctgagaacgtgaaggcaggcagagataagtacaagaccctgagacagatacggcagggaaatacaaagcagcgaatcgacgaatttgaggcaatgtag

SEQ ID NO: 26011 - DNA, 603 bp, synthetic construct
  misc_feature 1..603: note = Description of Artificial Sequence: Synthetic coding sequence
  source 1..603: mol_type = other DNA
atgcccaagcccatcaacgtgcgggtgaccaccatggacgccgagctagagtttgccatccaacccaatacaaccggcaagcagctgttcgaccaggtcacacagcaggacgtgaagaaggaaaacccactgcagttcaagtttagagctaagtttttcccagaagacgtgtctgaagagctcatccaggagatcacccagaggcttttttttttgcaggtcaaagaggcgatcttgaacgacgagatctactgccctcctgagacggcagtgctgttggcctcttatgccgtgcaggccaaatacggtgattataataaggagatacataagcccggctatctagcgaacgaccgattgctcccccaacgagttcttgagcagcataagctgaccaaggaacaggatgaaacgaaaaaaacccaaaatgacgtgctgcatgctgaaaacgtgaaagcgggtcgcgacaaatacaagactttgcggcaaatccgccaggggaacaccaaacagaggatcgatgagttcgaggctatgtggggccctaagctgtacgctttgtttcagatgcgaagttgccagtcaagcatcaaacagatgtag

SEQ ID NO: 26012 - DNA, 1815 bp, synthetic construct
  misc_feature 1..1815: note = Description of Artificial Sequence: Synthetic coding sequence
  source 1..1815: mol_type = other DNA
atgcccaagcccatcaacgtgcgggtgaccaccatggacgccgagctcgaattcgccatacaaccaaatacgaccggcaagcagctgttcgaccaggtagtgaagactgtgggcctgcgcgaagtttggtttttcggcctgcagtacgttgattcgaaaggatatagcacttggttgaagctcaacaaaaaggtcactcagcaagacgtcaagaaagagaatcccctgcagtttaagttccgcgccaaattttttcctgaggatgtatctgaagagttgattcaggaaataactcagcgtctgttctttttgcaggtgaaagaggcaatactgaacgatgagatctactgtcccccagagactgcagtgctgctcgctagttatgctgtgcaagccaagtatggagactacaacaaggagattcataaaccaggttaccttgcaaacgaccgcctgctccctcagagagtcctcgaacaacacaagctcactaaagaacagtgggaggagcgcatccagaattggcacgaagagcataggggcatgctgcgggaggattctatgatggaatatctgaaaatcgcgcaggacctcgagatgtatggggtgaattactttgagatcaaaaataaaaagggcacggaactctggttgggagtcgacgctctgggccttaatatttatgaacacgacgataagcttacaccgaaaattggcttcccatggagtgagatcagaaacatcagcttcaatgacaaaaaattcgtgattaaaccaattgacaagaaggcgcctgacttcgttttctatgcccccagacttaggatcaataaacgcatactcgccttgtgcatggggaaccacgagttgtacatgaggcgacgcaagccagataccattgaagttcagcagatgaaagctcaggctagggaggagaagcatcagaagcagctcgaaagagctcagcttgagaatgaaaagaagaaacgcgagattgcagagaaggagaaggagaggatcgaacgggaaaaggaggaactcatggaaaggttgaagcagattgaggagcaaacaatcaaagcccagaaggagctcgaggagcaaaccagaaaagctctcgaactggaccaggagagaaaacgagctaaggaggaagcggagcgcttggaaaaagaaaggagagctgctgaagaggctaaatctgcaatcgctaagcaggctgctgatcagatgaagaaccaggagcagttagctgctgagctcgccgagttcactgccaaaattgccctgcttgaggaggctaagaaaaagaaagaagaggaggctacagaatggcaacacaaggcgttcgcagcccaggaggacttagaaaaaactaaggaggagctgaaaacagtcatgagtgccccacctcccccgccaccaccacctgttatcccccctactgaaaacgaacatgacgagcacgacgaaaataacgctgaagcttccgccgaactttcaaatgaaggcgtgatgaaccatcgttcagaagaggagagagttaccgaaactcagaaaaatgagcgcgtgaagaaacagctgcaggcgttatccagtgagctcgcgcaggcacgtgatgagacaaagaagactcagaatgacgtcctgcacgccgagaatgtcaaggcggggcgggataaatacaaaacactgagacagatcaggcaaggcaataccaaacaaagaatcgatgaatttgaggctatgtggggtcctaagttgtatgctctgttccaaatgcgctcatgccaatctagcatcaagcagatgtag

SEQ ID NO: 26013 - DNA, 1344 bp, synthetic construct
  misc_feature 1..1344: note = Description of Artificial Sequence: Synthetic coding sequence
  source 1..1344: mol_type = other DNA
atgctgagctggaacctgcccttcagccccatccagctggccaacaacttcctgacaagcgttctggagcagcacaaactaactaaggaacagtgggaagaacggattcagaattggcatgaagaacatcggggtatgctgcgtgaagatagtatgatggagtatctgaagattgctcaagatttagagatgtatggagtaaattacttcgaaatcaaaaataagaagggtaccgaactgtggttgggagtcgacgctctgggcctaaatatttacgagcatgatgacaaactcacccctaaaatagggttcccctggagcgaaattcgcaacatttcttttaacgacaagaaatttgtcatcaagcccatcgacaagaaagccccagatttcgtgttttacgccccgaggctgagaattaacaagcggattttggccttgtgtatggggaaccacgaactttacatgagaagaaggaagccagacacaatagaggtccaacagatgaaagcacaggcaagagaggagaaacaccaaaagcagctggagagagcccagctggagaatgagaagaagaaaagggaaatagccgaaaaagaaaaagagagaattgagagagagaaagaggaacttatggagaggctcaagcagatcgaggagcagactatcaaagcccaaaaagagttggaagagcagactcggaaggccttggagcttgatcaggaaagaaaacgagccaaggaggaggcagaacgcttggagaaggagagaagggccgctgaggaagcgaaatcggccattgccaagcaggccgccgaccagatgaaaaaccaagaacagttggctgcggagcttgctgaattcacggctaagatagctctgctcgaagaagcaaaaaagaagaaggaggaggaggctaccgagtggcagcacaaggccttcgccgcacaagaagatctggaaaagaccaaggaagaactaaagaccgtgatgtcagctcctcccccccccccacccccaccagtgatcccacctacagagaacgagcacgatgagcatgatgagaacaacgcagaagcatccgccgagctgagtaatgagggcgtgatgaatcatagatctgaggaggagagagtcacagagactcagaaaaacgaacgagtgaaaaaacaactgcaggctctctctagtgaattagctcaggcgcgagacgagacgaagaaaacacagaatgacgtgttgcacgccgaaaatgtgaaggctggacgggacaagtataagacactgagacagattcggcaaggcaacacgaagcagcgcatcgatgaattcgaggccatgtag

SEQ ID NO: 26014 - DNA, 3234 bp, synthetic construct
  misc_feature 1..3234: note = Description of Artificial Sequence: Synthetic coding sequence
  source 1..3234: mol_type = other DNA
atggacaccgacagccagcggagccacctgagcagcttcaccatgaaattgatggataagttccacagtccaaagatcaaaagaacaccatccaaaaaaggaaaacccgcggaagtgagcgtcaagatccccgaaaaacctgtcaataaggaggctactgacagatttctccccgaagggtatcccctgcccctcgatttggagcagcaggctgtcgagttcatgagcacctctgcggttgcttcacggagtcagagacaaaagaacttgtcttggctcgaagagaaagaaaaggaggtcgtgtccgccctgcggtatttcaaaaccatcgtggacaagatggctatagacaaaaaggtgctggaaatgctgcccggctcggcgtctaaggtcctggaggctatcttgcccctggtgcagaacgatccgcgaattcagcacagctctgctctgtcctcttgctattcccgcgtctatcaatccttggcaaatctcatacgatggtctgaccaggtgatgttagaaggcgtgaactcagaggacaaggagatggtgacaacagtgaagggcgtaattaaggctgtgctcgatggagtcaaagagcttgtccgcctcactattgaaaaacaggggaggccctctccaaccagcccagtgaagccctcttcaccggcatctaaaccagacggaccagccgagctgcctctcacagaccgcgaggtggagatcttgaacaaaacaacaggcatgagccagtccacggagctacttccggatgccactgacgaggaagtggcccccccaaagccccctctcccaggaattcgcgtggtagacaactcccctccacccgcactgccgccgaagaaaagacaaagcgcgccctcccctacccgggtggccgttgtggccccaatgtcccgggctaccagcggctcttctctgcctgtcgggattaataggcaagactttgatgtcgactgttacgcccaacgcaggttaagcggaggttcgcattcatatggtggggaatccccacggctcagtccctgcagtagtatcgggaagctaagcaaaagcgatgaacagctttcctcattggacagagattctggacagtgctctcgcaataccagttgtgaaacactcgatcattacgacccagactacgagttcctccaacaggatttgagcaatgccgaccagattccgcagcagactgcatggaatctgtctccccttcctgagtccctcggagagagtggctccccatttcttgggcctccatttcagctgccccttgggggccaccctcagcccgacggtccactggcccctggacagcagactgatactcctccagcgttgcccgagaaaaaacgaaggtccgccgcctcgcagacggctgatggctccggttgccgggtgtcttatgagcggcatccgagccaatacgacaacatttcaggcgaggaccttcagagcactgctcccatcccaagcgtgccctacgccccattcgccgcaattctccctttccaacacggtggaagctccgctccagttgagtttgttggcgattttactgcacctgagtctaccggggaccccgaaaagccgcccccactgccagagaagaagaacaagcatatgctcgcatatatgcagttactggaggactactccgagccacagccttctatgttttaccagacccctcagaacgaacacatctaccaacagaagaacaaactccttatggaggtatacggcttctccgacagctttagtggtgtggactcagtgcaagagctggctccgcctcccgccttgccaccaaagcaacgacagctggagccacctgcggggaaggatggacatcctagagatccctccgcagtctctggagtgcccggcaaggacagcagggatggctcagaaagggcacccaaatccccggatgctttggaaagtgctcagtccgaggaagaagtggatgagctctcattgattgaccacaatgaaataatgtcacgcctcaccttaaagcaggaaggcgacgacgggcccgacgtgaggggcggctcaggcgatatcctgctggttcatgctaccgagaccgaccgcaaggacctagtgttgtactgcgaggcattcctcactacctataggacattcatttcacctgaagagctgatcaagaaacttcagtatcgttacgaaaaattctctcctttcgctgatacattcaagaagcgcgtttccaagaacactttctttgtcctggtgcgagtggttgatgagctgtgcctagtagaactcacagaggaaatccttaaactcctgatggaacttgtctttagacttgtttgcaacggagaactctctcttgcgagggtcttgcgtaaaaacattcttgacaaggtagatcagaagaagttattgcgttgcgccaccagctctcagccccttgccgctaggggagttgcagctcgacctggcactctgcacgactttcactcccacgagatcgcagaacaactgaccctcctggatgctgagttgttctacaagatcgagataccagaagtcctcctgtgggctaaggaacagaatgaggaaaaaagccctaatctcacccagttcacggagcattttaataatatgagctactgggttcgaagtataatcatgcttcaggagaaagctcaagacagggaacgccttttactgaagttcatcaagatcatgaagcacttacgcaagctcaacaacttcaattcttacctggccatacttagcgccctggattccgctcccatcagacgcctcgagtggcaaaagcagacaagtgaaggcctggcggaatattgcacactcatagacagtagttcaagcttccgcgcttatcgtgcagccttgagtgaagtggagccaccctgcattccatatctgggccttattctgcaagacctgacctttgttcatctgggaaaccccgactatatcgacggaaaagttaactttagtaagcgctggcaacaattcaatatcctggacagcatgcggtgctttcagcaagcccactatgacatgcggcgcaacgatgacatcatcaatttttttaatgatttcagcgaccacctagctgaagaagccctctgggagctgtcgcttaaaatcaagcccagaaatattacacgaagaaagaccgatcgcgaggagaaaacctag

SEQ ID NO: 26015 - DNA, 3168 bp, synthetic construct
  misc_feature 1..3168: note = Description of Artificial Sequence: Synthetic coding sequence
  source 1..3168: mol_type = other DNA
atgagcaccagcgccgtggccagccggagccagcggcagaagaacctctcgtggcttgaagaaaaagagaaggaggttgtgagcgccctgcggtactttaaaacaatcgttgataaaatggccatagataagaaagtcctcgagatgcttcctggctcagcatctaaggtcctagaagccattctgccactggtccagaatgaccctcgaatccagcactcctcagcgctgagcagttgctactccagagtatatcagtctctggcaaatctgatccgttggtctgaccaagtcatgctggaaggggtcaactcagaggacaaagagatggtgaccacagtgaagggagtgatcaaggcggtgcttgacggggtgaaggagctggtgcgtcttacaatcgagaagcagggcagacctagtcctacctccccagttaaaccctcctcaccggctagtaagcctgacggcccagccgagttgcccctcaccgatcgtgaggtagaaattctgaataaaacgactgggatgtcccaatccacggaattgttgcctgacgccacagacgaggaggtcgccccaccaaaaccaccactccctggtataagggttgtggacaacagtccgccgccagctcttcctccgaaaaagcgccagagcgcaccttctcccacccgagtggcagtggtggccccaatgagtagagctacatcaggatcaagtctgccagtgggcattaacaggcaagactttgatgttgactgttatgcccagcgccggctcagtggagggtctcactcttatggaggggaaagccctcggctgtcaccatgttcaagtatcggcaaactaagtaagagcgatgagcagctcagctccctggatagggattctggccagtgctccaggaatacaagctgtgagactctggaccattatgacccagattatgaattcctgcagcaggacttgtctaacgccgatcagatcccccagcagaccgcctggaacctgtccccactgcctgagtcactaggggaaagtggatctccattcttgggaccacccttccaattgccacttggaggccatccccagccggacggcccactggcccctggccaacagaccgacacccctccagccctccctgagaaaaaacgccgtagcgctgccagccaaacagcggatggatccggctgccgcgtgagctatgagcggcacccttcccaatatgataatatttcaggagaagatctacaaagcacagctccaataccatctgtgccctacgctcccttcgccgccattctgcccttccaacacggtggatcttctgctccagttgaatttgtgggcgactttaccgcacctgagtcaactggagaccctgagaagccgccccccctgccagagaaaaaaaataagcacatgttagcctatatgcaactgcttgaagactattctgaaccccagccatcaatgttttaccagaccccacagaatgagcacatataccagcagaagaacaagctgctcatggaggtgtacgggtttagtgactcttttagcggcgttgactcagtacaggagcttgctccccctccagcactacctccaaagcagcggcagttagcctcatgtgcagcctcctccttctcaagcgtatctcactgcgtgcagcagacaaaagtggccttcactcctgaggatgggtctgcggcccagggcctgtccgtgagcgtgtctaacagttttctgtcccggcacgggagccttcctgtaccttctgaacctcccgcaggtaaagacgggcatccacgcgaccccagtgccgtgagcggcgttcctggtaaggactcgcgagacggcagcgagcgcgctcccaagtctcccgatgcacttgagagtgctcaatctgaggaggaggtcgacgagctgtccctgatcgatcataacgaaatcatgtcaaggcttacgctcaaacaggaaggagacgatggtccagatgtgcgcggggggtcgggagacatcctgttggtacatgcaaccgaaacagacagaaaggacctggttttgtactgcgaagccttccttaccacataccgcacttttattagccccgaggagctgattaaaaagttgcagtatagatatgagaagttcagtcccttcgcggacacattcaagaagcgcgtgagtaaaaacacgttcttcgtactggtccgcgtggttgacgaactttgcctggtcgagttgactgaagagatactcaagctgttgatggagctggttttcagactggtgtgtaacggcgagctttccttggcccgcgtgctcaggaagaatattctggacaaagttgatcagaaaaaactgctgcggtgtgctacctcaagccagccgttggctgcccggggagtggcagcaaggccaggtaccctccatgattttcattctcacgagattgcagagcaactgacccttttggatgcagagttgttttacaaaatcgaaatcccagaggtactgctgtgggctaaagaacagaatgaggaaaaatccccgaatctcacccagttcactgaacacttcaataatatgagctactgggtcagaagcataatcatgcttcaggaaaaagcgcaggatagagagcgactgctcctgaaattcattaagattatgaagcatctgagaaagcttaacaactttaatagctatcttgctatattgagtgcattagacagtgctcccattagacggttggagtggcaaaagcagactagtgaaggtttggctgagtattgtaccttgatcgactccagcagctcattccgtgcatatagggccgctctaagcgaagttgagccaccttgcatcccttatttgggacttatccttcaggacctgactttcgttcatcttgggaatcctgactacattgacggcaaagtgaactttagcaagaggtggcaacagttcaatattctggattctatgcggtgctttcagcaggcacattacgatatgagacgcaatgatgatatcatcaacttctttaatgatttctcggaccacctcgcagaggaggcactgtgggagttgagcttgaaaatcaagccgcgaaacattacacggagaaaaacagacagagaagagaagacgtag

SEQ ID NO: 26016 - DNA, 3285 bp, synthetic construct
  misc_feature 1..3285: note = Description of Artificial Sequence: Synthetic coding sequence
  source 1..3285: mol_type = other DNA
atgagcggcggcctgggcctgcggcggagccccgagatgagcggcaagattgaaaaagcggacagccagaggtcccacttgtctagctttactatgaagctgatggacaaatttcactccccaaaaattaaacgtactcccagcaagaagggcaagcccgcagaggtctccgtcaagatcccagaaaaacctgtcaacaaggaggcgacagatcggttcctgcccgaaggataccccctacccctggacctggaacaacaggctgtcgagttcatgagcactagtgcagtggcgagccgctcgcaaaggcagaagaacctgtcatggctagaggagaaggagaaagaagttgtgagtgcactgcgctattttaaaactatcgtcgataaaatggccatcgacaagaaagtgctcgagatgctccctggatccgccagtaaagtgctggaggctatacttccactggtgcagaatgatccaaggattcaacatagttctgcactctcgtcgtgttacagtagagtttaccagagcctggctaacctgatcaggtggagcgaccaagtcatgctagaaggtgtgaattcagaagataaggaaatggtgacgactgtgaagggtgttattaaagccgtcctggatggggtgaaggaactggtgcgcctgaccatcgagaaacaggggcgcccctcacccacgtctccagtgaaaccatcctcgcccgcgtctaaacctgacggacccgcagaactaccactcacagatagagaggtggaaatcctgaacaagaccactggtatgagccaaagcactgagctactgcctgacgcgaccgatgaagaggttgccccccctaagcctcctttgccaggtatacgtgttgtagacaacagtccccctccagcactgccaccgaaaaagcgccagtctgcaccaagtcccacacgtgttgccgtggtcgcacccatgtctcgcgcgacatctggcagcagcctccctgtgggcattaaccgccaggactttgacgtggattgttatgcccagaggagattgtcagggggttcacactcatatggaggtgaatctcctagactgagtccctgcagttcaataggaaagttgtctaaaagcgacgaacagctgtcctccctagacagggacagcggtcagtgcagccgcaatacctcctgcgaaacactcgatcattacgatcccgattatgagtttctgcagcaagatctgtctaacgccgaccagatcccacagcagaccgcctggaatcttagcccattacctgagagcctgggcgaatccggcagccccttcctggggcctccttttcagctaccacttggcggccacccccagccagatggacccttagctcccggccagcaaactgacacacccccagcgctgcccgagaaaaaacggcggtcagcagcaagccaaaccgccgacggaagcggctgtcgggtgtcatatgagagacacccctcccaatacgacaatatctctggagaggatcttcagtcaactgcccccattccttccgtgccctatgccccttttgctgccatactacccttccaacacggagggagctcagccccggttgagttcgtcggcgactttaccgctcccgaatctacaggagatcccgaaaaacctccccccctgcccgaaaaaaaaaacaagcacatgctagcttacatgcagctgctcgaggattatagcgagccacagcctagcatgttttaccagacgccccagaatgagcatatataccagcaaaagaacaaactcttaatggaggtctacggcttttctgactccttttctggcgtcgatagcgtgcaggagctggcgccacccccagctctgccaccaaagcagaggcaactggaaccccctgctgggaaggacggacatccgcgcgatccaagtgccgtgagcggcgtccctggtaaagactcaagagacggctccgagcgggcccctaagagtccagacgctctggaatcagctcagtctgaggaagaggtggacgagctcagcctgatcgaccacaacgaaatcatgagccgactgaccctcaaacaggagggagatgacgggcctgacgtccggggaggaagcggagacattctactcgtccacgccactgaaacagataggaaagacttagtcctctactgtgaagcctttctcaccacgtacagaacgttcatttcccctgaagagctgatcaaaaaacttcaatacagatacgaaaagttttccccgtttgctgatacctttaaaaaacgagtgtccaagaatactttcttcgttctggtgcgcgtcgtggatgagctttgtctggttgaactgacggaagagatcctgaagcttctgatggagcttgtgttccggctggtgtgcaatggggagctgagtctagcccgggtactgagaaagaacatactggataaggtcgaccaaaagaagctgctgcgctgtgccacatcctcacagccgctagccgcaaggggagttgccgcccggccaggtactctgcacgacttccacagccacgagatcgccgagcagttgacactgctcgacgcagagctgttctataaaattgaaatccctgaagttttgctctgggcgaaagaacaaaacgaagaaaagagcccaaatctcacccagttcactgaacacttcaataacatgtcatactgggtgcggtctataatcatgctccaggaaaaagctcaagatcgagaaaggttactcttaaagttcatcaaaatcatgaagcatctgagaaagctaaataattttaacagctatctggcgatattgtccgctttggacagcgcccccattcgtcgcctggagtggcagaagcagacttctgagggactcgctgaatactgcactttaattgattcctctagtagttttcgggcctatagggccgctttaagcgaggtggagccaccatgcattccatatctggggcttatcctccaggacctcactttcgtacacctgggaaacccagactatattgatggaaaagttaacttctctaagcgatggcaacagttcaacattcttgactctatgaggtgctttcaacaggcccattacgatatgcggcggaatgacgatatcataaattttttcaacgacttctccgatcacctggccgaagaggccctttgggaactatcactgaagataaagccgagaaacattacgagacgcaagacagatagggaggagaaaacatag

SEQ ID NO: 26017 - DNA, 3234 bp, synthetic construct
  misc_feature 1..3234: note = Description of Artificial Sequence: Synthetic coding sequence
  source 1..3234: mol_type = other DNA
atggacaccgacagccagcggagccacctgagcagcttcaccatgaagctaatggacaagtttcatagccctaagatcaagcgcactccctccaagaaaggcaaacctgcagaggtatctgtgaaaatccctgagaagccggtgaacaaagaggcaaccgatcgatttctccctgaaggttatccactgccactcgacctggagcagcaggctgtggagttcatgtccacctctgcggtggcttccagatcccagcgacaaaagaacctcagttggttggaagagaaagagaaggaggtggtgtctgcccttaggtatttcaagaccattgtagataaaatggccatcgacaagaaggtgctggaaatgctgcccggaagcgcttctaaggtgctagaggccatccttcccctggttcagaatgatccacggatccagcactcaagtgccttgagttcatgctacagccgggtctaccaatccctcgccaatttgattcggtggtcggaccaagtgatgttggagggcgtgaactccgaagacaaggagatggttactactgtgaaaggcgtgattaaagcggtgctggatggcgttaaggaactcgtccgtctaactattgaaaaacagggtagacccagccctacaagcccagtgaagccctcctctcccgccagcaagcctgatggtcccgccgaactgcctctcaccgatagggaagtagagatcctcaataagaccacaggtatgagccagtccacagagttgctgccagatgctacagatgaagaagtggccccgccaaagcctcccctccccggtattagagtagtggataattctcccccacctgctctgccccccaagaagcgccagagtgccccaagcccgacacgagtcgcagttgtggcaccgatgtctcgggccacaagcgggagctccctgcccgtcggcattaaccgccaggattttgatgttgattgttacgcccaacgtcggctaagtgggggtagccattcctatggaggagagtctccccggctttcaccttgtagctctatcgggaagctctccaaaagcgacgagcagttaagctcgctggatcgtgattccggtcaatgcagtcgcaacacgagttgtgagactctggaccattacgaccctgattacgagtttctccagcaggatcttagcaatgcagaccagatccctcaacagacagcttggaacctgtcccctctcccggagtccttgggagagagcgggagcccttttcttgggcctccatttcagctgcctctcggcgggcaccctcagccagacggccctttagcgcctgggcagcagaccgacaccccaccggctttgcccgaaaaaaagaggaggtctgcagctagccagactgccgacggcagtgggtgtcgagtgtcatacgaacggcatccttcacagtatgacaacatttcaggagaagatctgcagtctaccgcccccatccctagtgtcccctacgcccccttcgccgccatacttccatttcagcatggcggttcctctgctccagtggagtttgttggcgatttcacggcgccagaatcaactggggaccccgagaagccaccacccctgcccgagaagaaaaataagcatatgctagcatatatgcagctgctcgaggattattcagaaccccaaccaagtatgttctatcagactccccagaacgaacatatctaccagcagaaaaataagttgcttatggaggtgtatggctttagtgatagctttagtggcgtcgattccgtgcaggaactggcaccacctcctgctctacctccaaaacagcgtcaacttgaaccacccgccggaaaagacggccacccccgggaccctagcgccgtgtctggggttccaggtaaggattctagagacggctccgagcgtgccccgaaaagtccagatgccctcgagtctgctcagagcgaggaagaggttgacgaactctcactcatcgaccataacgagatcatgtcgcggcttacccttaaacaggaaggcgacgacggccctgacgtcagggggggatctggggatatattactggtgcacgccactgagactgatcggaaagatttggtcctttattgcgaagcatttctgactacctatcgcacatttatctcaccggaagagctcattaaaaaacttcagtaccggtacgagaagttcagtccattcgccgacactttcaagaagagagtatccaaaaacacattctttgtgctcgtgagagtcgtcgacgagttgtgcttagtggagcttaccgaggaaatcctcaagcttctcatggagttagtgtttcgactcgtgtgtaacggcgaattatctctggcgcgcgtgctcaggaagaatattctcgacaaagtggatcagaagaagctgctgagatgtgccacttcatctcagcctctagcagctcgaggggtggccgcccgcccagggacgctgcatgactttcatagtcacgagattgcagaacagcttacactcttggatgcggagcttttttataagatagaaatccccgaggtgcttttatgggcgaaggaacagaatgaagagaagagtcccaacctgacccagtttaccgaacatttcaacaacatgagctactgggtgcgtagcatcataatgctccaagagaaggcccaggacagggagcggctgctactcaaatttatcaaaataatgaagcacttacgcaagttgaacaacttcaatagctaccttgcgattctgtcagcccttgatagcgcccctatccggcggctggagtggcagaaacagacctccgagggacttgctgagtattgcaccctgatcgatagcagttcctcgttcagggcttaccgcgctgctctcagtgaggtcgagccaccatgtattccctaccttggattgatcttgcaggatctaactttcgtccacctcggcaacccagactacatcgatggaaaggttaatttctccaaacggtggcagcaatttaacatcctggattctatgagatgcttccagcaggcccactatgacatgcggagaaatgacgacatcataaatttttttaacgatttctctgaccaccttgctgaggaggccctgtgggagctgtctctcaaaatcaaaccacggaacatcacacgccgcaagactgatcgcgaagaaaagacctag

SEQ ID NO: 26018 - DNA, 3288 bp, synthetic construct
  misc_feature 1..3288: note = Description of Artificial Sequence: Synthetic coding sequence
  source 1..3288: mol_type = other DNA
atgggcaacgccatcgagaagcagaagcccctgaagcggagccacctgtatccatggaagcaagattctcagcgcagccatctgtcatcatttacgatgaagctaatggataagttccactcccctaagatcaagagaactccaagcaagaagggcaaacccgcagaggtttcagttaagattcctgagaaaccggttaataaggaagccaccgatcggttcctgccagagggctatcccttgcccctagacttggaacagcaggcagtcgagtttatgagcacttccgccgtggcctcgaggtctcagcggcagaaaaacctcagctggctcgaggagaaagagaaggaggtagtctccgctctccgatacttcaagaccatcgttgataagatggccatcgacaagaaggtgctggagatgctacccggctccgccagtaaggtcttggaagccatcctccccctagtccagaatgaccctaggatacagcactcctcagctttaagttcttgctatagtcgggtctaccaatccctggccaacctgatcagatggtcagatcaggttatgctggagggggtgaattcagaagataaggagatggtcactacagtgaagggggttatcaaggcggttttggacggcgtgaaggagcttgtcaggcttaccattgagaagcagggaagacccagccccacatcccctgtgaagcccagcagtcctgctagtaagcccgatggtccagcagagctgcctctgacagatcgagaggtcgagattctcaataagaccacaggaatgagccagagcaccgagctgctgcctgacgccaccgacgaagaggtggcacccccgaagccccctctacctgggatccgggtggtggacaactctccaccccccgccttgcctccaaaaaaaagacaaagtgccccatctcctacccgggtggccgtggtggcaccgatgagccgtgcgacgagcggctctagtttgcccgtagggatcaatcgacaggatttcgacgtggactgttatgctcagcgcagactctcaggcggctctcactcctacggcggcgaaagtcccagactgagcccatgcagcagcattggcaagctgtctaaaagcgacgagcagttgagctccctggaccgtgacagtggacagtgcagcagaaatacctcatgcgaaacactcgaccattacgatcctgattatgaatttcttcagcaggacctgtcaaacgcggatcagattccacagcagacagcatggaacttatcacccctgcccgagtcgctgggggagtccggaagcccatttctgggcccgccttttcagctccccctgggcggtcatcctcagcccgacggcccactggctcctggacagcagacagacacccccccagcactgcccgaaaagaaaagacggtctgctgcaagtcagaccgctgatggaagcggctgcagagtgagctacgagagacacccctcccaatacgacaatattagcggtgaggatctgcagagcaccgcccctatccccagtgtgccctatgcgcccttcgcagcaatactccctttccagcatggtggaagctcagctccagtggaattcgttggcgacttcacagcaccggagtctaccggcgatccagaaaagccccctcctttgcccgagaaaaaaaataaacacatgctcgcatatatgcagcttttggaggattacagcgagcctcagccctctatgttctatcagactccacagaacgagcatatctaccagcaaaagaacaagctattaatggaggtttatgggttcagcgattccttttcgggcgtggacagcgttcaggagttggcccccccaccagcgttgccaccaaaacagagacagctggagccacccgcaggcaaagacgggcaccccagagatccttctgccgtatcaggggtgcctgggaaggatagcagagacggttctgagcgcgcccctaaatcaccagacgctctggaaagcgcacagtccgaagaagaggtcgatgagctttcccttatcgaccataatgagattatgtccaggctgactctgaaacaggagggtgacgatggcccagatgtccgcggagggagtggtgacattttgctggtgcacgcaacagagacggatcggaaagatttggtgctttactgcgaggcattcctaaccacatatcgcacattcatctctccggaggagctcattaaaaagctgcaatacagatacgaaaaattcagcccttttgccgacacattcaagaaaagagtgtccaagaacacctttttcgttctggtcagggtggtggatgagctgtgtctggtggagctcacagaggagatcctgaaacttctaatggaactggtatttagactagtgtgcaacggcgaactctcattagctcgagttttacgcaaaaatatcctagacaaggtggatcaaaagaagttgctgcgctgtgccactagctcccagccactggctgctagaggtgtcgcagccaggcccggcacactccatgacttccatagtcacgagatagctgagcagttgacactgctggatgctgagcttttttacaagattgaaatccccgaagtgctcctttgggcaaaggagcagaacgaagagaagagccccaaccttactcaattcacggagcactttaataatatgtcctattgggtgagatcaattatcatgctgcaggaaaaggcccaggacagagaaagactgctgctgaagttcatcaaaataatgaagcatttgaggaagttgaataactttaactcatacctggccatcctttccgctctggatagcgcgcccattcgcagactggagtggcaaaaacagacctccgagggcctcgctgagtattgcacgttaatcgatagctcatcctcgtttcgtgcttacagagcggccttatctgaggtggagcctccctgcataccttatttgggactcatactgcaggatctaacctttgttcacttggggaacccggattacatcgacggaaaagtgaacttctctaagcgctggcagcagtttaatatattagacagcatgcgatgtttccaacaggcccactacgacatgcgtaggaatgacgatattataaacttttttaacgatttcagcgaccacctggctgaggaggctttgtgggagctgagcctgaagatcaagcctcgcaatatcactagaaggaaaaccgatcgggaggaaaaaacgtag

SEQ ID NO: 26019 - DNA, 1395 bp, synthetic construct
  misc_feature 1..1395: note = Description of Artificial Sequence: Synthetic coding sequence
  source 1..1395: mol_type = other DNA
atgagccgggccaccagcggcagcagcctgcccgtgggcatcaacaggcaggatttcgacgtggactgttacgcgcagcggcgcttatccggtggcagccactcttacggcggcgagtcccctcgtctctcaccttgcagctcaatcggtaagctcagcaagagcgatgagcaactatccagcctagatagagactcgggacagtgctctagaaatacgtcatgtgaaacattggatcactacgaccccgactacgaattcctacaacaggacttgagcaatgcggaccagatcccacagcagacagcctggaatctctctcccttgcccgaatccttaggcgagagcggaagcccctttcttgggcccccattccaacttcccctaggtggtcatccacagcccgacggcccactggcgcccggccagcaaaccgatactcccccggcgctccctgaaaagaaaaggaggagcgctgcgtcgcagacagcggacgggtccggttgccgcgtttcttatgagaggcaccccagtcaatatgacaatattagtggagaagatcttcagagcacagctcccatcccctctgtcccatacgctcccttcgctgcgatattacctttccaacatggcggttcctctgcgccagtggaatttgttggtgacttcacagcccccgagtcaacaggtgacccggaaaagccacccccactgcctgaaaaaaaaaacaagcatatgctagcatacatgcaactgctcgaggactacagtgaaccacagccttctatgttttatcagacgccgcagaatgagcacatttaccagcagaagaacaagctgctcatggaggtatatggattctccgacagcttttctggggtggactctgttcaggagttagcaccgcctccagcgctgcctccgaagcagaggcaactgcaagcgtcctgcgcagcctcctctttttccagcgtttcccattgcgtgcagcaaactaaggtcgctttcacacctgaggatggttcagcggcacagggcctctctgtcagcgtgagcaactcattcctgtccagacatggatctctgcccgtgccatcttataaaagtgtatttaggagctatagtcaagacttcgtcccccaccatcaagccagcgtgccacctttcttacctcctactagtagcagctcaccacactttccacctgcccaccagtctcagagtagcgatctggccgtgccaaccatggctgggcctcccccttctaccgtcgatggcccgctgtctgcatcccaagagtcttcttttcacggcaacaccgtctgtctgccatccgagaccagctttactgattcagagccacctgctggcaaggatggacaccctagagactag

SEQ ID NO: 26020 - DNA, 3285 bp, synthetic construct
  misc_feature 1..3285: note = Description of Artificial Sequence: Synthetic coding sequence
  source 1..3285: mol_type = other DNA
atgagcggcggcctgggcctgcggcggagccccgagatgagcggcaagattgaaaaagccgatagccagcgatcacatttaagttcgttcacaatgaagctcatggacaaattccattctccaaaaatcaagcggaccccgtcgaaaaagggcaagcccgccgaagtgagcgtcaaaattcctgaaaaacccgttaataaggaagccaccgaccgtttcctcccagagggatatcctctaccacttgaccttgagcaacaagcggtagagtttatgagcacatctgcggtggcctcacgctcccagcggcagaagaacctctcctggttggaggagaaagaaaaagaagtggtgtcagcgttgcggtacttcaagaccatcgtcgacaagatggctatcgacaaaaaggtactggagatgctccctggttctgccagtaaggtgctggaggcgatattacccctggtacaaaatgacccaaggatccaacattccagtgccttaagttcatgctacagtagagtgtatcagtcactggccaacttgatccgctggtctgatcaagtaatgctggagggagtgaactccgaggataaagaaatggtgacaactgtgaaaggtgtaattaaggctgtgctggacggtgtgaaagaactcgtacgcctaacgattgaaaaacaagggaggccctcacctaccagcccagttaagcccagttccccggcctcaaagcccgatggcccagcagagttgccactgacagaccgagaggtggaaatcctcaacaagactacaggtatgtcccagtccactgaactgttgccagacgctactgacgaagaggttgcaccgcccaagccacccctgcccggcatccgggttgtggacaacagccctccacccgccctgcctcctaagaaaaggcagagtgcgccttctccaacaagagtcgcggtggttgctcctatgtccagggccacttccggaagcagtttacctgtcggcatcaacaggcaggactttgatgttgactgctatgcccagcgcagactgagcgggggctcccacagctacggcggagagagtccccgattatcgccctgttcttcgatcggtaaactgtccaagagtgacgagcaattgtcaagtctggatagggactcgggccagtgttcaaggaataccagttgcgagaccctcgatcactacgaccctgactacgagtttttgcaacaggatctgagcaacgccgaccagataccccagcaaacagcctggaatctgtcccctctgcctgagagtctgggcgagtctggcagcccgtttctgggcccccctttccagctacccttaggggggcacccacaaccagacgggccactggcccctggccagcaaactgacaccccacccgccttgcccgaaaagaagaggcgctccgcggcaagccagaccgccgatggcagcggatgtcgggtttcatatgaaagacacccctcacagtatgacaacatctccggtgaagacctgcagtctacagcccccattccgtccgtcccatacgcaccgtttgcagcaatcttaccgttccagcatggcgggtctagcgcgcctgtcgagtttgtgggcgacttcaccgccccagaaagcacaggcgacccagaaaagccccctccactgccggaaaaaaaaaataagcatatgttggcctatatgcaactgctcgaagactattcagagccccagccgtcaatgttctatcagactcctcaaaacgagcacatctaccagcagaagaacaaactgttaatggaagtctatggatttagcgacagttttagtggggtggactcagtgcaagagctggccccccctcctgcattgccacccaagcagaggcagctggagccccccgccggtaaggatggtcatccacgggaccctagcgctgtgtctggagttcctggcaaagacagccgcgatggctccgaaagggctcccaagagcccagatgctctcgaatccgcccagagcgaggaggaggtcgacgagctttccctgatagatcacaacgaaattatgagccgcctgaccctgaagcaggaaggcgacgatgggccagacgtgagaggggggagcggcgacattctactagtgcacgctacagagacagacagaaaagacctggtgttgtactgcgaggcgtttctgaccacataccgaactttcatctcacccgaagaactgataaagaagctgcaatatcggtacgagaaattctccccttttgctgacacgtttaagaaacgagtgtccaaaaacactttctttgttctggttcgcgtcgtggatgagctctgcctggtggagctgacagaggaaatacttaagttgttaatggagttagtgttcaggcttgtatgtaacggagaactgtctcttgcacgcgtgttgcgcaagaacatcctggacaaggtagatcaaaagaaactgttaagatgcgccacatcttcccagccccttgccgctaggggagtggcagcacgacctggcacattacatgacttccacagtcacgaaatcgccgaacagctcaccttgctggacgccgagctgttctataagattgaaatacccgaggttttactctgggcaaaggaacaaaacgaggaaaagtctcctaacttaacacagttcacggagcatttcaacaatatgtcttactgggtgcggagtatcatcatgctgcaggagaaagcccaggaccgggagcgattgttgctgaagtttatcaagattatgaaacatttacgcaagctgaataattttaatagctacctggcaatcctctctgctctggatagtgctccgatcaggaggctggaatggcagaagcagacttctgagggcctggcagaatactgcacccttattgactccagttcttcttttagagcgtatagggcggctctgtccgaggttgagcccccttgtatcccgtacttaggcttgatcttgcaagacctgactttcgtgcatctaggaaaccccgattacattgacgggaaagtcaatttctcaaagagatggcaacaattcaatattctggactctatgcgctgcttccagcaggcccactacgacatgcgccgtaacgatgacattatcaacttcttcaacgacttttctgaccacctggcagaagaggcactgtgggaactgagcttaaagatcaagccaaggaatatcacgcggcgcaagactgatagggaagaaaaaacgtag

SEQ ID NO: 26021 - DNA, 1011 bp, synthetic construct
  misc_feature 1..1011: note = Description of Artificial Sequence: Synthetic coding sequence
  source 1..1011: mol_type = other DNA
atggaggtgtacggcttcagcgacagcttcagcggcgtggacagcgtgcaggagctggcccctcctcctgcactgccccctaagcagcgccagctgagcgagaatgcctccgaggaggctggagaaggtgaatatgtgaacctctacagcagtggacaatcatccgaggaactggccccctcgaggggcgagccgcccgcaggcaaagacggacacccacgggatcctagtgcagtctctggcgtgccagggaaagactctcgcgatgggagcgagcgggcccctaaaagccctgacgcacttgaaagtgcgcaaagcgaggaggaggtggacgaactgtccctgatagatcacaacgaaataatgagcagactgacacttaagcaagagggggacgatggacctgacgtaagaggggggtccggagatatccttctcgttcacgcaactgagaccgatagaaaagacctagtgctatactgtgaggccttccttacaacatataggacttttattagcccagaagagctcataaagaagttgcagtaccggtacgaaaagttctctccatttgcggatacatttaagaagcgggtgtcaaaaaacaccttcttcgtactggtgcgtgttgttgacgagctttgcttggtggaattaacagaggaaattttgaagctcctaatggagttagtattcagacttgtgtgtaacggcgaattaagcctagcaagagttttaaggaaaaatattcttgataaagtggatcagaagaagctgctcagatgcgccacgtcctcacagccattggcagcacgtggtgtagccgccagacctgggaccctgcatgattttcactctcacgaaatagcggagcagcttaccttgcttgacgccgagctcttttataaaatcgagattcctgaggtcctgctgtgggctaaggagcagaatgaggaaaagtcaccaaacttaacacagtttacagaacacttcaacaacatgagctattag

SEQ ID NO: 26022 - DNA, 3174 bp, synthetic construct
  misc_feature 1..3174: note = Description of Artificial Sequence: Synthetic coding sequence
  source 1..3174: mol_type = other DNA
atgggcaacgccatcgagaagcagaagcccctgaagcggagccacctgtacccatggaaacaagactcccagaggagtcacctgtcttccttcactatgaagctgatggacaaattccacagccctaaaattaaaaggacgccaagtaagaaaggaaagccagcagaggtgagtgtgaaaattcccgagaaacccgtcaataaaaatctgtcatggctggaagagaaagaaaaagaggtggtgtccgcattacgatattttaagactattgtggacaaaatggctattgataagaaggtgcttgaaatgctcccagggagcgcatcaaaagtgctggaggccatcctgccattggtccagaacgacccaaggatacagcactcttctgctctatctagttgttactctcgcgtctatcagtccctcgctaacctgatacgttggtctgatcaggtcatgttggagggcgttaattccgaagacaaagagatggtgaccaccgtgaaaggggtcatcaaagctgtgctggatggcgtgaaggagctcgtgcgcctgactatcgagaaacagggtagaccctctccaacatcgcccgtgaaaccttcttcccctgcaagcaagcctgacggccccgccgaactgcctttaacggatagggaggtcgagatactcaataaaactacgggaatgagtcaatcaactgagctcctgccagatgccaccgatgaggaggtggctccacccaagccccctctccctgggattcgcgtcgttgacaactcaccccctcctgcactgcctccgaagaagaggcaatcggcgcctagcccgacacgtgtggctgttgtcgcgccaatgtcgagggctacaagcggtagcagtctcccagtggggataaatcggcaggattttgacgtggattgttacgcgcagcgccgactgagcgggggaagccattcctacggcggagagagtcccaggctgagtccctgttcaagcattggaaaactctcgaaatccgacgagcaacttagtagtctggaccgggacagcggacaatgtagtcgaaataccagttgtgaaacacttgaccactatgaccctgattatgagttccttcagcaggacttgtccaacgccgatcagatcccacagcaaactgcctggaacctgtccccccttcctgagtcccttggcgagagtggctcccctttcctcggaccacccttccaactgcctctggggggtcaccctcagcctgatggaccgctggcacctggacagcaaactgatacgcccccagccctccctgagaagaaacggcgcagtgccgcctcgcaaaccgcggatggatctggctgtagggtcagctatgagaggcacccttcccaatacgacaacattagcggggaggacctccagagcacagcccccataccttccgtaccctatgcccccttcgccgcgatcctacccttccagcacgggggaagcagtgcgcccgtggagttcgtgggggattttacagcgcccgaaagcactggcgatcccgagaagccaccacctcttcccgagaagaagaacaaacacatgctggcttacatgcaacttctggaggactattctgaacctcaacccagcatgttttaccagactccacagaatgagcacatttatcaacagaaaaacaaactactcatggaggtgtatggattctctgatagttttagcggagtggatagtgtccaggagcttgcaccgccccccgcactgcctcctaagcagcgtcaactggagccgcccgctggcaaggacggacatccacgcgaccctagcgccgtttcaggggtgcccggaaaagactcgcgggatggaagcgagagagcccccaaatccccagatgccctcgagagtgcccagtccgaggaggaagtcgatgagcttagtctgatcgatcataatgagatcatgagcaggcttacactgaaacaggaaggcgatgacggtcctgacgtcagaggcgggagtggcgatatcctcttagtccatgcaaccgaaacagacaggaaggatcttgtcctatactgcgaggcctttctcacaacatatcgtacattcatctctccggaggagctgatcaaaaagcttcagtaccgctacgaaaagttttccccatttgccgatacttttaagaagcgggtgtccaaaaatacgttctttgtcctcgtgcgggtcgtagacgaattatgtctcgtggagctgaccgaagagatactaaagctcctgatggagctcgtgtttcggctggtttgtaacggggagctaagcctggcaagagttcttcgcaagaacatcttggataaggttgaccagaagaagctgctcaggtgcgctaccagcagccaacccttggcggctagaggcgtagctgccaggcctggcaccctccacgacttccacagccacgaaatagcggagcaactaactctgttggatgcagaacttttctacaagatagagattccagaggtgctactatgggctaaggagcagaacgaggagaaaagccccaaccttacgcaattcaccgaacactttaataatatgtcctactgggtgcgcagtattatcatgctgcaggagaaggctcaggatcgcgagcgactgttgctgaaattcattaagattatgaaacacctgaggaagctgaataatttcaattcatatctcgccatcctgtcagcactggactccgctcccattcgacgactggagtggcagaagcagacctcggagggactggccgagtattgcactctcatcgacagcagttccagcttccgagcttacagggccgccttgagcgaagtcgagcctccctgtatcccttacttgggacttatcctccaggatctcacattcgtgcatctcggcaacccagattacattgacgggaaagtgaacttcagcaaaagatggcagcaattcaatattctagacagtatgcggtgtttccagcaggctcattacgacatgcgacgcaatgatgatattatcaacttctttaacgatttttctgaccacctggccgaagaagcactttgggagttgagcctgaagatcaagcctagaaacatcactcgaaggaagaccgaccgagaagagaaaacctag

SEQ ID NO: 26023 - DNA, 960 bp, synthetic construct
  misc_feature 1..960: note = Description of Artificial Sequence: Synthetic coding sequence
  source 1..960: mol_type = other DNA
tgactggcccccccccccgccctgccccccaagcagcggcagctgtcagaaaatgccagcgaggaagctggggagggggaatacgtgaatttgtacagcagcggacagtcgagcgaggaacttgccccaagccgcggggaacctcctgcaggaaaggacggccacccccgggacccgagcgcagtgtcaggagtgccaggcaaagacagccgggacggatctgaacgggcacccaagagcccagatgctctggaaagcgctcagtccgaggaggaggtggatgagcttagcctcatagatcataacgagattatgtcgagattgaccctgaagcaggagggagacgacgggcctgatgtgcgaggtgggagcggggatattctgctcgtacacgccactgaaaccgatcggaaagacctcgtgctctactgcgaggctttcctcacaacttatcgcacctttattagtcccgaggagctgatcaagaagcttcaatatcggtacgagaaattctctcctttcgccgatacattcaaaaagcgcgttagcaaaaatacctttttcgtgctggtgagggttgtggacgaactgtgccttgtggaactaacggaggagattctgaaactgctcatggagttggtttttaggttggtatgcaatggcgaactgagcctagcccgcgtgcttagaaaaaacatcctcgataaagtcgaccaaaaaaagcttctgcgatgtgcgactagctcccagccacttgccgcccggggcgtggcagcacgcccggggacactgcacgactttcactctcacgaaatcgccgaacaactgacactattggatgctgagctcttctataaaatcgagattccggaggtgctcctgtgggccaaggaacagaacgaggagaaatctcctaatctgacccaatttaccgagcattttaataatatgtcttactag

SEQ ID NO: 26024 - DNA, 687 bp, synthetic construct
  misc_feature 1..687: note = Description of Artificial Sequence: Synthetic coding sequence
  source 1..687: mol_type = other DNA
tgactgcccgagaagaagaacaagcacatgctggcctacatgcagctactggaagactatagcgaaccccagcccagtatgttttatcagacaccgcagaacgaacacatataccagcagaaaaacaaactcctgatggaggtttatgggttttccgattcgttttccggcgtggactcagtgcaagagctcgctccaccacccgccctgccaccaaagcagaggcaactccaggcatcgtgcgcagcttcctccttttcttccgtttctcattgcgtgcagcagactaaggtggcatttactccggaggacgggagcgccgcgcagggtctgtcagtttcagtatcaaacagtttcctgtccaggcatggtagcctgccagtcccatcttacaaatcagtctttcgatcctactcccaggattttgtcccacatcaccaggcatctgttccccctttcctcccccctacgtcttcctcttcccctcatttccccccagctcatcagtcccagagctccgatctcgcagttcctaccatggccggacctcccccatccactgttgatggtcccttgtcagccagccaggagtcatcattccacggtaacacagtgtgtctgcccagcgagacatcatttactgactccgaaccccccgctggaaaagatggacaccctagggattag

SEQ ID NO: 26025 - DNA, 582 bp, synthetic construct
  misc_feature 1..582: note = Description of Artificial Sequence: Synthetic coding sequence
  source 1..582: mol_type = other DNA
atgggcaacgccatcgagaagcagaagcccctgaagcggagccacctctacccttggaaacaggattctcagagaagccatctgagcagctttacgatgaaactgatggataagtttcacagcccaaagatcaagcgtaccccatctaagaagggcaagcccgccgaagtgtcagtcaagatccccgaaaagccagtcaacaaggaggccactgaccgttttctgccagagggatatccgctgccactcgacctggagcagcaggcggtcgagtttatgtcaaccagtgccgtcgcgtcacgcagtcaacgccagaaaaatctgagctggctcgaggaaaaggagaaggaggtggtgtctgctcttaggtatttcaaaaccattgtggacaagatggccatcgacaaaaaagtcctcgagatgcttccagggtccgcatccaaggtgcttgaggctatactgcccctagtgcagaacgatcctcgcattcagcactcctctgcactgtcttcctgctactctcgggtgtaccaatctctggccaatctgatcagatggtcggatcaggtcatgttagagtag

SEQ ID NO: 26026 - DNA, 3072 bp, synthetic construct
  misc_feature 1..3072: note = Description of Artificial Sequence: Synthetic coding sequence
  source 1..3072: mol_type = other DNA
ttcaagaccatcgtggacaagatggccatcgacaagaaggtgctggaaatgttacccggttccgcatccaaggtactcgaagccatcttacccctcgttcagaatgacccgaggatacagcattccagtgctctgagcagctgttattccagagtctaccagtcactcgctaatctcatccggtggtccgatcaggtcatgctggaaggggtcaacagcgaagataaagagatggtgacaacagttaagggagtgataaaggctgtgctcgatggggtcaaagagttggtcaggctgaccatagaaaaacagggcaggccctcccctacctccccggtgaaaccgtctagtccagctagcaagccggatggacccgctgagctgcctctgacagatcgcgaagtggaaattctgaataaaaccactgggatgtcccagtcaacagaactcctgcctgacgcaactgacgaagaggtggctccccctaagcctccccttcctggtatccgtgtggttgataattcaccaccccctgccctgccacctaaaaaaaggcaaagtgctccctccccaaccagggtggctgtggtggcccccatgtctcgggcaacgtccggtagttctctgcccgttgggattaaccgccaggacttcgatgtcgattgttacgcacaacgccggctgtcgggaggttcccacagctatggcggtgaaagccccaggctttccccatgtagtagtattggcaaattgtcaaagtcagacgagcagctgagcagtctcgaccgggactccggacagtgctccagaaatacctcttgcgagaccctggatcactatgaccctgattacgagttcctgcagcaagacttgagcaacgctgatcagattccccagcagacggcatggaacctaagccctttacccgagagcctaggagagtctggctctccattcctcggacctcccttccaacttcctctggggggacatccccaacctgatggtcccttggctcctggacagcagaccgataccccacctgcactcccagagaagaaacgaaggagcgctgcaagtcagacagccgatggaagcggctgcagagtgagctacgagcgccatccgtcccagtacgacaatatttccggtgaggatttacagagtaccgctcctatcccatctgtgccatacgcaccattcgccgctatccttccttttcaacatgggggctcttctgccccagtcgagtttgtcggcgattttactgcaccagaatctaccggcgaccccgaaaaacctccccccctgccagaaaagaagaacaaacacatgctggcctacatgcagcttctcgaggactacagcgagcctcagccttcaatgttctaccagacgccacagaatgagcacatctatcaacagaagaacaagctcctcatggaggtgtatggattttctgattccttcagcggcgtggacagcgtccaggagttggctccgcctcccgcactcccacctaaacagcgacagctggcttcgtgcgctgcaagctcgttctcctccgtcagccattgcgttcagcagacgaaagttgccttcaccccagaagatggcagtgcagcccaagggctgtccgtcagtgtctccaactcatttctgtctcggcatggctcattgcccgtccccagtgaacccccagctggaaaagacgggcacccgcgtgatccaagtgcagtgtccggggtacctggcaaagacagtagagatgggtccgagcgggcacccaagagccctgatgccttggaatccgcccagtctgaagaagaggtcgacgaactgtcactcatcgatcataatgagatcatgagtaggctaacactgaagcaagagggggacgacggcccagacgtgaggggtggatcaggcgatattctcttagtacatgccacagagactgatagaaaagacttggttttgtattgcgaggctttcttgaccacttatcgcacatttatctcccccgaagagctgatcaagaagctgcagtatcggtacgagaagtttagtccgttcgccgacacttttaagaaacgcgtgagcaagaatacattttttgtgctggttagagtggtggatgagctgtgcttggttgaattaactgaagagatcctgaaattgctgatggagctggtgtttcgccttgtctgtaatggagaacttagcctggcacgcgtcttgcggaaaaatatactggataaagttgaccagaagaaactgctgagatgtgctacgtccagtcagcccctggctgctaggggcgttgcagcccggccagggaccctgcatgacttccattcccacgaaatagcagagcagttgacactcctggacgccgagctcttttacaaaatcgaaatccctgaagttttgctatgggctaaggagcagaacgaggagaagtccccaaacctcacgcagttcaccgagcactttaataacatgagctattgggttaggtcaataatcatgctacaggagaaagctcaggaccgagagcgcctattgctcaagttcataaagatcatgaagcacctgagaaaactgaataacttcaactcctatctggccatcttatctgccctggattctgcccccataaggaggctggaatggcagaaacagacgtctgaaggcctcgccgagtactgcacacttatcgattcgtcctctagttttcgggcatatagggcagccttgagtgaggtcgagcctccctgcataccctacttgggcctaatcctccaggatctgactttcgtacatctggggaaccctgactacatcgacggcaaagtgaactttagcaagaggtggcagcagttcaatattctggactcgatgcgttgttttcagcaggctcattacgacatgcgccgcaacgatgatataatcaatttcttcaatgacttttctgaccatctcgccgaggaagctctgtgggagcttagcctgaagatcaaaccaagaaacatcactagacgcaagaccgatcgcgaagaaaaaacatag

SEQ ID NO: 26027 - DNA, 480 bp, synthetic construct
  misc_feature 1..480: note = Description of Artificial Sequence: Synthetic coding sequence
  source 1..480: mol_type = other DNA
atggaggtgtacggcttcagcgacagcttcagcggcgtggacagcgtgcaggagctggcccctcccccggctttgccaccaaagcagcggcaattatataagtcagtgttccgatcttatagtcaagacttcgtgccccaccatcaagccagcgtgcccccttttctgcctccgacgtcctcatcgagccctcacttcccgcctgcacatcagagccaatcatctgatctggcggtcccaaccatggccggaccccccccgtctactgtcgatggccctctcagtgcttctcaggagtccagctttcacggcaacacagtatgtctcccctccgagacttcctttacggattctgagcctccagcagggaaagatggccatcccagagatccctctgcagtgagtggagtgcccggcaaagactcaagggacggctcagaacgggccccaaagtcacccgacgctctggagtcagcttag

SEQ ID NO: 26028 - DNA, 696 bp, synthetic construct
  misc_feature 1..696: note = Description of Artificial Sequence: Synthetic coding sequence
  source 1..696: mol_type = other DNA
atggaggtgtacggcttcagcgacagcttcagcggcgtggacagcgtgcaagaactagccccacctccagccctgccacctaagcaaagacagttgcaggcgtcttgcgcggccagctctttttctagcgtctcccactgcgtgcaacagaccaaagttgcttttaccccagaagatgggtctgcagctcagggactcagtgtgtcagtcagcaactcctttttgtctcgacacggcagcctccccgttcctagctacaaatctgtgttccgatcgtattcacaggacttcgtgcctcatcaccaggcctctgtcccacccttccttccgcccactagcagctcaagtccacatttccctccagctcaccagagccagagctcagatctggcggtgcctaccatggccggccccccacccagcacagtggacggtccactgtctgctagccaggagtcttcgttccatggcaacaccgtgtgtctgccatctgagacaagctttactgattccagtgaaaacgcgagcgaggaagcaggggaaggagagtacgtgaatctgtactcaagcggtcaatccagcgaagagcttgcccctagtcgtggagagccaccggccggcaaggacggacacccacgggatccgtcagcggtgagtggtgtgccaggcaaggattcaagagatggctccgagtag

SEQ ID NO: 26029 - DNA, 477 bp, synthetic construct
  misc_feature 1..477: note = Description of Artificial Sequence: Synthetic coding sequence
  source 1..477: mol_type = other DNA
atgagcggcggcctgggcctgcggcggagccccgagatgagcggcaagatcgagaaagccgatagtcagcggtcccatctttcttccttcactatgaaactgatggacaagtttcattcgcccaagatcaaacgaacacctagcaaaaaaggaaaacctgccgaggtgtcagtcaaaattcccgaaaaacctgtgaataagaaccttagttggctcgaggaaaaagagaaggaagttgtcagcgccctgagatatttcaagaccattgttgataaaatggccattgataagaaggtgctggaaatgctgccagggagcgcttccaaagtcctcgaagctattctcccccttgtgcagaatgatccccgcatccaacactcatcagccctgtcatcctgttatagccgggtctaccagtctttggccaacctgataaggtggagtgaccaggtcatgcttgagggcgtcaactcttag

SEQ ID NO: 26030 - DNA, 261 bp, synthetic construct
  misc_feature 1..261: note = Description of Artificial Sequence: Synthetic coding sequence
  source 1..261: mol_type = other DNA
atggaggtgtacggcttcagcgacagcttcagcggcgtggacagcgtccaggagctggcccctccaccagccttgccacctaaacagagacagctggagcctcctgccgggaaggatggccaccccagagatccttctgcggtctcaggtgtacctggaaaggacagccgcgacgggtcggaaagtgggattaccagcgtgtaccggtggaatattcagaggcagcaacgactctcttacgggcacaccgcttcgcaatag

SEQ ID NO: 26031 - DNA, 7419 bp, synthetic construct
  misc_feature 1..7419: note = Description of Artificial Sequence: Synthetic coding sequence
  source 1..7419: mol_type = other DNA
atgaccgcccggggccagagccccctggcccccctgctggagaccctcgaagatccaagtgccagccatgggggtcaaactgacgcttatttgaccctgacttctcggatgactggggaagagggtaaagaagtgatcaccgaaatcgagaagaaactccccaggctgtacaaagtcctgaaaacacatattagttcccagaattctgaactcagctctgccgctctccaggctctcggattctgtttgtataaccccaagatcacgagcgaactgagcgaggctaatgccctggagttactttctaaactgaatgacactatcaagaactcggacaagaacgttcggacccgtgctctctgggttatcagtaagcagacattcccttccgaggtagtgggcaagatggtgtcatccatcatcgattcactcgaaattcttttcaataaaggtgagacacattccgctgtggtggactttgaggccctgaatgtcattgtccgtctgattgagcaggcccccatacagatgggagaggaggccgtaagatgggcgaagctggtcattcccttagtggtgcattcggcccaaaaagtgcacctgagaggggccacagctctggagatggggatgcctcttttgctgcagaaacagcaggaaatagcaagcatcaccgaacagcttatgaccacgaaacttatcagtgagctgcagaaactgttcatgtcgaaaaatgagacatacgttctgaagctgtggccgttatttgtgaagctgttagggagaactctgcatcgttcgggctcattcataaattcactgctacagctggaggagctcgggtttcgaagcggggcacctatgatcaaaaaaatcgcatttatcgcttggaagtccctaatcgacaacttcgctctaaatcccgacattctttgctcagcaaagagattgaagctcttgatgcagccactgagttccatccacgttcggactgagacactggctctgacaaaactggaagtctggtggtacctgttaatgagactgggtccccacctgccagccaacttcgagcaggtgtgtgtgccactaattcaaagtaccatatccatcgattctaatgcgagcccacaggggaactcttgtcatgtcgcgacctcccctggcctgaaccccatgacgcctgtgcataagggtgcctccagtccctacggagccccaggtacgcctcgcatgaatctgagttccaatctcggcggcatggcaacaattcctagtatccagctcctgggactggagatgctcctgcactttctgcttggacccgaagccctaagttttgctaagcagaacaagcttgtactgagcctggaaccactcgaacacccacttatctcatcaccaagcttcttctcgaaacacgcaaatactttgattaccgccgttcatgatagtttcgtcgctgtggggaaggacgctcccgacgtggttgtgtcagccatttggaaggagttgatatctctggtgaagtcggttaccgagagcggcaacaagaaggagaagcctggctcagaggtcctgacgctgttattgaaaagtctggaaagtattgtgaaatccgaagtgttccctgttagtaagaccttggtattgatggaaattaccataaagggcctgccacagaaggtgcttggatcacctgcctatcaggtagcgaatatggatatactgaacggaacacccgcactgtttctcattcaactaatatttaataacttcctcgagtgcggcgtctctgacgaacgatttttcttgtcgctcgaatctctagtggggtgcgtgctctccggaccaacctcacccttggccttctccgactccgttctcaacgttataaatcagaatgccaagcagctggagaacaaagaacatctgtggaagatgtggtccgtgatcgtgacaccactcactgaactaataaatcagactaacgaagtgaatcagggcgacgctctcgaacacaacttcagtgccatttacggcgctctgactctgcctgtaaaccacatcttcagcgagcagagatttcctgtcgctaccatgaagaccctcctgcgcacttggagcgagctctacagggcgtttgcccggtgcgcggccctggtggcgaccgctgaggaaaatttgtgttgcgaggagcttagttcaaagattatgagctccctggaggacgaaggattcagcaatctgctgtttgtggatcgcatcatttatattattacggtcatggtagactgcattgacttctcgccttacaatataaagtatcagcctaaagttaagtcccctcagagaccaagtgactggagcaagaaaaaaaacgaacctcttggcaaactaacttctctgtttaaacttattgtgaaggtaatctatagttttcacacactttccttcaaggaggcccactcggacacgctttttaccattggcaacagcattactggcattatatcctcggtgttgggccatatctccctcccgtccatgatcagaaaaatttttgccacactgactcggcctttggctcttttctacgaaaactctaaactggacgaggtgcctaaggtgtatagctgtctgaacaacaaactggagaagctgttgggagagatcatcgcttgtctgcagttttcttacaccggcacctacgattcggagctgctagagcagttgagccccctgttatgtataatctttttgcacaagaataaacagataagaaaacagagcgcacagttttggaatgctacctttgctaaagttatgatgctcgtgtatcccgaagaactgaagcccgtgttaacccaggctaagcagaaattcttactgcttctgccaggactggagactgtggagatgatggaggagagcagcggaccttacagtgatggtaccgagaattcccagttgaacgtgaaaattagtgggatggagcgaaagtctaatggaaagagagactcttttctagcacaaacaaagaacaagaaagagaacatgaaacctgccgccaaactgaagctggaatctagctcgctgaaggttaaaggagagatcttacttgaggaggaaaaatcaaccgattttgtgttcattccgcctgaagggaaggatgctaaagaacgaattttgaccgatcatcaaaaggaggtgctgaaaacaaagcgttgcgatatcccagctatgtacaataacctggatgtctcccaggacactctgttcactcaatattcacaggaagagccgatggagatacccacgttgacacggaagccgaaagaagacagtaagatgatgatcacagaagagcagatggactccgatattgtcattcctcaagacgttaccgaggattgcggtatggcagagcacctggaaaaatctagcttgagcaataacgagtgcggatcactggacaagacgtcacccgagatgtcaaattccaacaatgacgagcgcaaaaaggctctgatcagcagccggaaaacatccacagagtgtgcctcaagtacagaaaattcatttgtggttagctcttcatccgtgtctaatacgacagtggcaggcacccctccatatcctacctcgaggcgccagacatttattacattagaaaagttcgacgggagcgagaatagacccttctcccccagcccactgaacaacatcagcagcacagtaacggtaaagaacaaccaggaaacaatgatcaagaccgactttttgcctaaggccaagcaaagagagggaacattttccaaatctgacagtgagaagatagtaaatggcacaaagcggtcctctcgccgcgctggcaaggccgagcagactggtaacaaacgcagcaaaccattgatgagatcagagccggagaagaacacggaggagtcagtagagggaattgtggttctcgaaaataaccccccagggctgctgaaccaaactgaatgtgtgagcgacaatcaggtgcatctctctgagagtaccatggaacatgataacaccaagctcaaggccgccacagtcgagaacgcagtgctcctggaaaccaacactgtggaagaaaagaacgttgagattaacttagagagcaaagagaacacgccacccgtggtgatttcagctgatcagatggtcaatgaggattcccaggtgcagataactccaaaccagaaaacgctaaggcgttcctccaggcgtcgcagcgaggtggtggaatctaccactgagagtcaggataaagaaaatagtcaccagaaaaaggaacggcggaaggaggaggaaaagcctttgcaaaagtccccactgcacattaaagacgatgtcctgccgaagcagaaattaattgccgaacagacactgcaggagaatctcattgagaagggcagcaatctgcatgagaagaccctgggagaaacctcggcgaacgctgagaccgagcagaacaagaaaaaggccgacccagagaacataaagtcggagggggatggaacacaggatatcgtcgataagtcttctgagaaactggtgaggggacgcactaggtaccagacacgtcgcgctagtcagggcctgctcagctcaatagaaaattctgaaagcgatagttcagaagctaaggaagaagggagtaggaaaaaacgaagtggcaaatggaaaaataagtccaacgagagtgtcgatatacaagatcaggaagaaaaggttgttaagcaggagtgcattaaggccgaaaaccagtctcacgactataaggcaaccagtgaggaagacgtatccatcaagtctcctatctgtgagaagcaggatgagtccaacacagttatctgccaggactctacagtgacatcagacctccttcaggtgccagacgacctgccaaatgtgtgtgaagagaagaacgaaacgtccaaatacgcagagtactcctttacctccctgcccgtccccgaatctaacctacgcacgcggaatgcgatcaagaggcttcacaagcgggacagctttgataattgctctctgggcgagtccagcaagattggcatttccgacatttcttctctcagcgaaaaaacgttccagacgctcgagtgccagcacaaacgctcaaggcgagtgcgccgttccaagggatgcgactgttgtggggagaagtcgcagcctcaggagaagagcctgatcggcctgaaaaacaccgaaaataacgacgtcgaaatcagcgaaaccaagaaagctgacgttcaggctcctgtgagtccatccgaaacatctcaggccaatccgtactctgaaggacagtttcttgatgagcatcatagtgttaactttcacctgggtttgaaggaggataacgacaccatcaacgactccctgattgtaagtgaaactaaatccaaggaaaacacaatgcaggaatcccttccatccggaatcgtgaacttccgtgaggagatctgcgacatggatagcagcgaggccatgtccctggagtcacaggaaagtcccaacgagaacttcaaaactgtgggcccttgtctcggcgacagtaaaaacgtctctcaggagtctctggagacaaaggaggaaaagccggaagaaacccccaagatggaactttctctcgagaacgttaccgtggaggggaacgcctgcaaggtcaccgagagtaacctggagaaggctaaaacaatggagctgaacgtaggaaacgaagcctcctttcatggacaagaaagaactaaaactgggatcagcgaggaggcggccatagaggagaataagagaaacgatgactcagaagccgacacagctaaactgaacgcaaaggaggtcgccactgaggaattcaacagcgacatttccctgtcggataataccacacctgtgaaactgaatgcccagacagagattagcgaacagacggcggccggggagctggatggtgggaacgatgtgtccgacctacacagctcagaggaaacaaatacgaagatgaagaataacgaggagatgatgatcggggaagctatggctgagactggccacgacggcgaaacagagaatgaaggcatcaccaccaagacctccaaacccgacgaggctgagaccaatatgcttactgccgagatggataacttcgtctgcgacaccgtggagatgtcgactgaagaggggatcatagatgcaaacaaaacagagactaacaccgagtattcgaagagcgaagaaaaactggataacaaccaaatggttatggagtcagacatcttacaggaagatcatcatacgagtcagaaggtggaagagccttcccaatgcctggcttcgggaaccgccattagcgagcttattattgaggacaacaacgcctccccacagaaactgcgggagctagacccttctctcgtatccgctaacgactctccttcaggcatgcagacccgctgcgtgtggtcccccctggcctccccctccacttctatcttgaagagaggcctaaaaagatcacaagaggacgaaattagctctcccgtaaataaggtcagaagagtcagtttcgctgatcctatttaccaggccggactcgccgacgacatcgaccggcggtgttccatcgtgcggtcccatagcagcaattccagccctatcgggaagtcagtgaagacctctcccaccacccaatctaaacacaatacaacctcggccaaaggttttctgtcgcctggatctcgaagtccaaagttcaagtcctctaagaaatgtctcatctcagaaatggctaaagagtcaatcccatgtccaacggagtctgtgtaccctcccctggtcaactgtgttgcgcccgtggacattatcttgccacagatcacatctaatatgtgggctcgaggcctcgggcaactcattagagcaaagaacatcaagaccataggagatctgagcaccctgaccgcaagtgaaataaaaactctgccaattcgctcacctaaggtgagcaacgtaaagaaggccctaagaatctaccacgagcagcaggtgaaaacacggggactcgaagaaatcccggtgttcgacatctcagaaaaaactgtgaatggcattgaaaataagagcctatctccggacgaggaacgtctggtctcagatattatcgatcccgtagcattggaaatacctctgagtaaaaatctcttagcacagatttcagccctggcactccaattagattctgaggaccttcataattattcaggcagccagctcttcgagatgcatgaaaaattatcttgtatggccaattcggtcattaagaacctgcaaagtcggtggcgcagcccgagccatgagaactccatctag

SEQ ID NO: 26032 - DNA, 264 bp, synthetic construct
  misc_feature 1..264: note = Description of Artificial Sequence: Synthetic coding sequence
  source 1..264: mol_type = other DNA
atgaccgcccggggccagagccccctggcccccctgctggagaccttggaggacccatctgcttctcatggtggccagactgacgcttatctcaccttgacgagtaggatgacaggagaagaaggcaaagaggtcatcacggagattgagaaaaaacttcctcgcctctacaaggtgcttaagacccacatcagtagccaaaattcagagttgtcttcagccgcgctgcaagccttaggattttgcttgtataaccccaaatag

SEQ ID NO: 26033 - DNA, 7341 bp, synthetic construct
  misc_feature 1..7341: note = Description of Artificial Sequence: Synthetic coding sequence
  source 1..7341: mol_type = other DNA
atgaccgcccggggccagagccccctggcccccctgctggagaccttagaggatcctagtgctagccatggcgggcagacagatgcctatttgacactcacatcacgcatgacaggagaagaaggcaaggaagtgattacagagattgaaaagaaactccctcggctgtacaaggtgctgaagacccatattagtagccagaattcagagctctcctccgctgccctgcaggcactcggattttgtctctataacccgaaaatcaccagcgagctgtcagaggcaaatgccttggaactgctctccaagctgaacgacacgattaagaactcggataaaaatgtaagaacccgggccctgtgggtcataagcaagcagacatttcctagcgaggtcgtgggcaaaatggtcagtagcatcatagactctctggagatcctgttcaataagggcgagacacactccgcggtggttgattttgaggccctgaatgtgattgtgcgattgatcgaacaggcccctatccaaatgggcgaagaggcagtgcgctgggcgaaacttgttattccacttgtcgtgcacagcgcacagaaggtgcatcttcggggtgctacagctctagagatgggcatgcccttactcctccagaaacagcaagagatagcgtccattactgagcagcttatgaccaccaagttgatcagtgagttacagaaactgttcatgagcaagaatgagacctacgtgctgaagctttggcccctttttgtcaagttgcttgggagaacgcttcatcgctccggctcatttatcaacagcctccttcagttggaagaactcggattccgctctggcgctcccatgataaaaaaaatcgcctttattgcgtggaagtctctgatcgacaacttcgccctcaacccagacatcctgtgttccgccaagagacttaagttactgatgcaaccactctcatccatccatgtaaggacggagactcttgccctgaccaaacttgaggtgtggtggtatctcctcatgcgccttggcccccacctgcctgctaacttcgagcaggtatgtgtaccactcatacaatcaactatctctatcgactctaacgcatctccacagggaaactcatgccacgtggccacctctccgggacttaaccctatgactcccgttcataaaggtgcttctagtccatacggggcccccgggactcctcgaatgaatctctctagtaaccttggcggcatggccacgatcccctccatacagctgctggggctggaaatgcttttgcacttcctgctcggccccgaggcactgtcttttgccaagcagaacaaacttgtacttagcttggaaccactggaacacccactgattagcagtccaagctttttctcgaagcacgcaaatacactgatcacggccgtgcacgacagtttcgttgcggttggaaaggatgccccggacgtggtagtatccgcaatatggaaggaacttatttcactggtgaagtcagtcacagagtccgggaataagaaggagaagcccggcagtgaggtgctcacgttgctgttgaaatccttggagtcaatcgtgaagagtgaagtctttcctgtcagcaagaccctggtactgatggaaattaccattaaaggactcccgcagaaggtacttggctcacccgcttaccaggtggcaaatatggacatcttgaatggaacccccgcgctattcttaatccagctgatcttcaataattttttagaatgtggcgtttccgatgaacgctttttcctgtctctggaaagcctggtcggatgtgtcctgtcagggcctacatcgcccctagctttttccgattctgttcttaatgtcattaatcagaacgctaagcaattggaaaacaaagagcacctctggaagatgtggagcgtaatcgtcaccccgctcactgaactgatcaatcagaccaatgaagtgaatcagggggacgcgctggaacataactttagtgcaatctacggagccctaaccctgccagtaaatcatattttcagcgaacagaggtttcccgtggcaactatgaaaacgttgctgagaacatggtcagaactctatagggcctttgcgcggtgcgccgccctggttgccacagcagaagagaatctgtgctgtgaggagttatccagcaaaatcatgtcgtctttggaggacgaagggttcagcaatctattattcgtggaccggatcatatacattatcactgtgatggtagattgtattgacttcagcccttacaacatcaaataccaacccaaagtgaaaagcccccaacgaccttctgactggtccaaaaagaaaaacgaacctctgggaaagctgacctccctgttcaagcttatagttaaggtgatatactccttccatactttgtccttcaaggaagcacattccgatactttattcacaatcggaaactctatcacggggattatctctagtgtcctggggcatattagcctgccttccatgattagaaagatctttgcaacactgacaagaccattggcactattttacgaaaactcaaaactagacgaggtgccgaaagtttattcatgcctgaacaataaactcgaaaagctacttggggagatcattgcttgcctccaattcagctacaccggcacgtatgacagcgaacttttagagcaattgtcacctctcttgtgtatcatcttcttacataaaaacaagcagataagaaaacagtccgcacagttctggaacgcgacattcgcaaaagtaatgatgctggtctatcctgaggagcttaaacctgtcctgacacaagcaaaacagaaatttctgctgcttctccctggattggaaaccgtggagatgatggaagagtccagcgggccatactcggacggaacggaaaactcccagttgaacgtgaagatctcagggatggaacgcaagtccaacggtaaaagagatagcttcctggcccagaccaagaataagaaagaaaacatgaaacccgccgcgaagcttaaactggagtcaagtagtctcaaagtcaaaggcgagatcctactcgaggaggagaaatccactgactttgttttcatcccgccggagggtaaagacgcgaaggaacgcatcttgaccgatcatcaaaaggaagtgctgaaaacaaaacgctgcgacattcctgcgatgtataataacctcgacgtgtctcaggataccctctttacccagtactcccaagaggagccaatggagattcccaccctcacaaggaagcccaaggaggattccaaaatgatgatcaccgaagagcagatggattccgacatcgtgattcctcaggatgtcaccgaggactgtggcatggctgagcatttggaaaaaagctctttgagtaataacgagtgcggaagccttgacaaaacctctccagagatgtcgaattccaacaacgacgagcgtaaaaaagccctgatttctagcaggaaaacctcaacagagtgtgcaagcagtacagagaatagcttcgtggtgtcttctagctccgtgtcaaacactacagtcgctggaactccgccgtaccctactagccggaggcagacctttatcaccctggaaaaatttgatggatccgaaaatcgaccattttccccatcaccattgaacaatatctcttcaacagtgactgtcaagaacaaccaagagactatgatcaagacggacttcctgccgaaagccaagcagcgggagggcactttctccaagagcgactcagagaagatcgtcaacggaacgaagaggtcaagtcggagagccggaaaagctgagcaaacgggcaataagcggtcaaagccactgatgcggagcgaaccggaaaagaatacagaggagagcgtggagggaattgtggtcctggagaacaatcccccaggtctgctaaatcaaaccgaatgcgtcagcgacaaccaggtgcatttatccgaatcgacaatggagcatgacaatacaaaacttaaggctgccactgtagagaacgcagttctgctggaaactaacacagtcgaagaaaaaaacgtggaaatcaacctagaatccaaagagaatactcctcctgtggttatctcggccgatcagatggttaatgaagattctcaggtccaaattacccccaaccagaagaccctgcgccgtagtagccggcggagaagcgaggtggtggagagcaccactgaatcgcaagataaagagaactctcaccagaagaaggagagaaggaaagaagaggagaaacctctgcagaaatctccactccacattaaagatgacgtgctaccaaaacagaagctaattgccgaacaaaccctccaggagaatttaatcgagaaaggatctaacttacatgaaaagactctcggcgaaacctcggccaacgctgaaaccgagcaaaataaaaaaaaagctgatcccgaaaacatcaagtcagagggagatggcactcaagacatagtggacaagagtagtgagaagctcgtgcgcggcagaacaaggtatcaaactcggcgtgccagtcagggcctgctgagttctattgagaactctgagtcagattcctccgaagcgaaggaagaggggagccgaaaaaagcggtctggcaagtggaagaacaagtcaaacgaatctgtggacattcaggaccaagaggaaaaggtggtaaagcaggaatgtatcaaggctgagaatcaaagccacgattacaaggccacaagcgaagaggacgtcagcattaaatctccaatctgtgaaaaacaggacgagtccaataccgttatttgccaggacagcactgtgacaagtgatcttctgcaggtgcccgacgacttgcctaatgtgtgtgaggaaaagaacgagacctccaaatacgcggaatattcgttcacaagcctgcccgtgcctgagtccaatctcaggaccaggaatgccatcaagagactgcataagagagactcttttgacaactgttcactgggcgagagtagcaagattggcatctctgacatttcgtcactgtcggaaaagacatttcagactctggagtgccagcacaaaagatcaaggcgggttaggagaagtaaagggtgtgactgctgtggagaaaaatcccaacctcaagagaaatctctcattggcttaaagaataccgagaacaacgacgtcgaaattagtgaaacaaagaaagcagatgtccaggcacctgtgtccccaagcgagacctcccaggccaatccctattcggaagggcagttccttgatgaacaccactccgtcaacttccacttgggtctcaaggaagacaacgacacaataaacgactccctgattgtgtccgaaacaaagtccaaggaaaacaccatgcaagagtctctgcctagcggcatcgtgaactttcgggaagagatctgtgacatggattcaagcgaggcgatgtcacttgaatcacaggaatcaccaaacgagaattttaaaacagtcgggccatgcctgggagacagtaaaaacgtgagccaggagtccctggaaaccaaagaggagaagcctgaggagacaccaaaaatggagctgtctctagagaatgtcaccgtcgagggaaatgcctgcaaagtgaccgagagtaacctggaaaaagccaagactatggaacttaacgtcggtaatgaagctagttttcatggccaagaacggacgaagaccggaataagcgaggaagcagcaattgaagagaacaaacgcaatgacgattccgaagctgacacagctaaactcaacgccaaggaagttgcaactgaggaattcaatagcgatataagcctcagcgacaatacgaccccggtcaaattgaacgcccagactgagatcagcgaacagactgctgctggcgagcttgatgggggaaacgatgtctcagacctgcatagcagtgaggagacaaacacgaaaatgaagaacaacgaagagatgatgataggagaagccatggcggagacggggcatgatggcgagacagagaatgaagggatcactacaaaaactagcaaaccagatgaggccgagacgaacatgctgacagcagaaatggataatttcgtttgcgacacggtggagatgtcaacggaagagggaattatcgacgcaaataagacagagaccaatactgaatattctaaaagtgaggagaaactggataacaaccagatggttatggagtccgacatcctccaggaggatcatcacacatctcagaaagtggaagagccgtcccagtgtttagccagcgggactgcaataagcgagctgatcattgaggacaacaacgccagtccacagaaattacgggagctggatccttccctggtctcagcaaacgacagtccttccggcatgcagacaaggtgcgtatggagcccactggcttctcccagcacctcaatacttaagagaggactgaagcggagccaggaggatgagatcagcagtccggttaataaagtgaggagagtctccttcgccgatcccatttaccaggccggcctggctgatgacattgacaggcgttgtagcattgtccgcagtcactcttctaactcctcgccgatagggaagtctgttaagactagtcccaccactcagtccaagatttccgaaatggccaaagagtccatcccctgtccgactgagtctgtctatcctcctcttgtaaattgtgtggcccccgtcgacattatcctcccacaaatcaccagcaatatgtgggccagaggcttggggcaacttattagagctaaaaacatcaagacgattggggacctcagcaccctgaccgcatcagaaatcaagacactgcctatccgctcccctaaagtcagtaatgtaaagaaggccttgcggatctaccatgagcagcaggtgaaaacacgtggtctggaggagatcccggtgtttgatatcagtgaaaagacagttaatgggatagaaaacaaatctctgtctccagacgaagaaagactggtcagcgatattatagatccagtggccctggagattcccctgtctaagaacctgttggcccagatctcggctctggctcttcagctggattctgaagatctgcataactatagtggcagccagctgttcgaaatgcacgagaagctctcgtgcatggccaattctgtgatcaagaatctgcaatcccgctggaggtccccttcacacgaaaactcaatttag

SEQ ID NO: 26034 - DNA, 7341 bp, synthetic construct
  misc_feature 1..7341: note = Description of Artificial Sequence: Synthetic coding sequence
  source 1..7341: mol_type = other DNA
atgaccgcccggggccagagccccctggcccccctgctggagaccctcgaagacccctctgcatcacatggcggccagactgatgcctatctgacactgacttctaggatgacgggcgaggaaggaaaggaggtgatcacagagatagaaaagaaactcccccgactatataaagtgctgaaaacgcatatcagctcccagaactctgagctgagttcagccgctctgcaggctttggggttttgtctatataatcccaagatcacatctgaactctctgaagcaaatgccctagaattgctgagtaaactgaatgatacaatcaaaaactcagacaaaaatgtgcggacacgcgccctgtgggtgatctccaaacaaacttttcccagtgaggtcgtcggcaagatggtaagtagcattattgactcactagaaattcttttcaataagggggaaacacacagtgctgtagtggatttcgaggccctgaacgtaatcgtgagactgattgagcaagccccaatccagatgggcgaagaagcagtgaggtgggcaaaactagtgatccctctcgtggtccacagcgctcagaaggtacacctccgaggcgccaccgcactcgaaatgggcatgccactcctgcttcagaaacagcaggagattgctagcataacagagcagctgatgacaactaagttaatcagtgagctacagaagctgtttatgagcaaaaatgaaacctacgtgctgaaactgtggccactcttcgtgaagcttttaggccgtacactgcaccgctcaggtagttttattaactcacttctacaactcgaagaactgggatttcgctctggagctccgatgattaagaaaatcgcctttatcgcatggaaatccctgattgacaactttgcgttgaatcctgacatcctgtgctctgctaaacgcttgaagttgttaatgcaacctttaagctccatccatgtacgaacagagaccctggctctcaccaagctggaagtttggtggtacctactgatgcgtctgggaccccaccttcccgcgaacttcgagcaggtctgtgtgccactgatacagtccactatttcgatagactcaaatgcctccccgcaggggaattcctgccatgtggccacaagccctggactgaacccaatgactccggtacacaaaggcgcttcctcgccttacggagcacccggaacaccccggatgaacctgtctagcaaccttggaggcatggccaccattccatcgatacaattacttggcctggaaatgctccttcactttctgctcgggcctgaagccctgtcattcgcaaagcaaaataagttagttctgagcctggagccccttgaacaccctctgattagttcaccgagcttcttctctaagcacgccaacactctcatcaccgccgtgcatgacagtttcgtggctgtggggaaagacgcacccgatgtcgttgttagcgctatttggaaagagctgatatctttagtcaaatccgtcacagagtctggcaacaagaaagagaaaccaggctcagaagtgctgacgctcctacttaaatctctggaaagcatagtaaagagtgaagtttttccggtctctaagactttggtgctgatggaaattaccataaaaggcctcccccagaaagtgctaggtagccccgcttaccaggtggcaaacatggatattctgaacgggacacccgctctctttctcatccagctgatatttaacaatttcctcgagtgcggggtgtccgatgagcgattcttcttgtctctagagagtctggtgggctgtgtcctgagcggaccaacttctcctctggcgttcagtgattccgtgctcaacgtcattaaccaaaacgccaagcaattagaaaacaaagagcatctgtggaagatgtggtcggtaatcgtcacacccctgaccgaactgattaatcagacaaatgaagtgaaccagggagacgctttagagcacaatttttccgcaatctatggggctctgacactacccgtaaaccacatattctcagaacagcggttccctgtcgctactatgaaaaccctgctgaggacctggagtgagctatatcgagctttcgctcggtgcgctgcccttgtggcaactgcggaggagaatctctgttgcgaggagcttagcagcaagattatgagtagtcttgaggatgaaggcttctccaacctcctgtttgtggaccgtattatatatattataactgtaatggtggattgcattgatttctctccatataatatcaagtatcagccaaaagtcaaatccccccagaggcccagcgattggtcaaaaaaaaagaatgagccgctgggtaaattgacaagcctgtttaaactgattgtgaaagtgatctacagttttcacaccctgtccttcaaggaagctcactctgataccttgtttaccatcggtaacagcatcacaggtattatttccagcgttctgggacatatttctctcccatctatgatccgcaagatattcgccactctgactcgcccactcgccctgttttacgagaatagcaaactggacgaagtgccaaaagtctacagctgtctgaacaataagcttgagaaactgctaggagaaatcatcgcctgtctccaattttcttacacgggaacctacgatagcgaactgctggagcaactgtccccccttctgtgcattatcttcctgcacaaaaataagcagatacgaaaacagtctgctcagttctggaacgccacctttgctaaggtcatgatgctggtctacccagaggagttgaagccagttctgacacaggctaaacagaagttccttctgctgcttcctgggctggagacggtggagatgatggaggagagttccgggccgtatagtgatggcaccgagaactcccagctaaatgtgaagatctctggaatggaaaggaagagtaacgggaagagggacagttttctcgctcagaccaaaaataaaaaagagaatatgaaacctgcggctaagctcaagctcgaatcttcatcactcaaggtcaagggagaaattctgttggaggaagagaaaagcaccgatttcgtgttcattccccctgaagggaaagatgctaaggagaggatcctaacggaccatcagaaggaagtcttaaagaccaagagatgcgatattcccgccatgtacaacaacctggatgtgagccaggataccctctttacacagtattcgcaggaagaaccgatggagattcctactctgacaaggaagcctaaggaagacagcaagatgatgatcaccgaagagcagatggacagtgatatcgttatccctcaggacgtcaccgaggactgtggaatggccgaacacctggagaagagttccctcagcaacaacgagtgcgggtcactcgacaagacgtcccctgaaatgtcgaattctaacaacgatgagcgcaagaaggccttgatcagtagcagaaaaactagtaccgaatgcgcgtcaagtacagagaattcgttcgtggtcagttcttctagtgtcagcaacaccaccgttgcaggcacaccaccttatcccacatctcggagacagacattcatcaccttggagaagtttgacgggtcagagaataggcccttcagtccttcccctctcaacaacatcagctcaacagtgactgtgaaaaataaccaggaaacgatgatcaaaaccgatttcttgcccaaggccaagcagcgagagggcacattctcaaagagtgatagtgagaaaatcgtaaacggcacgaagaggtcctccaggcgggctgggaaggctgagcaaaccggcaataagaggtctaagcccctgatgcgatccgagccagagaagaacactgaagagtccgtcgagggaatcgtggttctcgagaacaacccaccaggcttgctgaaccagaccgaatgtgtttccgacaatcaggtacaccttagcgagagtacgatggagcacgacaacactaagctgaaagctgctaccgtggagaatgccgtgctacttgagaccaatacagtcgaagagaaaaacgtagaaataaacttagaatctaaagagaacactccacctgtagtgatttcagccgaccaaatggtaaatgaggacagccaggtgcagataacaccaaatcagaagacactacgacgcagttcccgaagacgcagtgaggtcgtagagtcaacaacggagagccaggataaggaaaattcacaccagaagaaggaacggcgcaaggaggaagagaagcctctgcagaaaagtcccttacatattaaggatgatgtactgcctaagcagaaactgatagctgagcagactctgcaagaaaacctgatcgagaaaggaagcaacctgcacgaaaagaccctgggtgagacatccgctaacgccgaaactgaacagaacaaaaagaaggccgaccctgagaatatcaaaagtgagggcgatggaactcaggacattgtggacaaatcctccgagaaattggtgcggggacggacacggtatcaaaccagaagggcctcacagggcctcctgtcttcgatagagaacagtgagtctgactctagtgaagcaaaggaggaaggctccaggaaaaagcggagtggaaagtggaaaaataaatctaacgagtctgtggacatacaggatcaagaagaaaaggtggtgaaacaagaatgcattaaggcagaaaatcaaagccacgactacaaagcgacatcggaggaggatgtttccatcaaatcaccgatttgcgagaagcaggatgagagtaacaccgtgatctgccaggactctacagtcaccagcgacctgctgcaagtgcccgatgacctacccaatgtttgcgaagagaagaatgaaaccagcaagtacgctgagtactccttcacttcgctgccagtcccagagagcaacctaagaacgagaaacgctatcaagcgcctgcataagagggacagctttgataactgcagtcttggggagagtagcaaaatcggtatttctgacatttcaagtctttctgagaagacctttcagacactggagtgccagcataagcgctcgcggcgtgtgcgacgttcaaaggggtgtgactgctgtggcgagaagtcccagccacaggagaagtctcttatcggacttaaaaacacggagaacaacgacgtagagatcagtgaaaccaaaaaagctgacgtacaggcaccagtatcccctagcgagacctcccaggctaacccttactcagaggggcagttcctggacgaacatcactctgtgaatttccaccttggccttaaggaggataatgataccataaacgattctctgattgtgagtgagactaagagtaaggagaacactatgcaagaaagcctgccttctggcatcgtgaatttccgagaggagatctgcgacatggactcctctgaggccatgagtctggaaagccaggagtccccgaacgagaattttaagacagtcggaccatgtctgggggacagcaagaatgtcagccaagagtccttagagaccaaggaggagaaacccgaggaaaccccaaaaatggagcttagcttggagaatgtgaccgtcgaaggtaacgcgtgcaaggtcactgagtctaacctggaaaaggccaaaaccatggaactcaatgtgggcaatgaggcctcatttcacgggcaagagaggactaaaaccggcatttctgaagaggcggccatcgaggaaaacaagcggaacgacgactcagaggcagacacggccaagctcaacgccaaggaagtggccaccgaagagttcaacagcgacatctccctttccgataacacaacccctgtcaaactgaacgctcagactgagatctccgagcagacagccgccggcgagcttgacggaggaaatgatgtgtcagacctgcattcatcagaggaaacaaatacaaaaatgaaaaataatgaggagatgatgataggggaggcgatggccgaaactggacacgatggtgagaccgaaaatgaaggcattaccactaaaacgagcaaacctgacgaggccgagacaaatatgttgactgccgaaatggataactttgtctgcgataccgtggagatgtctactgaggaggggattatcgacgctaacaagaccgaaaccaataccgaatattccaagtcggaagagaaactagataacaatcaaatggtcatggagtctgatattctgcaagaggatcatcatacttcacaaaaggtcgaagagccttcacagtgcttagccagcgggacagctatctccgaactgatcatagaagataacaacgcctctccccagaaattgagagaactggacccgtccctggtcagcgcaaacgacagcccaagtggcatgcaaaccaggtgcgtctggtcacctctggcctccccttccacaagtatccttaaacggggcctcaaacgctcacaggaagatgagatttcgtcccctgtcaacaaggtacgaagagtgtcttttgctgacccaatctatcaagcagggttagctgatgacatcgaccgccgatgctcaatcgtcaggagccacagttcaaactcctcgcccattggtaagtccgtcaagaccagtccgacgacacaatcaaaaatctcagagatggcaaaagaatccatcccctgcccaactgagtccgtatatccccctctcgttaattgtgttgctcctgtcgacatcatactacctcagatcactagcaacatgtgggctcgaggtctcgggcaactgatcagagcgaagaacatcaagacgattggtgacctgtctacgctcactgcaagtgaaatcaaaaccttgcctattaggagcccaaaggtgtctaacgtgaagaaagcactccgcatttaccacgagcaacaggtgaagactcgaggtctggaagagattcccgtgtttgacattagtgaaaaaactgtcaacgggatcgaaaacaaatctctctcacccgacgaagaaagattggtgagcgacatcatagacccagtagctttggagatccctctctccaagaaccttttagctcaaatttccgcgctggcattgcaactggactccgaggatctgcacaactacagtggatcccaattattcgagatgcacgaaaagctgtcatgtatggccaatagcgtgataaagaatctgcagtctaggtggcgctccccctcccacgaaaattccatttag

SEQ ID NO: 26035 - DNA, 1026 bp, synthetic construct
  misc_feature 1..1026: note = Description of Artificial Sequence: Synthetic coding sequence
  source 1..1026: mol_type = other DNA
atgaccgcccggggccagagccccctggcccccctgctggagaccctggaagacccttcagcctctcatggcgggcagaccgacgcctatctgaccctgactagccgaatgacgggagaagaaggaaaggaggtgatcacagagatagagaagaaactcccgcgtctatacaaagtgctgaaaacccacatctcatcgcagaactccgagcttagcagcgccgcactgcaagccctcgggttttgtttgtacaaccccaaaattactagtgagctctccgaggcgaatgctctcgagttgctgtcaaaactcaacgatacaattaagaactcggacaagaatgtcagaacgagggcactgtgggtcatatccaagcagaccttccccagcgaggttgtaggtaagatggtctcatccattatcgatagtctagaaattctgtttaacaagggtgagacacattccgccgtggtggattttgaggccctaaatgtaatcgtgagactcatcgagcaggctccgattcaaatgggagaggaagcagtaaggtgggccaagcttgtgatccccctggttgtgcactcagcccagaaggtgcatctgaggggtgccacagctctagagatgggaatgcccctgctactgcagaaacagcaggaaatcgcaagtattactgagcagcttatgaccacaacacttcaccgctccgggagttttataaattcactgctccagttagaggaattgggcttccgtagcggcgcccccatgatcaagaaaattgcttttatcgcttggaaaagtctgattgataacttcgcacttaatcccgacatcttgtgctccgccaaaagactgaaactgttgatgcagcccctgagcagcattcatgtgcggactgaaaccctggcgctgactaaactggaggtgtggtggtaccttctgatgagactgggcccccatctgccagcaaatttcgaacaggtgctgccaccccggacagagccgcgcgaactcccagaatag

SEQ ID NO: 26036 - DNA, 7419 bp, synthetic construct
  misc_feature 1..7419: note = Description of Artificial Sequence: Synthetic coding sequence
  source 1..7419: mol_type = other DNA
atgaccgcccggggccagagccccctggcccccctgctggagaccctggaagatccttctgccagtcacggaggccagactgatgcctatttgacccttacctctagaatgaccggggaagaaggaaaagaagtcattacagaaatcgagaagaagttgccaaggctttacaaagtgctgaagacacatattagctcccagaatagcgaactgtcctctgccgcgttgcaggcccttgggttctgcctgtacaatcccaaaataacctccgagctcagcgaggccaatgcccttgagctgctaagtaaacttaatgacaccataaagaactcggacaagaacgtgcgcacccgggccctgtgggtcatctctaaacagacgttcccctccgaggttgtgggaaagatggtgagtagcatcatcgattcgttggaaattctgtttaataagggcgaaacacatagtgccgtggttgattttgaagcgctgaacgtgatcgtcagactgattgagcaggcacccattcaaatgggcgaggaggccgtgcgatgggccaagctggtaatcccattggtggttcactccgcacagaaggtgcatctaagaggggccaccgccctggagatgggaatgcctctgctcctacagaaacagcaggagatcgcctccatcaccgagcagctgatgaccaccaagcttatctccgagctgcagaagctgttcatgtccaagaacgaaacttatgtgctgaagctttggccactctttgtcaagctattgggaagaactcttcatcggtctgggtctttcataaacagcctgctccagctagaggagctcggctttcgatccggggcgccaatgatcaaaaaaatagccttcattgcctggaagtccctaatcgacaatttcgccctgaaccctgatattttgtgtagtgccaagcgcctgaagctcttgatgcagccgttaagttctattcacgtcaggaccgagactctggcgttgacaaaactagaggtttggtggtacctcctcatgaggttaggacctcacctgcctgctaatttcgagcaggtttgtgtgcctctcatccagtctaccatttcgatcgacagtaatgcatcaccacagggcaatagctgtcacgtggccacctctcccggcttaaacccaatgacaccagttcataaaggggcgtcaagcccatatggtgcgcccgggaccccacgcatgaacctgagtagtaatctggggggaatggctacgatcccctccatacagttgctcggtctcgaaatgttgctgcacttcttgctcggacccgaggcattgtcatttgctaagcaaaacaaactcgtgctgtctctggaacccttagagcaccccttgatttcaagtccttctttcttctcaaaacacgcgaatacactgatcactgctgttcacgacagctttgtcgcggtgggtaaagacgcacccgacgtcgtggttagcgctatttggaaggagctgataagcctagtcaaatccgtaacagaatccgggaacaagaaggaaaagccgggaagcgaagttctaacgcttctcctgaagagcctagagtcgatcgtaaagtctgaagtttttccagttagcaagacccttgtcctgatggagatcacgataaaagggctccctcagaaagtactgggcagtccagcttaccaggtcgctaacatggatatcctcaacggcactcccgccctgttcctaatccagttaatattcaacaatttccttgaatgcggcgtgagtgacgaaagatttttcctgagcttggaatcgcttgtcgggtgtgtgctgtcaggacccacctctccactggctttctcggacagcgttttgaatgtgataaatcagaatgctaagcaattggaaaataaggagcacctgtggaaaatgtggtctgtcattgttactcccttgacagagctgattaaccagaccaatgaggtaaatcagggggatgcactagagcacaacttcagcgctatatatggcgctctcacattacccgttaaccacatcttctcggagcagaggtttcctgtagccaccatgaagacactcctccggacttggtccgaactttatagagcgtttgcgcgttgtgcagctctcgtcgccacggccgaagaaaatttgtgttgcgaggaattgagcagcaagatcatgtcaagtttggaggatgaaggctttagtaatctcctgtttgttgacagaataatctacattattaccgtgatggttgactgcatcgacttctccccgtacaacattaaatatcagcctaaagtcaaatccccgcagcgcccttccgattggtcaaagaaaaagaacgagccattaggtaaactgaccagtctgttcaaacttatcgtgaaagtcatctattcttttcacaccttatcttttaaggaggcccactccgatacactctttactatcggtaattcaatcactggaatcatcagctccgttctgggtcatattagtctcccaagtatgatccgcaagattttcgctactctaacccgtcccctggccctgttctatgaaaatagcaagctagacgaggtcccaaaggtgtactcctgcctgaacaataagctggagaagctgctcggagagatcattgcctgtctccagttctcctatactggcacttatgacagtgagctgcttgagcagctaagtcctttgctctgcatcatcttcctgcacaagaacaagcagatccgtaagcagtccgctcaattctggaacgctacctttgcaaaggtgatgatgcttgtttatccggaagagcttaaaccagtgctgacccaagccaaacaaaagtttctgctcttgttacctgggctggaaactgtggaaatgatggaggagtcatccggcccctacagcgacggaactgagaactctcagttgaatgtcaagatcagtggaatggagagaaagtccaacgggaagcgcgactccttccttgcccagacaaaaaataagaaggagaacatgaagcccgcagccaaattgaagttagagtcctcgtcgctgaaggtcaaaggtgagattctgttggaggaggagaaaagcacggactttgtctttattcctcctgaggggaaggatgcgaaggaaaggatcctcacagatcaccagaaggaagtgctgaaaacaaagcggtgcgatatacccgcaatgtacaataatctggatgtgagccaagataccctcttcacgcaatatagccaagaagagcctatggagatcccaacacttacaaggaagcccaaagaagactccaaaatgatgatcacagaagagcagatggacagcgacattgttatccctcaagacgtcaccgaagactgtgggatggctgaacatctggagaagtcctcgctgtccaacaatgagtgcggctctctcgataagacaagtcctgaaatgagcaatagcaataatgatgagcgtaagaaagcactcatatcatcgcgaaagacctcaaccgagtgcgcttcttcaaccgagaacagttttgtggtgtcaagcagctccgttagcaacacaacagtggcaggaaccccaccttatccgacctcccggcgtcagacatttataaccctggaaaaatttgacgggtccgagaataggccgttttcccccagcccgctaaacaatatttcatccacggtgacagttaaaaataatcaggaaaccatgataaagaccgactttctgcccaaagccaagcaacgggagggaacgttctctaaatctgactcagagaaaatagttaatggcaccaaacgctcctcaagaagggctggaaaagccgagcagactggcaataagagatcaaaaccactgatgcgatccgaacctgagaaaaatactgaggaatccgtggagggcatcgtggtcctggagaacaatccacctggcctcctcaaccagaccgaatgtgtgtcagataaccaagtacacctctcagagagcacaatggagcatgataacactaaactaaaagctgcaactgtagagaatgccgtgttgctcgaaactaatacggtggaggaaaaaaatgtcgagattaatctggaatctaaagagaataccccacctgtagtaatcagtgccgatcagatggtgaacgaggatagccaagtccaaattaccccaaaccagaaaactctccggcgtagtagtcggagaagatccgaagtagttgagtctacaaccgaatcccaggacaaggagaactcccatcagaagaaagagagacggaaagaggaggaaaaaccacttcagaaatccccgctgcacataaaggacgacgtgctacccaagcagaagctgatagcagagcaaacgcttcaggagaatcttatcgaaaaaggttctaatctgcatgaaaaaaccctcggagagaccagcgctaatgccgagacagagcagaacaagaagaaagcggaccctgagaacataaagtcggaaggcgatgggacgcaagacattgtagataagtctagcgaaaagttagtcagaggacgtactcggtaccagacaaggcgagcatcccagggtctgctctcatctatagaaaattccgaaagtgattcgagtgaggctaaggaagaggggagcagaaagaagaggagtggcaaatggaagaataagagcaatgagtctgtcgacatccaggatcaggaagagaaggtcgtgaagcaggaatgtataaaagccgaaaatcagtcccatgattacaaggccacttcagaggaggacgtgtcaattaagtctccaatttgcgaaaagcaggacgaaagcaatacggtgatctgtcaggattctactgttacatctgatctcctccaggtgcccgacgatctgccgaatgtctgcgaggagaagaacgaaacctctaaatacgccgaatacagctttacttcgttacccgttcccgaatcaaatctccggactcgaaatgcgatcaagcggcttcataaacgagatagctttgataactgcagcctcggtgagagttccaagatcggtatttcagacatctcttctctcagcgagaaaacttttcagaccctcgagtgccaacacaagagatcccgccgcgtgcgtcgatctaaaggttgcgactgctgtggtgagaaaagccagcctcaggagaagagtcttatcggacttaaaaacactgaaaacaacgatgtcgagatctcagagactaagaaagcggacgtgcaggcaccagtttccccttcagaaaccagccaggccaatccatatagcgagggacagttcctggacgaacatcacagcgtgaacttccatctggggctcaaagaagataacgatactatcaatgatagcctgatcgtcagcgaaaccaagagtaaagaaaacaccatgcaggagtccctgccctccggcattgtcaatttcagggaggagatatgcgacatggactcatcagaggccatgagtctggaatctcaggagagccccaacgagaacttcaaaacggtgggcccatgtctgggagattcaaagaacgtgtcgcaggagtctttggagaccaaggaggaaaagcctgaagagacacctaaaatggaattaagcttagagaatgtaaccgtggaaggaaacgcttgtaaggtgaccgaaagcaatcttgagaaggccaagaccatggagctaaacgtggggaatgaagcctcgttccatggccaagaacgcactaagaccggcatttccgaggaagctgccatcgaggagaataagcggaatgacgactctgaagcagacacagccaaactgaacgccaaggaagtagccaccgaagaattcaattccgatatctccttaagtgataacacgaccccagtgaagctcaatgcccagactgagatttcggaacagactgccgccggagagctggatggtggcaacgatgtctctgatctgcacagctccgaagagacaaacactaaaatgaaaaacaacgaagaaatgatgataggagaggctatggccgagaccggacacgatggggagaccgagaatgagggcatcactaccaaaacctcaaaacccgacgaagcagaaacaaatatgctgaccgccgaaatggacaattttgtctgtgacaccgtagagatgagtacggaagagggcatcatcgatgctaataaaacagagacgaataccgagtattctaaatctgaagagaaactggataacaatcagatggttatggagtccgacatcctgcaggaagaccatcatacgagccaaaaggtggaggaacctagtcagtgcttagccagcgggacggcaatttcagagttaatcatagaggataataatgcatccccgcagaagctccgcgagctagatccctccttggtgtccgccaacgacagcccttccggtatgcagacccgctgtgtctggtcccccttggcaagtccctcgaccagcatcctgaaacgcggcctgaaaagatcacaggaagatgagatctcctcacctgttaacaaagtgcggagagtgagtttcgccgaccctatctaccaagcgggcctggccgacgacatagaccgtcgatgttcgatcgtacggagccatagctcaaattctagccccatcggaaagtccgtgaagacctctccaactacacaatccaagcataatacgaccagcgccaaaggattcctcagcccagggtctaggagcccaaagtttaagagctccaagaagtgtctcatctcggagatggctaaagagtcaatcccgtgcccgactgaatctgtgtacccccccctggtgaactgtgtggctcctgttgacattatcctgccacagatcacctctaatatgtgggcccggggcctgggacaacttatccgcgctaagaatatcaaaacaataggagatctaagcacattaacagcttctgagatcaagacacttcctatcagatcaccgaaggtgtctaacgtgaagaaagccttacggatttaccatgagcaacaagtgaagacaagaggcttagaggaaatccccgttttcgacatttcggagaaaaccgttaatgggattgagaacaagtccctgagtccagacgaggagcgcctcgtgtcagatattatcgacccagtcgcccttgaaattccgctgtctaagaacctcctggcgcagatttccgcactcgctctgcagcttgattccgaagacttgcacaactactccgggtcccagctgtttgagatgcatgagaagctgagctgcatggctaattccgtgatcaaaaatctgcagtcacggtggcgcagtccttcgcacgaaaattcgatatag

SEQ ID NO: 26037 - DNA, 7341 bp, synthetic construct
  misc_feature 1..7341: note = Description of Artificial Sequence: Synthetic coding sequence
  source 1..7341: mol_type = other DNA
atgaccgcccggggccagagccccctggcccccctgctggagaccctcgaggacccatcagcatcccatggcggccaaacagatgcctacttgaccctgactagcagaatgacaggcgaagagggaaaggaggtcatcaccgagattgagaagaaacttccaagattgtacaaggtcctaaagacccatattagttcccaaaattccgagctgtcttcggcagcactgcaagccctggggttttgtctgtataatcccaagattacctccgaactgtcagaggccaacgcgctcgaactactctctaaactgaatgacactatcaagaatagtgataagaacgtgcgcactcgcgccctgtgggtaatcagcaagcagaccttcccatcagaagtcgtaggcaaaatggttagctcaatcattgattcactggagatcctctttaataagggcgagactcacagcgccgtggtggactttgaggctctaaacgtgatcgtcagactgatagagcaggcccccatccagatgggtgaggaagccgtccgatgggctaagttagtgatccccttggtggtgcactccgcccagaaggttcatctgcgaggggccaccgctctggaaatgggcatgcctctgttgctccaaaaacaacaggagatcgccagcattacggagcaactgatgacgacaaagctgatttccgaactgcagaagctgttcatgtcgaagaacgagacttatgtcctaaagttatggcccctatttgtcaagttgctgggacgaacgctgcaccgaagcggctcatttatcaacagcctcttgcagctggaagaattgggctttcgttccggagcaccaatgatcaagaagattgcctttatcgcctggaagagcttaatcgacaatttcgcactgaatcccgacatactctgttcagctaagcgattaaaactgctgatgcagcccctgagctcaatccacgtgcggactgaaaccctggcattgaccaagctagaagtgtggtggtacctgctgatgcgccttgggccccacctgcccgccaactttgagcaggtgtgcgtaccattaattcaaagcacaatttcaatcgattccaatgcctctcctcagggaaacagttgccacgtggccacctcacctgggctgaaccctatgaccccagtgcacaagggagcttcatctccctatggtgcacctggcaccccacgtatgaacctgtcttccaatctgggggggatggctactattcccagtatccagctgctcggcttagagatgttactacacttcctgctggggccagaagcattgtctttcgcaaagcagaacaaattggtgctgtcccttgagcctctggagcaccctttaatcagctccccctcattctttagcaagcacgccaatactctgataaccgcagttcacgatagcttcgtggccgtcggtaaagacgcacctgacgtggtggtttcagctatatggaaagagttaatttctctcgtcaaatcagtgacagagtccggcaataaaaaggagaagccgggatcagaggtcctgacgctgcttctgaagagcctggaatctatcgtcaaaagtgaagtgtttcctgtgagtaaaacactggtgcttatggagattaccattaagggactgccacagaaagtgctgggaagtccagcctaccaggtggctaacatggacattctgaacggaactcccgctctgttcctcatacagcttatctttaataatttcctggaatgcggagttagcgacgagagattcttcctctcactggagtcactcgtggggtgcgtgctgtccggcccaacaagtcctctggccttttcggactctgtgctcaatgtcatcaaccagaatgccaaacagctagagaacaaagagcatctatggaagatgtggtctgtgatcgttacgcccttgacagagcttatcaaccaaactaatgaggtaaatcagggggacgccctggagcacaatttcagtgctatttacggagccctcacgctaccagtcaaccatatattcagcgagcagagattcccggtggcaacaatgaaaactctgctgcgtacctggtctgagttgtacagagccttcgctagatgcgccgctctcgttgctactgctgaagaaaacctgtgttgtgaagaactgagtagcaagattatgagcagtcttgaagacgaagggttttccaatcttctgttcgttgatcggattatttacattataaccgtcatggtggattgtatcgatttctctccttacaacatcaagtatcagccaaaagtcaagagtccccagaggccaagcgattggtcaaagaagaagaatgagcccctgggtaaacttacctcgttgttcaagttgatagtcaaagtgatttattcttttcacacattgagctttaaggaagcgcatagcgatacactgttcactatcggcaactcaattacgggcattataagctctgtactgggccatatctctctgccatccatgatccgtaaaattttcgctacattgactcgaccactggctctattttatgagaactctaagctggatgaagttccaaaagtatacagctgcttgaataacaagctcgagaaactgctcggagaaatcatcgcctgtctacaattttcttacacaggaacgtatgattcagagttactggagcagctgtctccgctgctgtgtattattttcctgcataagaacaaacagataaggaaacagtccgcgcagttttggaatgcgacatttgctaaggtaatgatgctagtttaccccgaagagctgaaacctgtactcacccaagctaaacagaaatttctgctcttgctccccggactcgagacagtggagatgatggaggagtcaagtggcccctactccgatggaaccgagaattcgcagctgaacgtaaaaatctccggaatggagcggaagtccaatgggaagagagactctttcctggcgcagactaaaaataagaaagagaacatgaagcccgctgctaagcttaaactggagtcctcttctctgaaagtgaagggcgagatcctcctcgaggaggagaagtcgacagattttgtgtttataccacccgaaggtaaagacgccaaagaacgaatactcaccgaccaccagaaagaagtgcttaagactaagcgatgcgatatacccgctatgtacaataatttagatgtcagccaggacacacttttcacccagtatagtcaggaagaaccaatggagatcccgaccctaacaagaaaacccaaagaagactctaagatgatgatcacagaagaacagatggacagtgatatcgtgatcccccaagacgttacggaggactgcggtatggccgagcacctggagaaatctagtttgtcaaacaacgagtgtggctctctcgataagacctcacccgaaatgagcaattctaacaatgatgagaggaagaaagctctgatttccagtcggaagacatcgactgaatgtgcatcttccactgaaaattcctttgtcgtgagcagttcttctgtcagtaacaccaccgtagccgggacacccccatatcctacaagtaggagacaaactttcataacgcttgaaaagttcgatggctccgagaatcggcctttttctccaagccctctgaacaacatcagctccaccgtcacggtgaagaacaaccaggaaaccatgattaaaaccgacttcttgcctaaagccaagcagagggagggcacatttagcaaaagtgatagtgagaagattgtgaatggaaccaagaggagctctcggcgggcaggaaaagccgaacaaactggcaacaaaaggtcgaagccactcatgcgttcagagcccgaaaaaaacaccgaggaaagtgttgaggggatagtggtactggagaacaatccccctgggttgctgaatcagaccgagtgtgtgtctgacaatcaggtacacctcagtgagtccacaatggaacatgacaacacaaaactaaaagccgccactgtagagaatgctgtactcctggaaaccaatactgtggaggagaagaacgtggagattaacctggaatcaaaggaaaatactcctccggtggtcatcagcgccgatcagatggtgaacgaagactcccaagtgcagattaccccgaaccaaaaaacgctccgcaggtcttctcgccgacggtcagaagttgtggagagtacaaccgagtcgcaggataaggaaaattcccaccaaaagaaggagcggcgaaaggaggaagagaaacccctgcagaagtcccctctgcatattaaagatgatgtgctgcctaaacagaagctgattgccgagcaaaccttgcaagagaacctgatagaaaagggatccaacctccatgaaaaaaccctgggtgagacatcagctaacgctgagaccgagcagaacaagaagaaggccgacccagaaaacattaagagtgagggggacgggacccaggatatcgttgacaagtcctccgaaaagctggtgaggggccgcacccgatatcagaccaggcgcgcctcgcagggcctgctgagctcgattgagaattctgaatcagatagcagcgaggccaaggaagaaggaagccggaagaaacgctcgggtaaatggaaaaacaaaagcaatgagagcgtcgacattcaggatcaggaggaaaaggtggtgaaacaggaatgcatcaaggcagagaatcagagccacgactacaaagccacctcagaagaggacgtcagcattaagagccctatttgtgagaagcaggatgaatcaaacactgtcatctgccaggactcgactgtgacttccgatcttctgcaggtgccagacgatctgcctaacgtgtgtgaggagaaaaatgagacctccaagtatgcggagtattcctttacgtctctgcccgtgcctgagtctaacctccggacgagaaacgccattaaaagacttcacaaaagagactccttcgacaattgttcactcggagagtcttcaaagattgggatttcggacatatcgagtctcagtgagaaaactttccagaccctggagtgtcagcacaaacggtctcgtcgggtgagaagaagcaagggttgtgactgttgtggcgagaaaagccagccacaggaaaagagtctgatcggcctgaagaatacagagaataacgatgttgagatttccgaaacaaaaaaagctgatgtccaagccccggtcagccccagtgagacaagtcaggcaaacccttacagcgagggtcaattcctggacgaacatcacagcgtgaactttcaccttggcctaaaagaggacaatgacaccattaatgattcgctgattgtctctgaaacaaaaagcaaggagaacaccatgcaggagagtttacctagtggaatcgtaaacttcagagaagaaatctgcgatatggattcttcggaggctatgtccctggaatcacaggagtcaccgaatgagaattttaagaccgtcggtccatgcctcggggactctaaaaacgtttcacaggagagtctggagacaaaggaagaaaaacctgaagagacaccgaaaatggaacttagtctcgaaaacgtgacagttgaggggaatgcgtgcaaagtgacagagtccaacctggaaaaggcaaaaactatggaactaaatgtcggtaacgaagccagttttcatggccaggaacggactaagactggcatctccgaggaagctgctatagaagagaataagaggaatgatgattctgaggcggatactgccaagctgaacgcaaaggaagttgctactgaagagttcaacagcgacattagcctatccgacaatacgacaccagtcaaactcaacgcccagactgagatttcagagcaaactgcagccggcgagctggatgggggcaacgacgtgagcgacctacattcctccgaagagaccaacacaaagatgaagaacaatgaagagatgatgattggcgaagctatggccgagacagggcacgatggagagacagaaaacgagggaattacaacaaagacctcgaagcccgatgaggctgagaccaatatgcttacagccgagatggacaatttcgtgtgtgatacggtcgagatgtcaacggaggagggtatcattgatgcaaataaaacagagactaatacggagtattcgaaatctgaggagaagttagataacaaccaaatggtgatggaaagcgacatcttacaggaggaccaccatactagccaaaaggttgaggagccatctcagtgtttagctagcggtactgcaatcagtgaattgattattgaggataataatgctagtcctcaaaaattgagagagttagatccttccctggtgagcgccaacgactccccctcgggtatgcaaactagatgcgtctggagccctctggcttccccatccaccagcattttgaagagaggcctgaagcggtctcaggaggacgaaataagcagcccggtgaataaggtgcggagagtttccttcgctgaccctatctaccaagcaggcctggccgacgatatcgatcgccggtgcagcattgtgaggtcacatagctccaactccagtccaatcggcaaatccgtgaagacgagccctactactcagagcaagatttccgagatggcgaaggaaagcattccatgccccaccgaaagtgtgtatccccctctcgttaactgcgtcgcaccagtcgacattattctgccccagattaccagtaatatgtgggcccgggggcttgggcagctaatacgggccaagaacatcaaaaccattggggatctgtctactctgaccgcttctgagattaaaacactccctatccggagccctaaagtgtcgaatgttaaaaaggcacttagaatttaccatgagcagcaggtgaaaaccagaggactcgaagaaattcccgtttttgatatttctgaaaagaccgttaacgggatcgagaacaaaagcttgagtccggatgaggagcggctcgttagcgacattatcgaccctgtggctctggagatacctctctccaagaatcttctggcgcaaatctctgccttggccctgcagcttgactctgaagacctgcacaattactcgggcagtcagttgtttgaaatgcatgagaagctcagctgcatggccaattccgtcatcaaaaatctgcagtcaaggtggaggtctccctctcacgagaattccatttag

SEQ ID NO: 26038 - DNA, 555 bp, synthetic construct
  misc_feature 1..555: note = Description of Artificial Sequence: Synthetic coding sequence
  source 1..555: mol_type = other DNA
atgcgggagtacaagctggtggtgctgggcagcggcggcgtgggcaagagcgcgcttactgtgcagttcgttcaaggcatcttcgtagagaaatatgatcccacaattgaggactcctacaggaaacaagttgaggtggattgtcagcagtgcatgctggagattctggatacagcggggactgagcagttcacggctatgagagatctatatatgaaaaatgggcaaggatttgcccttgtgtactctattaccgctcagtcaactttcaatgatcttcaggatctcagggagcaaatcctgagggtaaaggacacagaagacgttccaatgatattggtgggcaacaagtgtgatctggaagacgaaagagtggtggggaaggagcagggtcagaatctggcccgacagtggtgtaattgtgcctttttagagtcttccgccaagagtaagatcaacgtcaatgagattttttacgaccttgtccggcagatcaacaggaaaactcctgtggagaaaaaaaaacctaagaaaaaaagctgccttcttttgtag

SEQ ID NO: 26039 - DNA, 555 bp, synthetic construct
  misc_feature 1..555: note = Description of Artificial Sequence: Synthetic coding sequence
  source 1..555: mol_type = other DNA
atgcgggagtacaagctggtggtgctgggcagcggcggcgtgggcaaatcagctctgacggtccaattcgtgcagggaatctttgtcgaaaagtacgatcctaccattgaagactcttaccggaagcaggtagaagtcgactgtcaacagtgtatgctcgaaatccttgacacggccggaacggagcagtttactgcgatgagggatctctatatgaagaacgggcagggattcgccctggtgtactcgattaccgcacagtcgacatttaatgacctgcaggatctccgggaacagattcttagggtcaaggacactgaagatgttcccatgatactggtgggtaacaagtgtgatctggaggacgaacgcgtggtcgggaaggaacagggccagaatctggcacgccaatggtgcaactgtgcgttcttggagagcagtgctaagtctaagattaatgtgaatgaaattttctacgatctggtgcgccaaattaatcgtaaaactcctgtggaaaagaaaaaaccaaagaagaaatcctgtttgctcctgtag

SEQ ID NO: 26040 - DNA, 390 bp, synthetic construct
  misc_feature 1..390: note = Description of Artificial Sequence: Synthetic coding sequence
  source 1..390: mol_type = other DNA
atgcgggagtacaagctggtggtgctgggcagcggcggcgtgggcaaatctgccctgacggtccaatttgtgcagggcatctttgtagaaaagtatgaccccaccatcgaagactcgtataggaaacaagtcgaagtcgactgccaacagtgtatgttggagattctggacaccgctggcacagaacagttcactgcaatgcgtgacctatacatgaagaatggccagggctttgccttggtgtacagcatcacagcacagagtacttttaacgaccttcaggatctgagggagcagattcttcgggttaaagatacagaggacgttccaatgatcctggtgggaaacaaatgcgatcttgaagatgaacgggtggtaggcaaggagtag

SEQ ID NO: 26041 - DNA, 555 bp, synthetic construct
  misc_feature 1..555: note = Description of Artificial Sequence: Synthetic coding sequence
  source 1..555: mol_type = other DNA
atgcgggagtacaagctggtggtgctgggcagcggcggcgtgggcaagagcgccctgaccgtgcaattcgtccagggtatttttgtcgagaaatacgatcccaccatcgaggacagctacagaaagcaggtggaggtggactgtcaacagtgtatgctggagatactggacactgccggaacagaacagttcacagccatgagggacctgtatatgaagaatggccagggattcgccttagtctatagtatcacagctcagtccacattcaatgacttgcaggacctgcgcgagcagatcctgagagtgaaagacacagaggatgtccccatgattttggtgggtaataagtgtgatttagaagatgagagagtcgtggggaaggagcagggccagaacctggccagacaatggtgtaactgtgccttcctggaatccagtgccaaaagcaaaattaatgtcaacgaaatattctatgacctggttcgccagataaataggaagacacctgtcgagaaaaaaaaaccaaaaaaaaaatcctgcctgctgctgtag

SEQ ID NO: 26042 - DNA, 555 bp, synthetic construct
  misc_feature 1..555: note = Description of Artificial Sequence: Synthetic coding sequence
  source 1..555: mol_type = other DNA
atgcgggagtacaagctggtggtgctgggcagcggcggcgtgggcaagagtgcactgacagtgcagttcgtgcagggtatcttcgtcgagaagtacgaccccaccatcgaagacagctatagaaagcaggtggaagtggattgccagcagtgcatgcttgagattcttgatacggctggcacagagcagtttaccgccatgcgggacctttacatgaagaacggtcaagggtttgccttggtatatagtataacggcccagtctacatttaatgatctgcaggacctccgggaacagatcctgcgggtgaaagacaccgaggacgtcccaatgattcttgtcggtaataaatgcgacctggaagacgagagagtggtgggcaaggagcagggacaaaatctggcccggcagtggtgtaactgtgcctttcttgagtcgtctgctaagtccaaaatcaatgtgaacgagattttctatgatctcgtccgccagatcaatcggaagacgcccgtggagaaaaagaagccaaagaaaaaatcatgcctgttgctctag

SEQ ID NO: 26043 - DNA, 1380 bp, synthetic construct
  misc_feature 1..1380: note = Description of Artificial Sequence: Synthetic coding sequence
  source 1..1380: mol_type = other DNA
atgcgggcccagatcgaggtgatcccctgcaagatctgcggcgacaagtctagcgggattcattatggggtgataacctgtgaaggctgcaagggcttctttaggcgctctcagcagaacaatgctagttactcttgtcccaggcagcgcaattgcctcattgataggacgaatagaaatagatgtcagcactgcagactccagaagtgcctcgcacttggaatgtccagagacgcggtgaagttcgggcgcatgtcaaaaaagcagagagatagtctgtacgctgaagttcagaagcaccagcagaggcttcaggagcagcgacagcaacagtcaggggaagcagaggccctggcgcgggtatacagctcatccatctcaaacggtctgtcaaacctcaataacgagaccagtggaacctacgccaacggccacgtcattgacttacctaagtcggaaggatactacaatgttgacagcggccagccttcccctgaccagagcggactagacatgacagggatcaagcagatcaagcaggaacccatatacgatctgaccagcgtccccaacctgttcacatattccagctttaataatggccagcttgcaccagggatcactatgactgagatagacaggatcgcacagaatataattaagagtcacctggagacgtgtcagtataccatggaagaattgcatcagctggcttggcagacacacacttacgaagagatcaaagcgtatcaaagtaaatcacgcgaggccctgtggcagcagtgtgccatccagatcacacatgctatccaatacgttgtggagttcgctaagcgaatcactggcttcatggagctgtgtcaaaatgatcagatccttctgttgaagtccggatgtcttgaggtggtcctggtgaggatgtgccgcgcctttaatcccctgaacaacaccgttctgtttgaaggaaaatacgggggcatgcagatgtttaaggccttgggttccgatgatttggtgaatgaggcctttgattttgccaagaacctctgtagtttgcagttaaccgaggaggagattgctttgttctcttctgctgtactgatttctccggaccgggcttggcttatcgagcctagaaaagttcaaaagctgcaagagaagatttactttgcattgcagcacgtgatccagaaaaatcacctcgatgatgagaccctggctaagctgatagcgaaaataccaactattacagccgtctgcaatctgcacggggaaaagttgcaggtctttaaacaaagccacccagagatcgtcaataccctcttccctccactgtacaaagaactgttcaaccccgactgcgccactggatgcaaatag

SEQ ID NO: 26044 - DNA, 1413 bp, synthetic construct
  misc_feature 1..1413: note = Description of Artificial Sequence: Synthetic coding sequence
  source 1..1413: mol_type = other DNA
atgtgcgagaaccagctgaagaccaaggccgacgccaccgcccagattgaggttatcccttgcaaaatctgtggcgacaagtcctcagggattcattatggcgtgatcacctgcgagggctgcaagggtttctttagacggtcccagcagaacaacgcatcttactcatgcccacgccagcggaattgcctcatagataggacaaaccgcaaccggtgtcagcattgtcggctgcaaaaatgcctggcactgggtatgtctagagatgctgtgaagtttggaagaatgtcaaaaaaacagcgggattctctttatgcggaggtacagaaacaccagcagcggttacaggagcagcgccagcagcaatccggcgaggccgaggcactagcccgtgtatattccagcagtatttccaatggtctgagcaatctcaataacgaaaccagcggcacatatgccaacggtcacgtgatcgaccttcccaagtctgaaggatactacaacgtggactccgggcagccctctcctgaccagagtggcctcgacatgactgggatcaaacagattaaacaggagccgatttatgacctgacttcagttccgaatctgtttacctacagctctttcaacaatggccagttggctccaggtattaccatgactgagatcgaccgaatcgcccagaacatcattaagtcccacctcgagacgtgccagtacaccatggaggaactgcaccagctcgcttggcagacacacacttacgaggaaattaaggcataccagagcaagagcagagaggcactctggcagcagtgtgcgatccagataacacacgcaatacagtacgtcgtggaattcgccaagaggattaccggcttcatggaattatgtcagaacgatcagatactgctgctaaagtcggggtgcctcgaagtcgtcctggtgaggatgtgcagagcctttaaccccctgaacaacaccgtccttttcgagggcaaatatggcggtatgcagatgttcaaagcattaggctctgacgatctagttaatgaggcctttgatttcgctaaaaacctgtgctccctgcagttgactgaggaggaaatcgccctcttcagcagcgctgtcctaattagtcccgaccgcgcctggctaatcgaaccccgcaaggtccagaaactgcaagaaaaaatttattttgctcttcaacatgtgattcagaagaaccacctggacgacgaaacccttgccaagttgattgcgaagatccctactatcactgccgtgtgtaacctgcacggtgaaaagctgcaagtgtttaaacagtcccatccagagatagtgaataccttattcccaccactctataaggagctgtttaatccagactgtgcaactggctgcaagtag

SEQ ID NO: 26045 - DNA, 813 bp, synthetic construct
  misc_feature 1..813: note = Description of Artificial Sequence: Synthetic coding sequence
  source 1..813: mol_type = other DNA
atgggcgaggccgaggcccccagcttcgagatgacctggagcagcaccacctctagtggatactgcagtcaggaggatagtgattcagagctggagcagtattttactgcccggacatcactcgccaggaggccaaggcgcgaccaggatgaacccgtggaatgggagacccccgacctctctcaagctgaaatcgaacaaaaaatcaaagagtataacgctcagattaattctaatctgttcatgagcttgaacaaggacggcagctacaccggatttataaaggtgcaactcaaattggtgcgccctgtgagcgtaccgtctagcaagaaacctccgtcacttcaggacgctaggagagggcccggtagagggacaagtgtacggaggcgaacctcgttttatttgcccaaagacgccgtcaagcacctccacgtgctgtcccggacgagggctcgagaggtgattgaagctcttctgcggaaatttctggtggttgacgatccgcggaaatttgctctgtttgagcgagcggagcggcacggacaggtttatcttcggaagttgttagacgacgagcaaccgctgagactgcggctgctcgcaggacctagcgacaaggcactgagtttcgtcctgaaggaaaacgattcaggtgaagtgaattgggatgctttttcgatgcctgagttgcacaactttctgaggatcctgcaacgcgaggaagaagagcatctgcgccagatacttcagaaatattcatattgcagacagaagattcaagaagctctgcatgcgtgtcccctgggatag

SEQ ID NO: 26046 - DNA, 1035 bp, synthetic construct
  misc_feature 1..1035: note = Description of Artificial Sequence: Synthetic coding sequence
  source 1..1035: mol_type = other DNA
atgagcggcgagcccgagctgatcgagctgcgggagctggcccccgcgggcagggcaggaaaaggaaggacgcgactggaaagggccaacgccttgcgaattgcccgcggaactgcttgcaaccccacaaggcagttggtcccaggaaggggacatcgttttcagccagctggacccgcaactcacacgtggtgcgatttgtgcggagacttcatctggggcgtggtacgcaaaggcttacagtgtgctcgcctgtcagccgattgcaagtttacctgtcattataggtgtagggccctcgtatgtctggattgctgcggaccacgtgacttgggttgggaacccgccgtggaacgggataccaatgtggacgagccagtggaatgggagacaccggacctaagccaggctgagattgagcagaagatcaaggagtataacgcacagattaactccaacctgttcatgtccctcaataaggatgggtcctatacggggttcataaaagtacagcttaagttggtccgcccagtgagcgtaccctctagtaagaaaccgccatctttgcaggacgctcgccgcggaccagggcgaggaaccagtgtcagaaggagaacgagtttttacctgccaaaagatgctgtcaagcatcttcacgtgttgagtcgaacccgggcacgggaggtgatcgaggccttgcttcggaagttcttggtggtggatgaccctaggaaatttgccttattcgagcgggcagagcggcacgggcaagtttacctccgaaaactcctggatgacgagcagcccctgcgcctgcgcctgcttgccgggcctagtgacaaagccttgtcctttgtcctgaaagaaaatgacagtggtgaggtgaattgggatgctttctcgatgcccgagctgcacaattttttgcgtatcttacagcgagaggaggaggaacatttgaggcagattctgcagaaatacagctactgcagacagaagatccaggaggccctccatgcgtgccccctcgggtag

SEQ ID NO: 26047 - DNA, 1023 bp, synthetic construct
  misc_feature 1..1023: note = Description of Artificial Sequence: Synthetic coding sequence
  source 1..1023: mol_type = other DNA
atgagcggcgagcccgagctgatcgagctgcgggagctggcccccgcaggcagagcgggaaagggtcggactaggctggagagggctaatgccttacgtatcgcaagggggaccgcttgcaatccaacgagacagctggttccagggaggggacataggttccagcctgccgggcccgcaacccatacgtggtgtgacctctgcggcgacttcatatggggagtggttagaaaagggctccagtgtgcccactgtaaattcacgtgccactaccggtgcagagccctcgtttgcctggactgctgtgggccgcgagacctgggatgggagccagctgtcgagcgagatactaacgtggacgagccagtagagtgggagacacccgatctcagccaggctgagattgaacaaaaaatcaaagagtacaatgcccagatcaactctaacctattcatgagcctgaacaaagatgggtcctataccggtttcattaaggtgcaactcaagctggtgcggcccgtgagcgtgcctagcagtaaaaaacctcccagcctgcaggacgccagacgcggtcctggacgcggcactagcgtccggcgcagaacctccttttacctgcccaaagatgcggtaaaacatttacatgttctgtccaggacgagggctcgagaggtgatagaggcgttgcttagaaagtttcttgtggttgacgatccccgcaagttcgctctgtttgaacgggcagagcgccacggccaggtataccttcgaaaactgctggacgatgaacaaccacttaggttacgactgttggctggtccgagtgacaaggcgctgtcgttcgtgttgaaagaaaacgacagcggggaggtgaattgggacgctttctctatgccagagctccataactttctccgtatactgcagcgtgaagaggaagaacatttacggcagatactccagaagtattcttactgccgccagaaaattcaggaagccctgcacgcctgtccgctcggctag

SEQ ID NO: 26048 - DNA, 570 bp, synthetic construct
  misc_feature 1..570: note = Description of Artificial Sequence: Synthetic coding sequence
  source 1..570: mol_type = other DNA
atgagcctgaacaaggacggcagctacaccggcttcatcaaggtgcagctcaaattagtccggccagtcagtgtgccatcatcgaagaaacctcctagtttacaggatgctaggcggggccccgggcgcggaacaagcgttcggcggcgtacctccttctatcttcccaaggatgctgtgaagcatctccacgtactgagtaggacaagagccagggaagtcattgaggccctcctgagaaagttcctagtggtggatgatccaagaaagtttgctcttttcgaaagagccgagcggcatggccaggtatacttgaggaaattactggatgacgaacaacctctccggctgagactgctcgcgggtccttctgacaaggctctctccttcgtgctgaaggaaaacgactctggggaagtcaactgggacgcatttagtatgcccgagctgcacaatttcttgcgaattctccagcgcgaggaagaggagcacctgcgtcagattctccagaaatacagctattgcaggcagaagatccaagaggcccttcacgcatgcccgctgggatag

SEQ ID NO: 26049 - DNA, 981 bp, synthetic construct
  misc_feature 1..981: note = Description of Artificial Sequence: Synthetic coding sequence
  source 1..981: mol_type = other DNA
atggactacagccaccagaccagcctggtgccctgcggccaggacaagtacattagcaaaaacgaactgctgttacatcttaaaacctacaacctctattacgaaggccagaaccttcagctcaggcaccgagaagaagaggacgagtttatcgtggaaggccttctgaacataagctggggcctgcgtagaccaatccgtcttcagatgcaagatgataacgaacgaattcgcccccccccaagcagtagtagctggcactcaggctgtaacctgggtgcccaaggaactacactgaagccgctgaccgtgcctaaagtgcagatctccgaggtggacgctcccccagagggcgaccagatgccttcctctacggattctaggggtcttaagcctctgcaggaagacacgcctcagctgatgagaactagatcagacgttggggtgcgacgcagaggtaacgttcgtacccctagtgaccagcggcggatacgccggcatcggttttcaatcaatgggcacttttataaccataagacctccgtgtttactccagcttatgggagtgtcaccaacgttcgaatcaacagcactatgaccacacctcaagtgttaaagttactgctgaacaagttcaaaatcgagaacagtgctgaggaattcgctctttatgtcgtgcacacttcaggtgaaaaacagaaactgaaggcaaccgactatccacttatagctcgcatcctgcagggtccctgtgaacagatcagcaaagtctttctcatggagaaggaccaggttgaggaggtgacctacgacgtcgcccagtacattaagtttgaaatgcctgtgcttaaatcttttatccagaaactacaagaggaggaggatagagaagtgaaaaaattgatgagaaaatacacggtactgaggctgatgatccggcagaggctggaggagatagcagagacgcccgccacaatctag

SEQ ID NO: 26050 - DNA, 981 bp, synthetic construct
  misc_feature 1..981: note = Description of Artificial Sequence: Synthetic coding sequence
  source 1..981: mol_type = other DNA
atggactacagccaccagaccagcctggtgccctgcggccaggacaaatatatctctaaaaatgagttactcctacacctgaaaacgtataatctatattatgaggggcagaatctgcagctgcggcacagggaggaagaggatgaatttatcgtggaggggctgttgaatatttcttgggggctccgccggccgatcaggttgcagatgcaggacgacaatgagcgtattagacctccgccctcctcctccagctggcacagcgggtgcaatttgggggcccagggtacaaccttgaaaccactaacggtgccaaaggttcagatatcagaggtagacgccccacctgaaggcgatcagatgcccagcagtaccgactctcgaggactgaagcccctgcaggaggacacccctcaactgatgaggactaggtcagacgtcggagttaggcggcgggggaatgttaggacgccaagcgatcagaggcggatccggcgccaccggttcagtatcaacggccacttttataaccacaaaaccagcgtgttcacaccggcctatggctcagtgacaaacgtgagaatcaactccactatgaccacccctcaagtgctgaagctgttactgaataaatttaaaatcgagaactcagccgaagagtttgctctgtatgtggtgcacacatcaggcgagaagcagaagctgaaggcgacagactaccctctcatcgcacggattttgcagggaccgtgcgaacagatttccaaggttttccttatggagaaagatcaggttgaggaagtgacttacgatgttgcccaatacattaaattcgagatgcctgtgttgaagtcattcattcaaaagctgcaggaggaggaggaccgagaagttaagaagctcatgcgcaaatataccgtgcttcggctgatgattcgacaaagactggaagaaatagcagagactcctgccactatctag

SEQ ID NO: 26051 - DNA, 993 bp, synthetic construct
  misc_feature 1..993: note = Description of Artificial Sequence: Synthetic coding sequence
  source 1..993: mol_type = other DNA
atgaaggaggactgcctgcccagcagccacgtgcccatcagcgactctaagagcatccaaaaaagggatgtccaggggctcagcgaggaaggaaccttaatcatagagggtttgctcaatattgcctggggccttcgacgccctattcgattgcaaatgcaggacgatcgagagcaggttcatttaccttcaacctcttggatgcctcgcagaccgagctgtcccctgggatgttggtccctgcttctgggactcagctccctcagcctcccagcggccattagcgcgctgcagctttcagtgtttaggaaggaaccttcgcctcaaaatggaaatattactgcacagggaccctctatccagccggtccataaagcagagtccagcacggatagtagtgggccactcgaggaagccgaagaggcccctcagctgatgcggacaaagtcagacgctagttgcatgagccagcgccgacccaagtgtcgggcaccgggggaggcccagcgaatccggagacatcgcttctctatcaacgggcatttctacaatcataagacgagtgtgttcactcccgcctacggcagtgtgactaacgtgcgggtgaactctactatgactacactccaggtgttgactctgctattaaacaagtttcgggtcgaagatgggccctccgagttcgccctttacattgttcacgaatctggcgaacgcactaagcttaaggactgcgagtatccactaatctcacggattttgcacgggccatgcgaaaagatcgcgcggatcttcctgatggaagctgatttaggagtcgaagttccccacgaggttgcccagtacattaaatttgaaatgcccgtactcgactctttcgtcgaaaagctgaaggaggaggaggagcgcgaaattattaaattgaccatgaagttccaggcgctgcgactaactatgctgcagagactggagcagttggtggaggccaaatag

SEQ ID NO: 26052 - DNA, 966 bp, synthetic construct
  misc_feature 1..966: note = Description of Artificial Sequence: Synthetic coding sequence
  source 1..966: mol_type = other DNA
atgaaggaggactgcctgcccagcagccacgtgcccatcagcgacagtaagtctatccagaaatccgaacttttaggtttgttaaaaacatataactgctatcatgagggaaaaagtttccagttgcggcatagagaggaggaggggactctcatcattgagggcctgcttaacatcgcctggggtttgcggcgccccattcgtttgcaaatgcaagatgaccgagagcaggtgcatcttcctagcaccagctggatgcctcgtcggccctcgtgtcctcttaaagagccttcaccccaaaatggaaatatcaccgcccaggggcctagtatccagccagtgcataaagcagagagttccaccgatagctccggcccattagaggaggctgaggaggcaccccagctcatgaggaccaagagtgacgcgagttgcatgtcacagcggcgaccaaagtgcagggctccaggcgaggcgcagcggatccgtcgccatagatttagcattaacggacatttctataatcataaaacctccgtattcacacctgcatatggatccgtcaccaacgtgagagtaaacagtaccatgactactctccaagtacttactctcctgttgaacaagttccgggtggaggatggccccagcgagttcgccctgtatattgtgcatgaaagcggggagcgtacgaagctaaaagactgcgaatatccactgatctcccggatcctccatggcccttgcgaaaagattgcaagaattttcctgatggaagcagatctgggtgtggaggtgccccacgaagtagcacagtatattaagttcgaaatgccggtgctcgatagttttgtggagaaactcaaggaagaagaagagcgcgagataatcaaactgaccatgaaattccaggcactgcggttaaccatgctccagcgcctcgagcagctcgtggaagcaaagtag

SEQ ID NO: 26053 - DNA, 1239 bp, synthetic construct
  misc_feature 1..1239: note = Description of Artificial Sequence: Synthetic coding sequence
  source 1..1239: mol_type = other DNA
ggcagcaacgccggcggcggccagggcggctgccagggcctgacctgcgatagtgagtcagtcggcactctggatatactcgaccagactcaagcgtgtccagtctccttagcatcatcctctgcccgccctccgtgtcctccacctggcccctgcgcagagccatccggttgcatagcaatggccgtgtggtcccctctggtgatgccaggtaggcgcgagggatgttgccatactccagtgacaaacgaggaaactgaggctcgggaggccaaaggacagaagttgcgtccctgtcatacactcggcgtgcatgtttgtttgtctctgttccggtcagagctcttagggttattgaagacatacaactgctatcacgaggggaagagtttccaactgcggcaccgtgaagaggaggggactctgataatagaaggcttacttaatattgcttggggcctgcgacgacccattagacttcaaatgcaggatgaccgagagcaggtgcacctcccatccacttcctggatgccacggagaccatcatgtccgcttaaggaaccaagcccacagaacggcaacatcacagcacaaggaccttcaatccagccagtgcataaggctgagtcctcaactgattctagtggcccactagaagaagccgaagaggcgccgcagcttatgagaacaaagtctgatgcgagctgcatgtcccaacgccgccccaagtgtcgcgcaccaggcgaggcccaaaggattcgcagacatagattttcaatcaacgggcacttctataaccacaagacctccgttttcactccagcctatggatctgttacaaacgttcgtgtgaactctacaatgacaactctccaagtgctcacacttttgttaaataagttcagggtggaagacggacctagcgaatttgcactgtacattgtacacgagtctggcgagaggactaaactaaaggactgcgaatacccccttatttctagaatcctccacgggccatgcgagaaaatcgctcgcattttcctcatggaagctgacttaggggtggaggtgccacacgaagtggcacagtacattaaattcgaaatgccagtgctggatagctttgtggaaaagttgaaggaggaagaggaaagggagataatcaaacttaccatgaaatttcaagctctccgactgacaatgctgcagcggttagaacagctggtggaagctaaatag

SEQ ID NO: 26054 - DNA, 393 bp, synthetic construct
  misc_feature 1..393: note = Description of Artificial Sequence: Synthetic coding sequence
  source 1..393: mol_type = other DNA
atgaaggaggactgcctgcccagcagccacgtgcccatcagcgacagcaaaagtattcaaaaatctgaattgttgggcctactcaaaacctacaactgctatcatgagggcaaatccttccagttgcggcacagggaagaagaaggtactctgataatagaaggattacttaatatcgcttggggactgcgcagaccaatcaggctgcagatgcaggacgacagagagcaagtccacctcccttcaacaagctggatgcctagacgccccagttgtccactacatctggcagggaagaagggccgtcttcaacccggaggcctcccaactcctatgcaagctgagcacgtgtcccccagtctcgtgttatccctcaaattcacgcgtatttag

SEQ ID NO: 26055 - DNA, 381 bp, synthetic construct
  misc_feature 1..381: note = Description of Artificial Sequence: Synthetic coding sequence
  source 1..381: mol_type = other DNA
atgaaggaggactgcctgcccagcagccacgtgcccatcagcgactctaagtcgatccagaagtccgagctgctggggctgctaaaaacctacaattgttaccatgagggcaagtcattccagctgcgccacagagaagaggagggtactttaattatagaaggcctcctgaacatcgcctggggtcttcggcggccgatcagattgcagatgcaggacgatcgagagcaagtgcatctcccaagtacgtcttggatgccgcggcgaccaagttgccctctggcccctggtggcggaagaggaggcccaccagctgacgccgaccaggagcgccgccaattgcacgagccagaagaagcccaggtgcctaggccacggtag

SEQ ID NO: 26056 - DNA, 456 bp, synthetic construct
  misc_feature 1..456: note = Description of Artificial Sequence: Synthetic coding sequence
  source 1..456: mol_type = other DNA
atgaaggaggactgcctgcccagcagccacgtgcccatcagcgactccaagtcaatccagaaatccgaacttctgggcttgctgaaaacttataattgttaccacgaaggcaagtctttccaacttagacatagagaggaggagggcaccctgattattgaaggactccttaatatagcctggggacttcgaaggcccattaggcttcagatgcaggacgacagggagcaagtgcatttgccaagtacaagctggatgccccgccggccttcctgtccactgggctgctggagcttgctgctgggcctctcttcactgtcattgccagcagctattagtgcactgcagttatcagtgtttcggaaagaaccttctccccaaaacgggaatatcacagcccagggcccctctattcaaccggtgcataaagctgaatcctctaccgattccagctag

SEQ ID NO: 26057 - DNA, 372 bp, synthetic construct
  misc_feature 1..372: note = Description of Artificial Sequence: Synthetic coding sequence
  source 1..372: mol_type = other DNA
agcagccacgtgcccatcagcgacagcaagagcatccagaagagcgaactgctcgggcttctcaagacatacaactgctaccacgaaggtaagagcttccagcttcgccatcgggaggaggaaggaacacttattattgaaggcctgctcaatatagcctggggactgagacgacccatcagactgcagatgcaggacgatcgagagcaagtccacttgccgtcaacatcatggatgcctcgccgacctagttgcccccttcatctcgcgggcaaaaaaggaaggctgcagccaggtgggctccccactccaatgcaagccgaacatgtctctccctccctggtgctgtccttaaaatttacacgcatctag

SEQ ID NO: 26058 - DNA, 798 bp, synthetic construct
  misc_feature 1..798: note = Description of Artificial Sequence: Synthetic coding sequence
  source 1..798: mol_type = other DNA
atgaccgtggacagcagcatgagcagcggctactgcagcctggacgaagagctggaggattgtttctttacggcgaaaacaacttttttccgcaacgcgcaaagtaagcatttgtcaaagaacgtctgcaaacccgtggaggagacccagcgcccgcctactttgcaagagattaagcagaagattgattcttataatacaagagaaaagaattgcctcgggatgaagctcagcgaggatgggacctatacaggattcattaaggtccacctgaaactaagaagacctgttacggtgccggcaggcattagaccccagtctatttacgatgccattaaagaagtgaacctcgccgctaccactgataaaagaacttccttctatctccctctcgatgcaatcaaacaactccacatctcttcaacaactaccgtcagcgaagttatacaaggcttgttaaagaagtttatggttgtcgataaccctcagaagttcgctctgttcaaacggatccacaaagatggccaggtgctgttccaaaagctgagcattgccgacagacccctgtacctgagactgcttgcaggcccagacaccgaagtactgagtttcgttctaaaggagaacgaaacgggtgaagttgaatgggatgccttctctataccagaactgcaaaactttttaaccatattagaaaaagaggaacaggacaagatccagcaagttcagaagaagtacgacaaattccgtcagaaactcgaggaagctctgagggaaagtcaggggaagcccgggtag

SEQ ID NO: 26059 - DNA, 1179 bp, synthetic construct
  misc_feature 1..1179: note = Description of Artificial Sequence: Synthetic coding sequence
  source 1..1179: mol_type = other DNA
atggccatggccagccccgccatcggccagcggccctaccccctgttgctagacccagaacccccacgttatctgcagtcactgtctggtccagaactacccccacccccccctgatcggagctcaagactgtgcgtacccgctcctttgtctacagcccctggcgcccgtgagggtcgctcagctagacgagcagccaggggaaatttggaaccccctccaagagcctcccgacctgccagacctctccgccctggattgcagcagcgtctccggcgccgcccaggcgcccccaggccgcgggatgtacgctctatctttgagcagcctcaggatccgcgggtccccgctgaaaggggtgaggggcattgcttcgccgaactcgttctgcccgggggtccggggtggtgtgatctgtgtggacgggaggtgcttcggcaagccctcagatgtactaattgcaaatttacttgtcaccccgagtgccgctcccttatacagcttgactgtagccagcaggagggtttgagccgtgatcggccgtcacctgaatccactcttacagtgacatttagccagaacgtgtgtaagcccgtcgaagagactcagcgccctccaactttgcaggagattaagcaaaagatagactcttacaatactagagagaagaactgtcttgggatgaaactgtcagaggatgggacgtatacaggtttcattaaagttcacctaaaactgaggcgccctgtgacggtccctgctggcataagacctcagagtatatacgatgctatcaaggaggtaaatttggcggccactacagataaaagaaccagcttttacctgccccttgacgcgattaagcagctacacatatcgtccacaaccaccgtgagcgaggtaattcaggggttacttaagaagtttatggtcgtagataacccacagaaattcgccctctttaagcgcatccacaaggacggccaggtcctattccaaaagttatctatcgccgatcggcccctttatttacgactcttggccgggcctgacaccgaagtgctgtcatttgtccttaaagagaatgaaaccggcgaagtggagtgggatgcattttcaatccctgagctacagaacttcttgtcttcttggtgcatacaaatttacttgtattattag

SEQ ID NO: 26060 - DNA, 1257 bp, synthetic construct
  misc_feature 1..1257: note = Description of Artificial Sequence: Synthetic coding sequence
  source 1..1257: mol_type = other DNA
atggccatggccagccccgccatcggccagcggccctaccccctgctgctagatccagagcctcctcgctacctgcagagcttaagtgggccggagctcccccccccaccgccagatcgcagttctcggctgtgtgtccccgctcctcttagtaccgcaccaggcgccagagagggacgtagcgctcgcagagcagcacgcggtaacctggagccacctcccagggcctccaggccagcacggccgctcaggccgggtttgcagcaaaggctacgcaggagaccaggagctcctagaccccgagatgtgagatctatcttcgagcaaccccaggatcctagggtgcctgccgagagaggagaaggccactgcttcgctgagctggtgctacctgggggaccagggtggtgcgatctatgcggacgcgaggtgttgagacaggccctgcgctgtaccaattgtaaatttacttgccacccagaatgtcgcagcctgatccagttggattgtagccagcaggaaggtctgtcacgcgatcgaccgagccctgaatctacattgacagtgactttttcccagaacgtttgtaagccagttgaggagacccaacgaccacccacgcttcaggagattaagcagaaaattgactcctataacacacgcgaaaagaactgcctcggtatgaaactgtcagaagacggcacatacaccggcttcattaaggtgcatcttaagctccgtcgccccgtcacagtgcctgccggcattcgaccacaatccatttatgacgccatcaaggaggtgaacctcgccgcaactactgataagcggaccagtttttatttacctctcgatgccattaagcaactccatataagtagtactacaaccgtcagtgaagtcattcagggactgttgaagaagttcatggttgtggataaccctcagaagtttgctctgtttaagcgaattcacaaggatggccaggtgttgttccagaaactcagtattgcagaccggcctctctatctcagactcctcgccggacctgataccgaagtgctgtcgtttgtgttaaaagaaaatgagaccggcgaggtggagtgggacgccttttcaatccctgaactgcagaacttcctgaccatcctcgagaaggaggagcaggataagatacagcaggtccagaagaaatatgacaaattccggcagaaacttgaggaagccctgcgagaatctcagggcaaacccgggtag

SEQ ID NO: 26061 - DNA, 1011 bp, synthetic construct
  misc_feature 1..1011: note = Description of Artificial Sequence: Synthetic coding sequence
  source 1..1011: mol_type = other DNA
atggccatggccagccccgccatcggccagcggccctaccccctgctgctggatcccgagcccccgcggtacctccagtccctttccgggccagaactccctccacctcctcccgacagatctagtagactgtgtgtgccggcaccgctgagcaccgctcccggcgcacgcgaaggacgatcagccagacgggcggctcggggaaacctcgagcctccccccagagcttcccgacccgcacggcccttgcgtcccggactccagcagagactgcgtagacgccccggagcccctcggccgcgggacgtgaggtccatattcgagcagccacaggatccccgagttcccgcagaacggggcgagggacactgtttcgctgagctggtgctaccaggcgggcccgggtggtgcgatctttgtggacgagaggtattgcgtcaggctttgcggtgtacaaattgcaagtttacctgtcaccccgaatgccgctccttaatccagctggactgcagccagcaagagggcctgagccgggaccggccaagtccagagagcacactgacagtcactttttcccagaacgtgtgcaagccagtagaggaaacccagcggcctccaaccctccaggaaatcaagcaaaagatagattcttacaatacccgcgagaagaactgccttggaatgaaattatccgaagacgggacgtatactgggttcatcaaggtgcacctcaaactgaggaggccagttacagtccctgccggtattagaccccagagcatctatgacgcgatcaaagaagttaacttggcggccaccactgacaaacgcactagtttttacctacctctggacgccataaaacagcttcacatttcatccaccactacagtcagcgaggtaatccagggtctgctgaaaaaattcatggttgttgataaccctcagaaattcgccctgtttaaacgtatccataaagacgggcaggtgggctgcctgctgcacccatag

SEQ ID NO: 26062 - DNA, 1182 bp, synthetic construct
  misc_feature 1..1182: note = Description of Artificial Sequence: Synthetic coding sequence
  source 1..1182: mol_type = other DNA
atggccatggccagccccgccatcggccagcggccctaccccctgttgctggatcctgagccacctcggtacttacagtcactcagtggtccagagctgcctccaccaccacccgatcgctcatcaaggttgtgtgtacccgcaccactcagcacggcaccaggcgcacgcgagggacgcagcgcccgtagagctgcgcggggcaatctggagcctcccccccgggctagtagaccagcacgccctctccgccctggactccagcagaggttgcgcaggagacctggcgctcccaggcccagagacgttcgctccatttttgaacagccccaagacccacgcgtgccagctgaaaggggggagggacattgcttcgcagaactcgtgctgccgggtgggcctggctggtgtgacttgtgtggtagagaggtgctacgccaggcccttcggtgtaccaactgcaagtttacgtgccaccccgaatgtcgcagcctcattcagctggactgttcccaacaagaaggactctctcgcgatcggccttcccccgaaagtaccctgacagtcacttttagccaaaatgtctgcaagccagtggaagagacccagaggccgccaactctgcaggaaattaagcaaaaaattgattcgtataatacccgcgagaaaaactgcttgggcatgaagctgtctgaggacggcacctatacaggattcattaaagtgcacttgaagttgagaaggcctgttaccgtgcccgcgggtattagacctcagtcaatctatgacgccataaaggaggtcaacctggctgccaccacagataaacgcaccagcttttacctgccattagacgccatcaagcagcttcacatctcctctacaaccacagtatccgaggtgattcaagggctgctgaaaaagtttatggttgttgataaccctcagaagttcgccctattcaaacgaatccacaaggacggccaggttctttttcagaagctaagcattgcggatagacctctctacctcagactgttagccgggccagacactgaggttctctccttcgtgctcaaagagaatgagactggggaagtggagtgggatgccttctctatcccagaactgcaaaattttttcctctcttcttggtgtatacagatatatctgtattactag

SEQ ID NO: 26063 - DNA, 555 bp, synthetic construct
  misc_feature 1..555: note = Description of Artificial Sequence: Synthetic coding sequence
  source 1..555: mol_type = other DNA
atgccccagagcaagagccggaagatcgccatcctgggctaccggagtgtgggcaagtccagcctgacaatccagttcgtcgagggccagtttgtggattcctatgatccaaccatagaaaatacattcaccaaattaattacagtgaacgggcaggagtatcacctgcagctcgtggatactgctgggcaggatgagtacagtatctttccccaaacatacagtatcgatattaacggttacatcctcgtatattccgtgacctcaatcaaaagctttgaggtgatcaaagttatccacggaaagctcttggatatggtcgggaaggttcagatacctataatgctcgtgggcaataaaaaggacctgcacatggaacgggtcatatcctatgaggaaggcaaggccttggctgaatcctggaatgcagcctttctggagtctagtgccaaggaaaatcagacggccgtggacgtgtttaggcgtataattctggaagcagaaaagatggacggtgctgcctctcagggcaagagtagttgtagtgtaatgtag

SEQ ID NO: 26064 - DNA, 582 bp, synthetic construct
  misc_feature 1..582: note = Description of Artificial Sequence: Synthetic coding sequence
  source 1..582: mol_type = other DNA
atggccgccatccggaagaagctggtgatcgtgggcgacggcgcctgcggtaaaacctgcttattgatcgtgttctccaaagatcaatttcccgaggtgtatgtgcctactgtgtttgaaaactacgtggcggacatagaggttgacgggaaacaagtcgagctggcgctgtgggacaccgcaggacaagaagactatgacagactaaggccgcttagctaccctgacactgatgtgatactgatgtgcttttctattgactcacccgactcactcgaaaacattcctgaaaagtggacccccgaggtaaagcacttttgtccgaatgtgccgattatactagtcggtaataagaaggatttgcgaaatgatgaacacactaggagagagctcgctaagatgaagcaagaacctgttaaacccgaagaggggcgggacatggctaatcgcattggcgcctttggttatatggaatgctccgcaaagacgaaggatggagtgcgcgaggtgttcgaaatggcgacacgagcagcactccaggctcgacggggcaaaaaaaagtcgggatgcctggtcctgtag

SEQ ID NO: 26065 - DNA, 591 bp, synthetic construct
  misc_feature 1..591: note = Description of Artificial Sequence: Synthetic coding sequence
  source 1..591: mol_type = other DNA
atggccgccatccggaagaagctggtggtggtgggcgacggcgcctgcggcaagacgtgcctcctcatcgtgttttcaaaggatgaatttccagaagtgtacgtacccacagtgttcgagaactacgtggcagacatcgaggtggatgggaagcaggtggagctcgcactctgggacactgcaggacaggaagactacgataggctccgtcctctgtcataccccgataccgacgtgatcctgatgtgcttcagtgtggattcaccagactcccttgagaacatccccgagaaatgggttcctgaagttaaacacttctgcccaaacgtgcctatcatcctcgtggctaacaaaaaagatctgaggagcgatgagcacgtccggaccgagctggcccggatgaaacaggagcccgtgaggactgacgatggccgcgcaatggccgtccgcatacaggcatatgattacctggagtgtagcgcaaagaccaaagagggcgtgcgcgaagtgtttgagaccgcaactagggcggccctccagaaacggtacggttctcagaatggttgtattaactgctgcaaggtgctgtag

SEQ ID NO: 26066 - DNA, 582 bp, synthetic construct
  misc_feature 1..582: note = Description of Artificial Sequence: Synthetic coding sequence
  source 1..582: mol_type = other DNA
atggccgccatccggaagaagctggtgatcgtgggcgacggcgcctgcggtaagacctgcctactcattgttttcagtaaagatcagttccctgaggtctatgtgccgactgtgtttgagaattacatcgctgacatcgaggtggacggcaagcaggtggagctcgccctgtgggacacggccggtcaagaggactacgatcggctcaggcccttgagctacccagacacggatgttatcctgatgtgctttagcatcgacagcccagatagcctggaaaatatccccgaaaagtggacacctgaggtcaagcatttctgtcctaatgtaccgatcatccttgtgggcaataagaaggacctgagacaggatgagcacacacgccgagaattggctaaaatgaagcaggagccagttcgttcagaagagggaagggacatggccaacagaatctcagccttcggctatttagagtgctctgcaaagacaaaggaaggagtgcgagaggtgttcgagatggccactcgcgccggccttcaggtcagaaagaacaaacggcgccggggttgcccaattttgtag

SEQ ID NO: 26067 - DNA, 582 bp, synthetic construct
  misc_feature 1..582: note = Description of Artificial Sequence: Synthetic coding sequence
  source 1..582: mol_type = other DNA
atggccgccatccggaagaagctggtgatcgtgggcgacggcgcctgcggaaagacttgtctgctcattgtgttcagcaaagaccagttccccgaagtttacgtcccaacagtgttcgagaattatattgccgatattgaagtggacgggaaacaagtggagctagcgttgtgggacaccgccggccaggaagactatgatcgtctgaggcctttatcttatcctgatactgacgtcatcctaatgtgcttttcaatcgacagccctgacagcttggagaatattcctgaaaagtggacacccgaggtgaagcatttctgtcctaatgtgccaatcatacttgtggggaacaagaaggacttacggcaggatgagcataccaggcgagagctggctaagatgaagcaggagccggttcgaagcgaggaaggaagggatatggcgaatcggatctctgcctttggctatcttgaatgtagtgctaagacaaaagaaggggtccgtgaggtgttcgaaatggcgacacgggcaggattacaggtaaggaagaacaagcggagaagagggtgccccatcctttag

SEQ ID NO: 26068 - DNA, 582 bp, synthetic construct
  misc_feature 1..582: note = Description of Artificial Sequence: Synthetic coding sequence
  source 1..582: mol_type = other DNA
atggccgccatccggaagaagctggtgatcgtgggcgacggcgcctgcggcaagacctgtctattgatagtcttttctaaagatcagttccctgaggtgtatgtgccaaccgtgttcgagaactatattgctgatattgaagtcgatggaaagcaggtggagcttgctctctgggatacggctggccaggaggactatgacaggttgcggcctctctcttacccagatacagatgtgattctgatgtgcttctctatcgattcaccagacagtctggagaatatccccgagaaatggactccagaggtgaaacacttctgccccaacgtgcccatcattctcgtaggtaataaaaaagacctacggcaggatgagcatactagaagggaacttgccaaaatgaagcaggagcccgttcgctccgaggagggaagggatatggccaatcggatttcagcctttgggtatttggagtgttcagccaaaactaaggagggtgtgagagaggtgtttgagatggctacaagggccggactgcaggtacgaaagaataagcggagaagaggctgtccgatcctatag

SEQ ID NO: 26069 - DNA, 582 bp, synthetic construct
  misc_feature 1..582: note = Description of Artificial Sequence: Synthetic coding sequence
  source 1..582: mol_type = other DNA
atggccgccatccggaagaagctggtgatcgtgggcgacggcgcctgtggaaaaacctgcctgttgatcgtgttctctaaggaccaattcccagaagtatatgtcccgaccgtcttcgagaattatattgcagatattgaagtggatggaaaacaggtggagctggccttgtgggataccgctggacaggaggactacgaccggttacgccccctcagctatcccgacacggacgtgatcctgatgtgtttttcaatcgatagtcccgacagcttggagaatatcccagaaaaatggacacccgaggttaagcacttttgtcctaatgtgccgattatcttggtaggcaacaaaaaggacttgagacaggatgagcacaccaggagggagctggctaaaatgaaacaggagcctgtccgctccgaggaaggacgggatatggccaatagaatctccgccttcggatatttggagtgcagcgcgaagactaaagagggagtcagggaggttttcgaaatggcaacgcgtgcaggattacaagttcggaaaaacaagaggcggcggggatgtccaatcctttag

SEQ ID NO: 26070 - DNA, 600 bp, synthetic construct
  misc_feature 1..600: note = Description of Artificial Sequence: Synthetic coding sequence
  source 1..600: mol_type = other DNA
atggccgccatccggaagaagctggtgatcgtgggcgacggcgcctgtggcaaaacttgtctcttgattgtgttcagtaaggaccagtttccagaagtttatgtgccgacagtgtttgagaactacatagcagatatcgaggtcgacggaaagcaggtggagctggctctgtgggacaccgccggccaagaggactacgacaggcttcgacccttatcttaccctgacaccgacgtgatcctgatgtgtttctcgatagatagccccgactcccttgagaacatccctgagaaatggactcctgaggtgaagcacttttgtccaaatgtaccaatcatcttggtagggaataaaaaagatctgcgcaaggctggtacttggcgaaccggttctgtgcccctggctacattatccgctcagccacgcccaaggcgcgagtgtggcagatgcctgcggtggccactaggactggcctctaggagcgcaaggacctcggtgggcggagcggtgcctttcagcgagatacctaaggcgtttccaacatgtccgttaccttctcagggttatcgcaattacccccccaccacccctgcttcttag

SEQ ID NO: 26071 - DNA, 582 bp, synthetic construct
  misc_feature 1..582: note = Description of Artificial Sequence: Synthetic coding sequence
  source 1..582: mol_type = other DNA
atggccgccatccggaagaagctggtgatcgtgggcgacggcgcctgtgggaagacatgcctgctgattgttttcagcaaggaccaatttcctgaagtgtatgtgcccacggtgtttgagaattacatcgcagacattgaagtggacggaaaacaggtggagcttgccctctgggacactgctggacaggaagattacgataggctccgcccactgtcttatcccgataccgacgttatcctgatgtgcttttcaattgactctcctgattcactggagaatatcccggagaaatggacccccgaggtgaaacatttctgcccaaatgttcccataattctagtcgggaataaaaaggaccttcggcaggacgaacacacgagaagagagctggctaaaatgaaacaggagcctgtgagatcagaggagggccgggacatggcaaatcgtatttccgcattcggttatcttgagtgctccgctaagacaaaggagggagttagggaggtgtttgagatggccactcgcgccggtctgcaggttcgcaaaaataagcgccgtaggggctgtcctattttgtag

SEQ ID NO: 26072 - DNA, 582 bp, synthetic construct
  misc_feature 1..582: note = Description of Artificial Sequence: Synthetic coding sequence
  source 1..582: mol_type = other DNA
atggccgccatccggaagaagctggtgatcgtgggcgacggcgcctgcggcaaaacctgtctgctgatagtgttctccaaggatcagttccccgaggtctacgtaccgactgtcttcgaaaattatatcgcggacattgaagtggatggaaagcaggtggagctcgccctatgggacacagcaggccaggaggattacgatcggcttagacccctttcttacccagacacagatgtgatcctgatgtgctttagtattgattcaccggacagcctggagaatatccccgagaagtggacccctgaggtgaaacacttctgtcccaacgtgcccatcatcttggttggtaataaaaaagacttgaggcaggacgagcatactagaagggagttggcaaagatgaaacaggagcctgtccggagtgaggaggggagagacatggccaacaggataagcgcgtttggctacctggaatgttccgcgaagacaaaggagggagtgagagaggtgtttgagatggccacccgggctggtctccaggtgaggaagaacaaaaggcggaggggctgcccaattctgtag

SEQ ID NO: 26073 - DNA, 582 bp, synthetic construct
  misc_feature 1..582: note = Description of Artificial Sequence: Synthetic coding sequence
  source 1..582: mol_type = other DNA
atggccgccatccggaagaagctggtgatcgtgggcgacggcgcctgtggcaagacatgcctcctgattgtgttctcaaaggatcagttccctgaggtgtacgtgccaaccgtgttcgagaattacatagctgatattgaagtggacggaaagcaggtagagctggccttgtgggacactgcggggcaggaggactatgaccgcctgagaccacttagttatcccgatactgacgtgattctgatgtgcttcagtattgactcccccgacagtctagaaaacatcccagaaaaatggacaccagaagtgaagcacttctgtcctaatgtccctattatcttggtgggaaacaagaaggacctgcggcaggacgagcacacaagaagagaactcgccaaaatgaaacaggagccagttcggtccgaagaaggaagagatatggcaaatagaatcagcgcgtttggataccttgaatgctctgctaaaacaaaggagggcgtgcgagaggtgtttgaaatggctacacgagccgggttgcaagtacgtaaaaacaaaaggagacgtgggtgtccgattttatag

SEQ ID NO: 26074 - DNA, 279 bp, synthetic construct
  misc_feature 1..279: note = Description of Artificial Sequence: Synthetic coding sequence
  source 1..279: mol_type = other DNA
atggccgccatccggaagaagctggtgatcgtgggcgacggcgcctgtggtaagacatgccttctgattgtattctctaaagatcagtttccagaggtctacgtgcctaccgttttcgaaaactacatcgccgatatcgaggtggatgggaagcaggtagagctcgcgctgtgggataccgcaggacaagaggactatgaccgcctacgtccactgagttatcctgatacagacgttattctgatgtgtttttcaatagactccccagatagcctctag

SEQ ID NO: 26075 - DNA, 570 bp, synthetic construct
  misc_feature 1..570: note = Description of Artificial Sequence: Synthetic coding sequence
  source 1..570: mol_type = other DNA
atggccgccatccggaagaagctggtgatcgtgggcgacggcgcctgcggcaaaacctgcctgctgatcgtgttcagtaaggatcagttccccgaggtctatgtgcccaccgttttcgagaactacatcgccgacattgaagtagacgggaagcaggtggaattagcgctgtgggacaccgccgggcaggaagactatgacaggcttaggccactcagctaccctgacaccgacgtgatccttatgtgcttcagcatagacagtccggattccctagaaaatatcccagagaaatggacgcctgaagtgaagcatttttgtcccaatgtcccaataatcctggttggaaataaaaaagacctgcgccaggacgaacacaccagaagggagttagctaagatgaaacaggaacctgtgcggtcagaggagggaagggacatggcaaatcgtattagtgcctttggatatctagaatgttccgctaaaaccaaggaaggagtgcgtgaagtcttcgaaatggccacgagggccggactgcaggtgaggaaaaacaaaaggcggcgtgggtag

SEQ ID NO: 26076 - DNA, 384 bp, synthetic construct
  misc_feature 1..384: note = Description of Artificial Sequence: Synthetic coding sequence
  source 1..384: mol_type = other DNA
atggccgccatccggaagaagctggtgatcgtgggcgacggcgcctgtggaaaaacttgcctgctgattgtgttctccaaagaccagtttccagaggtttacgtgccgaccgtattcgagaattatatcgccgatatagaagtggacggcaagcaagtcgaacttgccctgtgggatactgccggccaggaagattacgatagattgcgcccattatcttaccccgacaccgacgtgatactgatgtgcttttcaatcgactcccccgactcactcgagaatatcccagagaaatggactcctgaggtcaaacacttctgccctaacgtgcccatcattcttgttgggaataaaaaggacctaagacaggatgaacacacctag

SEQ ID NO: 26077 - DNA, 690 bp, synthetic construct
  misc_feature 1..690: note = Description of Artificial Sequence: Synthetic coding sequence
  source 1..690: mol_type = other DNA
atggtgagcatcagcggcggcgacctgcccaccggcctggacttcatcagcgcacccgaaccagcattatccagttgctctcttggaacatctgcgggctggagcccaacaatggctgccattcgcaagaagctggtgatcgtcggtgacggcgcttgcggtaaaacttgcctgctgattgtgtttagtaaggatcaattccccgaggtatatgtgcctaccgtctttgagaattatatcgctgatatagaagtggacggaaagcaggttgagctcgctttgtgggacactgcgggtcaggaggattacgaccgactgagacccctgtcctaccctgatactgacgtgattttgatgtgtttctctatcgattctcccgattctctagagaacatccctgaaaagtggaccccggaagttaagcacttctgtcccaatgtgccaattatattggttggcaacaaaaaggatttacggcaagatgaacatactcggcgcgagctcgccaagatgaaacaagagcctgttcgaagtgaagagggcagagacatggcaaatcggatatccgcctttggctacctggagtgtagcgccaaaaccaaagagggagttagggaggtatttgaaatggccacccgcgctggactgcaggtcaggaagaataagcggcgacggggatgtcccatttag

SEQ ID NO: 26078 - DNA, 510 bp, synthetic construct
  misc_feature 1..510: note = Description of Artificial Sequence: Synthetic coding sequence
  source 1..510: mol_type = other DNA
atggccgccatccggaagaagctggtgatcgtgggcgacggcgcctgtggcaagacttgcctcctgatagtgttttcaaaggatcagtttccggaggtgtatgtaccgactgtcttcgagaattacatcgctgatatcgaagtggacgggaaacaggtcgaactggccttgtgggataccgcaggccaggaggattacgacaggctgaggccgttaagctatcccgatacagatgttatcctgatgtgtttcagtatcgacagtccggattctctcgaaaatatccctgaaaaatggaccccagaggtgaaacacttttgtccgaatgtccctataattcttgtggggaataaaaaggacctgagacaggatgaacacacgagacgggagctcgctaaaatgaagcaggagccggtcagatcagaagaaggtagagatatggctaaccgcatttcggcttttgggtacctcgaatgttccgctaagaccaaagaaggggtgagggagtag

SEQ ID NO: 26079 - DNA, 3144 bp, synthetic construct
  misc_feature 1..3144: note = Description of Artificial Sequence: Synthetic coding sequence
  source 1..3144: mol_type = other DNA
atgatggccgccgaggccggcagcgaggagggcggccccgtgaccgccggggccggcggcggcggagctgcagccgggtcttcagcgtaccctgccgtttgcagagtcaaaatcccagctgccctgccagtggctgctgcgccctaccctggcctggtggagactggcgtggcgggtaccttgggcgggggagcggccttaggatccgagttcttgggggctgggagcgtcgccggcgcccttggaggagccggtttaaccggaggggggaccgccgccggggtcgccggcgctgcggcaggagtcgctggcgccgccgtagccggccccagcggcgacatggctctgacaaagctgcccaccagtctgctggcagaaacgctgggacctggcgggggatttcctccattgccacctccgccttacttaccgccccttggtgcggggttaggaaccgtcgatgagggcgactctttagatggtccagagtatgaagaggaagaagtggcaatccctctaacagctcccccgaccaaccagtggtaccatggcaagttagaccgaaccatagccgaggagagactaagacaagcagggaaatcaggctcgtacctcatccgagagtcagacaggcgaccggggtccttcgtgctttccttcctctcccagatgaatgtcgtgaaccattttcggatcatcgctatgtgtggggattactatataggcggtcgccggttctccagcttgtctgacctgatagggtactatagtcacgtatcttgtctgctgaagggtgagaagcttctgtatccagtggcacctccagaacccgtggaggacagaagacgggtcagggccattctaccatacaccaaggtcccggataccgacgagatcagcttcctaaagggagatatgtttatcgtgcataacgagttggaggacggctggatgtgggtcacgaatctgcggacagacgagcaggggttaattgtcgaagatttagtggaggaggttggaagagaggaggatccacacgagggaaaaatctggttccatggcaagattagtaagcaagaggcttataatctgttgatgactgttggacaagtgtgcagctttttggtgcgacccagtgataatacccccggtgactattcactctattttcgaactaacgagaatattcagagattcaaaatttgccccactcctaataaccagtttatgatgggcggccggtattacaattcaataggggacattattgatcattatagaaaagagcagattgtggagggttattacctgaaagaacctgtccccatgcaggatcaggagcaggtgctaaatgatacagtcgacggcaaggagatttacaacactatacggcgcaagaccaaagacgccttctacaaaaatatcgtcaaaaaaggctatttgcttaaaaaaggcaagggcaaacggtggaaaaacctgtacttcattctcgagggatccgatgcacagttgatctacttcgagagtgaaaagcgagccacaaagccaaaaggactgatcgacctgtctgtgtgcagtgtgtacgtcgtccacgattccctgttcggtaggcctaactgcttccaaatcgtggtacaacattttagcgaagaacactacatcttttacttcgccggagagacacccgagcaggccgaagactggatgaaggggctgcaggctttttgtaatttacgaaagtcctccccgggcacctcaaacaaacgactacggcaggtgtcgagtctggttctgcacatcgaagaagcccataagctgcctgtaaagcactttactaacccctactgcaacatctacctaaactccgtgcaggtggcgaaaacccacgccagggaggggcaaaatcctgtgtggagcgaggaattcgtcttcgatgacctgcctccggacattaaccgatttgaaatcacactgtccaacaaaacaaaaaaaagtaaggatcctgacatcctcttcatgcgctgtcagttaagtcgcttgcagaaggggcatgccacggatgagtggtttttattgtcatcccacatccctttgaagggaatcgagcccggttcgttacgcgtgcgagccaggtatagcatggagaagattatgcctgaagaggaatactcagaattcaaggaactaatccttcagaaagaactccacgtggtttacgccttaagccatgtgtgtggccaggataggacacttcttgcaagtattctgctgaggatatttctgcatgaaaagcttgagtcactactcctatgtaccctgaacgaccgggagatttctatggaggacgaggctaccacgctcttccgggccactaccttggcgtcaactttgatggaacaatacatgaaggcaaccgctactcaatttgtgcatcacgcccttaaggattccatcttgaagatcatggagagcaagcagtcctgcgaactgtcacccagtaaattggagaaaaatgaggatgttaacactaatcttacccacctcctgaatattctctcggaactggtggagaaaatttttatggcctctgaaatacttccacctaccttgcgatacatctacggctgtttacagaaatccgtgcaacacaaatggcctaccaacacgacaatgcgcactcgggttgtgtctggctttgtgttcttgaggcttatctgcccagctattctaaacccccggatgtttaatatcatctcagactcgccaagccctatcgctgcacgaaccctgatcttagttgcaaagagcgttcagaacctcgccaacctcgttgagttcggagccaaggagccatacatggagggtgtgaaccccttcattaagagcaataagcatagaatgatcatgtttcttgatgaactgggcaatgtgcctgagcttccggacaccaccgaacacagccggaccgatttgagtagagacttagccgcactacatgaaatatgtgttgctcatagcgacgagcttaggacgttgtctaatgaaaggggggctcagcagcatgtgttaaagaaactgctggccattactgagctcctccagcagaagcagaaccagtataccaaaacaaacgacgtgcgatag

SEQ ID NO: 26080 - DNA, 2613 bp, synthetic construct
  misc_feature 1..2613: note = Description of Artificial Sequence: Synthetic coding sequence
  source 1..2613: mol_type = other DNA
atgaagggctggtaccacggcaagctggaccggaccatcgccgaggagcgcctccgacaagccggcaaaagcggaagctacctgatacgcgagtccgatcgacgcccaggtagttttgttttgtccttcctcagccagatgaacgttgtgaaccattttcgcataattgcaatgtgcggcgattactacatagggggacggcggttctcctccttgtctgacctcataggctattatagccacgtctcctgtttgctaaagggcgaaaaattattgtaccctgtagcaccgcctgaacccgttgaagacaggaggagggtgagggcaatcctgccttacaccaaagtccccgatactgatgaaatttctttcctgaaaggggacatgtttatagtgcataatgagctggaagacggttggatgtgggtgaccaacttgcgcaccgacgagcaaggactgatcgtagaggatctggtcgaggaagtcgggagggaggaggacccgcatgaggggaaaatctggtttcacgggaagatctcgaagcaggaagcgtacaatctgctgatgaccgtcggacaggtttgtagcttcttagtgaggccttcagacaacacccccggggactatagtctgtacttccggacaaatgaaaatatacagcgatttaaaatatgccccacacccaataaccagttcatgatgggcggccgctactataacagcattggtgacatcattgaccactaccgaaaggagcagatcgttgagggctattacctcaaggagcccgtccctatgcaggaccaagaacaggtgttaaatgacaccgtggatggaaaggagatatataataccatccgacggaaaactaaggatgcattctataagaatatcgttaagaaagggtatcttctgaaaaagggcaaaggcaaaagatggaagaacttgtacttcattctcgaaggtagcgacgcccagctgatatattttgaatctgaaaaaagggctaccaagccaaaggggctgatcgatctgagcgtttgctctgtctacgtggttcatgactccttgtttggaagacccaactgttttcaaattgtcgtgcagcattttagtgaggagcactatatcttctatttcgccggggagacccctgagcaggctgaagactggatgaaaggcctccaggctttctgcaacctacggaagtcatcccccgggacctctaataagagactgcgacaagtgtcctctctggttctgcatatagaggaggctcacaaattacccgtgaagcacttcaccaatccttattgtaacatttatcttaatagtgtgcaggtcgccaaaacccacgcccgggaggggcagaacccagtgtggtctgaggagtttgtgttcgacgatctacctccagatattaacagattcgagatcaccctttctaacaagaccaagaagtcaaaagatcccgatattcttttcatgagatgtcagctcagtagactccagaagggccatgcaaccgatgaatggtttctactaagcagtcacatcccgctgaaaggcattgaacctgggtcactgcgtgtgagggccaggtattccatggaaaagataatgccagaagaagagtactcagaatttaaagagctgatcttacagaaggagctgcacgtcgtgtatgcactgtctcacgtgtgcggccaggataggacactgctggcaagtattcttcttcggatttttttacacgagaaactggaatccctcctgctctgtaccctgaacgaccgggagatttcaatggaagatgaggctacaaccctgttcagggccacaaccctcgctagcacactgatggagcagtacatgaaggcaactgcaacacagtttgtgcatcacgctctcaaagacagcatactaaagattatggaatccaaacaaagttgcgagctgtcgccaagtaaattggagaagaacgaggacgtgaacaccaatctaacacacctgctcaatatcctctccgagctcgtggaaaaaattttcatggccagcgagatcctgcctcccacccttcggtacatctatggctgtctgcagaagtccgtccagcacaaatggccaaccaacacaactatgagaacgcgcgtggtctctggatttgtgttcttacgacttatatgtcccgctattcttaaccccagaatgtttaatatcatatctgattcacccagtccaattgccgcccgcactctaattttggttgcaaaaagtgttcagaatttagccaatctcgtggagttcggcgctaaggagccgtatatggaaggagtgaatccctttattaagagcaataaacatcgcatgataatgtttctcgatgagttgggcaatgtgccagagcttccggatactactgagcactctaggaccgacttgagcagggacttagccgccctgcatgagatttgtgtggcgcactctgatgaactaagaaccctgtccaacgagcggggggcacagcagcatgttctcaaaaaacttctcgccatcaccgagctgctgcaacaaaagcagaaccagtacactaaaaccaacgatgtgaggtag

SEQ ID NO: 26081 - DNA, 2646 bp, synthetic construct
  misc_feature 1..2646: note = Description of Artificial Sequence: Synthetic coding sequence
  source 1..2646: mol_type = other DNA
atgtgcctggtgaagagctggttcctgagcatccggagccggtggtaccacggtaagctggataggaccatcgccgaggagcgccttcgacaggccggtaaatcaggctcttatttgattagggaaagcgatagaagaccgggctcgttcgtcctctccttcttatcgcagatgaatgttgttaaccatttccgaattattgcgatgtgtggtgactattacattggtgggcgaaggttctcttccttgtcagacctaatcggctactactctcatgtctcctgtctactgaagggagaaaagttactttatccggtagcccctcctgagcctgtggaggaccgccgacgggtcagagctatcctaccatacacaaaggtccctgacacggacgagattagttttttgaaaggagatatgttcatagtgcataacgagctggaggatggttggatgtgggtgactaacttacgtaccgacgagcaagggctgattgtggaagacctggtcgaagaagtggggagagaggaagaccctcatgagggaaagatttggttccatggcaagatcagcaagcaggaggcctataaccttcttatgaccgtcgggcaagtttgtagctttctggtgaggccatcagacaacactcccggagactattcactttatttccgcacgaacgagaatattcagcgctttaagatctgtcccacccctaacaaccagtttatgatgggaggtcgatactataacagcatcggggacatcattgatcactatcgtaaggaacagatagtagagggctactaccttaaggagcctgtgcctatgcaggatcaggaacaggtgctcaacgacaccgtggacggaaaagagatttataataccatcaggaggaaaactaaagatgccttttacaaaaacattgtgaagaagggctatctacttaagaaaggtaaggggaaacgatggaaaaacttgtacttcatccttgaggggagcgatgcccagttgatttactttgagtcagaaaagagggccactaagccgaaaggtttaatcgatctgtccgtctgtagcgtttacgttgtacacgactcgctctttggacgaccaaactgttttcaaattgtcgttcaacacttctcggaagagcactacatattctactttgccggggagaccccagaacaggccgaggactggatgaaaggacttcaggcgttttgtaatctgaggaagtctagtccggggacgtccaacaaacggctgcggcaggtttcctccctcgtgcttcacattgaggaagctcacaagctcccagttaagcatttcaccaacccttactgtaacatctatctgaatagtgttcaggtcgcgaaaacccatgctcgggagggccagaacccagtatggtcagaggagtttgtcttcgacgacctgccgccagacatcaaccggttcgagattactctatcaaacaagacaaagaagagtaaagaccccgatatcctctttatgagatgccagctgagccgattgcagaagggacacgcaacagatgaatggttcctgttgtccagccatataccacttaaggggatcgagccaggctcactcagagtccgggcccggtacagcatggagaagataatgccagaggaagaatactctgagtttaaggagttaatcctccagaaggaactgcatgttgtatacgctctgtctcatgtttgtggccaagataggaccctgctcgcttcaattctcctgcggatatttcttcatgagaaattggaaagcctgctgctgtgcaccctcaacgatagggagatcagcatggaagacgaggccacaaccctatttagagctaccacgctcgcctccactctaatggagcagtacatgaaagccactgccactcagttcgtgcaccacgcactaaaggacagcatactaaagatcatggaatctaagcaatcctgcgaattgtctccatcaaagctggagaagaatgaggacgtaaataccaacctgacgcatttactaaatattctcagtgagctggtggagaagatcttcatggcatccgaaatattgccacccaccttgaggtatatctatggatgcttacagaaaagcgtacagcacaaatggccaactaatacgacaatgaggacacgtgttgtatcaggatttgttttcctgcggctaatctgccccgccattctgaatcccagaatgttcaacattatcagtgactctccttcccccatcgcagcccgtacattgattctggtagcgaagtcagttcagaacctagcaaacttggtggagttcggggctaaggaaccctacatggagggcgttaacccatttattaaaagcaataagcacagaatgataatgtttctcgatgagcttggaaatgttccagaattgcctgacaccacagaacacagccgaacagacctttctcgcgatctggctgctctgcacgagatttgcgtggctcactccgatgaactgcggaccctgtcaaacgaaaggggggcacagcaacatgtcttaaagaagttactcgccatcactgaactcttgcagcagaaacagaatcagtacaccaagaccaatgacgtccgttag

SEQ ID NO: 26082 - DNA, 2643 bp, synthetic construct
  misc_feature 1..2643: note = Description of Artificial Sequence: Synthetic coding sequence
  source 1..2643: mol_type = other DNA
atgcggaccggctacagcagcgtgcccagcaagctgcggtggtaccatggtaaacttgaccgaacaatcgccgaagaacgattaaggcaagccgggaagtcaggtagttacctcattcgcgagtccgatagacgcccagggagttttgttttgtctttcttaagtcagatgaacgtggtgaatcactttcgcatcattgcgatgtgtggagattactacataggcggccgacggttttcttcattgtccgacctgatcgggtattactcccatgtgtcctgcctgttaaaaggagagaaacttctgtatcctgttgcgcctccagagcccgtcgaggatcggcgtcgagtgagagcaatcctgccatatacaaaggttccggacaccgacgaaataagctttctgaagggagatatgtttattgtccacaacgagctcgaggacggatggatgtgggtgaccaatctgcgaaccgacgagcagggattgatagtggaagatctggttgaggaagtcggaagagaggaggaccctcacgagggcaaaatttggttccatggcaaaatctctaagcaagaggcatacaatctgctgatgaccgtgggccaggtttgtagctttcttgtgcgtcccagcgacaatacccccggagactatagtctttactttcgcactaatgaaaacatccaaaggttcaagatctgtccaacaccgaacaatcagtttatgatgggtggtcgatactacaactcaataggggacattatagaccactataggaaggaacagattgtggaaggctactatctgaaggagcctgttcccatgcaggatcaggaacaggtgctgaacgataccgttgatggaaaggagatctacaatacaattcggcggaagacaaaggatgccttttataagaacatcgtaaagaaaggctatctgctgaagaaaggcaaaggcaagaggtggaagaatctgtattttatcctagaaggatcagacgcccagctgatctactttgagagcgaaaagagagcaaccaagccaaagggcctcatcgacctgtccgtgtgttcagtatatgtggtgcacgacagcttgttcggccgccccaactgtttccagattgtcgtacagcactttagcgaggagcactacatattctattttgcgggggaaacaccagaacaggccgaggattggatgaagggtctgcaggccttctgcaatctgaggaagtcctcccctggaacctccaataagcgtcttaggcaggtaagctctcttgtcctgcacatagaggaagcccacaagctacctgtgaaacacttcactaatccctactgtaatatttaccttaactctgtccaagtggcaaaaacacacgcccgcgaggggcagaatcccgtctggtctgaggagttcgtgttcgacgaccttccaccagacataaatagatttgagataactctcagtaacaagacgaaaaaatccaaggaccctgacatcttatttatgcggtgtcagctctctcgcctgcagaagggtcacgctacagacgagtggttcctactgtccagccatattcccttgaaggggatcgaaccgggctcactaagggttagggcacgttactccatggaaaagattatgcccgaggaggaatatagtgagttcaaggaacttatcttacaaaaggaactgcacgtggtttatgcactgtcccatgtgtgcggacaggatcgaactttgttggcaagcatccttctgcgcatatttctgcacgaaaagctggagagcctcctgctttgtacattgaatgacagagagatttccatggaggacgaggctaccaccctcttcagggccacaaccctggcttcaacccttatggagcaatacatgaaggccacagccacacaatttgtgcaccacgctcttaaggatagcatcctgaaaatcatggaatcgaagcagtcgtgcgagctcagcccatccaagttagagaagaacgaggacgtcaacactaatcttactcatttgctgaacatcctcagcgagttggtggagaagatttttatggcctcagagattttgcctccaacccttcggtacatttacgggtgcttacagaagtctgtgcagcataagtggccaacaaacaccaccatgagaactcgcgtcgtttccggtttcgtttttcttcggctgatttgccctgccattctgaacccacgaatgttcaacattattagtgacagtccatctcccatcgctgccagaactctcatcctggtagcgaaaagcgtgcagaatctcgcaaacctggtggaatttggcgccaaggagccgtatatggaaggggtcaacccattcataaaatccaacaagcaccgcatgattatgttcctcgatgagctgggcaatgtgcccgaactaccagacaccaccgaacattctagaacagatctttctcgcgaccttgccgccttgcatgagatctgtgtggcccactcggatgaactgaggacgttaagtaacgaaagaggcgcccagcagcatgtgctgaaaaaattactcgccatcacagaactgctgcagcaaaagcagaaccagtacacaaagactaatgacgtgagatag

SEQ ID NO: 26083 - DNA, 2616 bp, synthetic construct
  misc_feature 1..2616: note = Description of Artificial Sequence: Synthetic coding sequence
  source 1..2616: mol_type = other DNA
cggggcgacgccagcggctggggctgcagcgagcccggccccggcggaccctgggggagccgggcaggtcgcgtaggccagagcagagccggcttcaacatgatggccgcagaggctggcagtgaggaggggggaccagtgactgctggagccggcggaggaggcgccgccgcagggagctctgcttatcctgctgtgtgccgcgtcaagattcctgccgcattgccagtggctgctgctccataccccggcctggtggaaaccggggtggcaggcacattgggaggcggggccgccctcggatccgagtttctgggtgcgggatctgtagccggcgcgcttggaggcgccggattgacaggtggaggaacggctgccggagtagccggtgccgccgcaggggtggcaggcgcagctgtggccggaccaagtggggacatggctctgaccaagctgcctacctctctcctggctgaaacactgggacccggtggcgggttcccaccactgccgccacctccatatctgccgcccctaggcgccgggctggggactgttgacgaaggagattcgctggatggccccgaatacgaggaagaggaggtcgccatccctttgactgcgccccccactaatcaatggtaccacggtaaactggacaggaccatagcggaggaaaggcttagacaggccggtaagagcggaagttacctgatcagggagtcagatagacggcctggatcttttgttttgagcttcctgtctcaaatgaacgtggtgaatcacttccgaattatcgccatgtgcggcgactactacatcggcgggagacgattcagttccctgtccgacttaattggctactactctcacgtgtcctgcctgctgaaaggggaaaagctcctttatcccgtcgcgcccccggaaccggtcgaagaccggagaagggtgagagccattctgccatatacgaaagtgcccgacactgatgagatatcttttttgaagggcgacatgttcattgtgcataatgagttggaagacggatggatgtgggtgaccaatctgaggactgatgagcagggcctgatcgtagaggatctcgtggaggaagtcggtcgggaagaagatcctcacgaaggcaagatatggtttcatggtaagatttcgaaacaggaggcatacaatctcctgatgacggttggacaagtttgtagtttccttgtacgaccctccgacaataccccgggtgactatagcttatacttccgcaccaacgagaacatacagagatttaaaatctgccccacccctaacaatcagttcatgatgggcgggaggtattataatagtatcggtgacatcatcgaccattaccgcaaggaacaaatcgtggaaggctattacctaaaagagcccgtcccaatgcaggaccaggagcaggttctaaacgacacagtagatggaaaggagatctataacactataaggagaaagactaaagatgccttctacaagaatatcgtaaagaaaggatatttgctgaagaagggaaagggaaaacgttggaaaaatctgtactttatcctcgagggatctgatgcccagctgatctatttcgagagtgaaaagagagcgaccaagcccaagggcctgattgacctgagcgtgtgctccgtgtacgtagtacacgattctttatttggcagacctaattgcttccagatcgtcgtgcagcacttcagcgaggaacactatatcttttattttgcgggggagacccccgagcaagccgaagactggatgaaggggttgcaggcattctgtaatcttcggaaatcaagcccgggcaccagtaacaaacgcctcagacaagtgtcctccctggtgttgcacatcgaagaagcacataaactgcctgtgaagcacttcactaatccctactgcaacatttacctgaattccgttcaggtcgccaagacccacgcccgagaaggccaaaatcccgtgtggagcgaagagttcgttttcgacgatcttccaccagatatcaacagattcgaaattaccctttcaaataagactaagaaatctaaagatccagacattctcttcatgagatgccaactgtcccgcctccagaagggtcacgccactgacgagtggttcctgctaagtagtcacattcccctgaagggtatagagccaggatcgctacgcgtccgcgccagatactcaatggagaagattatgcccgaggaggaatactccgagtttaaggagcttatcttacagaaagagctgcatgttgtatacgctctctcccatgtgtgcggtcaggatcgtacattgttggcaagtatcctcctgcgaatcttcttacacgaaaaactggagtccttgctgctgtgtacgctcaatgacagagagatttccatggaggacgaggcaacgactctttttcgagccaccaccctggcttccactttaatggagcaatacatgaaggcgactgctacccagtttgtacaccacgctctgaaggatagcatccttaaaatcatggagagcaagcaatcttgtgagctcagctctagtaaactccagaaggcatag

SEQ ID NO: 26084 - DNA, 1161 bp, synthetic construct
  misc_feature 1..1161: note = Description of Artificial Sequence: Synthetic coding sequence
  source 1..1161: mol_type = other DNA
atgaacccccagatccggaaccccatggagcggatgtaccgggacactttttacgacaactttgagaatgaacccatcctctacggacgcagctacacctggctgtgctatgaagtgaagatcaagcgaggccggtccaacctcctgtgggacaccggcgtgtttcgcggtccggtactgcctaaacgccaatcaaatcatagacaggaggtgtactttcgtttcgagaaccatgccgagatgtgctttctgagttggttctgcggaaaccgcttgcctgccaaccgtcggtttcagatcacctggttcgtatcctggaatccttgtctcccatgcgtggtgaaggtcacgaagtttctggccgagcacccaaacgtgacccttaccattagcgcggcaagactctactattacagggatcgggactggcgctgggtgctgctcagattgcacaaagccggcgcccgagtgaagattatggattatgaggatttcgcttattgttgggaaaattttgtttgcaatgagggacagcccttcatgccatggtataaattcgacgataactacgcatccctgcaccgcacgctgaaagaaatcctgcgcaatcccatggaggctatgtatcctcatatcttttatttccacttcaagaacctgctgaaggcttgcgggaggaatgagtcatggctgtgttttactatggaagtgaccaaacatcatagtgctgtttttaggaaacggggcgttttccgcaaccaggtggacccagagacccattgccatgccgaacgatgtttcttatcatggttctgtgatgacatcttaagcccaaacacgaattacgaggttacctggtacacctcctggtctccttgtcccgaatgtgccggagaggttgccgagttcttggccaggcacagcaacgtgaatttaaccatatttactgcgcgcctgtgctatttttgggacaccgattatcaggaggggctgtgcagcctcagtcaggagggcgcatcggttaagattatgggatacaaggactttgtgtcttgctggaaaaatttcgtgtactcagatgacgagccatttaaaccatggaaaggtcttcagacaaatttccgactcctgaagcgaagacttagggaaattctgcagtag

SEQ ID NO: 26085 - DNA, 348 bp, synthetic construct
  misc_feature 1..348: note = Description of Artificial Sequence: Synthetic coding sequence
  source 1..348: mol_type = other DNA
atgggcggcagcctgcgggtggccgtgctgggcgcccccggcgtggggaagaccgccatcatccgtcagttccttttcggagactaccctgagcggcacagaccgacggacggacctaggctgtaccgaccggccgtgctgcttgatggcgcagtttacgacctgtccatccgggatggagatgtcgcgggtccaggatcttcacctgggggccccgaggaatggccggatgccaaggattggagcctgcaagataccgacgccttcgtcctggtgtatgacatctgctctcctgacagcttcgactatgtcaaggcattaagacagcgcatcgctgagacccggtag

SEQ ID NO: 26086 - DNA, 579 bp, synthetic construct
  misc_feature 1..579: note = Description of Artificial Sequence: Synthetic coding sequence
  source 1..579: mol_type = other DNA
atgcaggccatcaagtgcgtggtggtgggcgacggcgccgtgggcaaaacctgcctcctcataagctacacaaccaatgccttccccggggaatatatcccaacagtgtttgacaactacagcgccaatgtgatggtggatggcaagccagtcaatctggggttatgggacaccgccgggcaggaagactacgaccggctccggccactctcctatccccagaccgacgtatttctaatttgcttttctctagtcagcccagcatctttcgagaatgtccgcgcaaaatggtatccagaggtcagacaccattgccctaacaccccaatcatactggtggggaccaagctcgacctcagagacgacaaagacaccattgaaaaacttaaagagaagaaacttactcctatcacatatccacaggggctcgctatggccaaagaaatcggagcagtcaaatacttggagtgcagtgcactgacacagcggggactgaaaacagtcttcgacgaagccattagagccgtgctgtgcccaccaccggtaaagaagcggaaacggaagtgcctgcttctgtag

SEQ ID NO: 26087 - DNA, 636 bp, synthetic construct
  misc_feature 1..636: note = Description of Artificial Sequence: Synthetic coding sequence
  source 1..636: mol_type = other DNA
atgcaggccatcaagtgcgtggtggtgggcgacggcgccgtgggcaagacgtgtctcctgatctcctacacaacaaatgcattccccggtgagtacataccgactgttttcgataattatagcgcaaacgtaatggtcgatgggaagccagtaaatctgggactctgggataccgcaggccaggaggactacgataggctccgcccactgtcctaccctcagacggtgggggagacttatggcaaggatattacctccaggggaaaagataaaccaattgcggatgtgtttctgatttgtttcagcctggtgtcgcccgcctctttcgagaacgtgagggcaaaatggtacccagaggttaggcatcattgccctaacacacccataatactggtggggaccaagctggacctgagagacgataaagacacgatcgagaaactgaaagagaagaaacttacccccatcacctatcctcagggcctcgctatggccaaagaaataggagctgtaaagtacttggaatgcagcgctcttacccaacgcggcttaaagacagtttttgatgaagcaatccgtgccgtcttgtgtcctccgccggtcaagaagcggaagaggaagtgtctcctcctttag

SEQ ID NO: 26088 - DNA, 579 bp, synthetic construct
  misc_feature 1..579: note = Description of Artificial Sequence: Synthetic coding sequence
  source 1..579: mol_type = other DNA
atgcaggccatcaagtgcgtggtggtgggcgacggcgccgtgggcaaaacctgtcttctgatctcttacactacgaacgctttccccggagaatatatccccactgtcttcgataactacagtgccaacgtgatggtggacagcaaacccgtcaatttggggctgtgggacactgcgggacaggaagactatgatcggctgaggccgctctcctacccccagaccgatgttttcctgatctgttttagtctggtgagtcctgctagctatgaaaacgtgcgggccaagtggtttccagaggtccggcaccattgtcccagtactcccattatactcgttggcacaaaattggatctacgggatgacaaagacacgatcgaaaaattaaaagagaaaaaattggctcctataacctatccacagggtctggcattggccaaggagattgactcggtgaaataccttgaatgctccgctctgacccagagggggctgaagaccgtgttcgatgaggcaatcagggcagtcttgtgccctcagccgactcggcagcagaaaagggcctgttctttgctatag

SEQ ID NO: 26089 - DNA, 261 bp, synthetic construct
  misc_feature 1..261: note = Description of Artificial Sequence: Synthetic coding sequence
  source 1..261: mol_type = other DNA
atgcaggccatcaagtgcgtggtggtgggcgacggcgccgtgggcaaaacctgccttctcatctcttacactactaacgccttcccaggcgagtacattccaacagtgcccggacgcccatgtgctctgttgcaggacgctgaggcggggcttagctctgacgtcgaaggcgcctgctggtgccagacccaggagggacgcatgacaggggaggccccagcccccccttggccggctttgaggggcccacatcactcttag

SEQ ID NO: 26090 - DNA, 558 bp, synthetic construct
  misc_feature 1..558: note = Description of Artificial Sequence: Synthetic coding sequence
  source 1..558: mol_type = other DNA
atgcaggccatcaaggccgtgggcaagacctgcctgctgatcagctacaccaccaacgcgttccccggggaatacatacctaccgtgttcgataattactctgccaacgtaatggttgattcgaaacctgttaacctcggcctgtgggataccgctgggcaggaggattatgaccggctgcgcccactgagttaccctcagactgacgtgtttctcatctgtttctccctggtgagccctgcgtcatacgaaaatgtgagagccaagtggttccctgaggttaggcatcactgcccctctacccctattattctggtcggcacgaagctggatttgcgcgatgacaaggacaccatagaaaagctcaaagagaagaaattggcgcctattacctacccacagggcctggctctcgctaaagagatcgattctgtgaagtacctggagtgttctgctctgacacaacgaggactaaagactgtcttcgacgaggccatacgcgctgtgctttgccctcaacctacacggcaacagaagagagcttgtagcttactgtag

SEQ ID NO: 26091 - DNA, 447 bp, synthetic construct
  misc_feature 1..447: note = Description of Artificial Sequence: Synthetic coding sequence
  source 1..447: mol_type = other DNA
atggtggacagcaagcccgtgaacctgggcctgtgggacaccgccggtcaagaagactatgataggctgaggcctttgagttacccccaaaccgatgtattcctcatctgttttagcctcgtgagcccagcgtcgtacgagaacgttagggccaaatggttccctgaggtgcggcaccattgccccagtactccaatcatacttgtcggcacaaagctagatttgagggatgataaggacactatcgagaagctaaaagaaaagaaattagcccccattacatacccacagggactggctctggcgaaagaaatagacagtgttaagtacctggagtgctctgctcttactcaacgagggctcaagaccgtgttcgatgaagccattagagctgtgctttgtccccaacctactcggcagcagaagagagcatgttcactgctttag

SEQ ID NO: 26092 - DNA, 501 bp, synthetic construct
  misc_feature 1..501: note = Description of Artificial Sequence: Synthetic coding sequence
  source 1..501: mol_type = other DNA
atgcaggccatcaagtgcgtggtggtgggcgacggcgccgtgggcaaaacatgcctgctgatatcttacactactaacgcatttccaggtgaatatatcccaacggtgttcgataattactctgccaacgtaatggttgactctaaacctgttaatctagggctgtgggacacagccggacaagaggattatgatagactcagacctctcagctatccacagacagacgtgttcctgatctgcttttccctagtgagtcctgcttcatatgagaatgtcagggccaaatggtttccagaggtgagacaccactgtccctccactcccatcatcctggtgggtaccaaactagatctgcgggacgacaaggacaccatcgaaaagctgaaggagaagaagctggctcctattacctacccgcagggcctggcgctggccaaagaaatcgactcagtgaagtacttggagtgcagcgcactcactcagcgtggtctgaagtag

SEQ ID NO: 26093 - DNA, 4785 bp, synthetic construct
  misc_feature 1..4785: note = Description of Artificial Sequence: Synthetic coding sequence
  source 1..4785: mol_type = other DNA
atgaagctgtacgtgttcctggtgaacaccggcaccaccctgacctttgacaccgaactcacagtccaaactgtcgccgatctcaagcatgctatacaaagcaaatacaaaatcgcgatccagcaccaagtgctggtcgtaaacggaggcgagtgcatggccgcagaccgcagagtctgcacctacagtgctgggaccgatactaaccccatattcctcttcaataaagagatgatcctgtgtgatcgcccacctgctatcccaaagacaacattctctacagagaatgatatggaaattaaggttgaggagtcgcttatgatgccagctgtttttcacaccgtagcgtcgaggacccaactcgccctagagatgtacgaggtggccaagaagctctgttcattttgcgaaggcctcgttcatgatgaacacctccagcaccaagggtgggccgccattatggctaacctagaagactgcagcaattcttatcagaagctcttattcaaatttgagtccatctacagcaattatttacaatccatcgaggatatcaaattgaagctgacacatctggggacggcggtctccgtcatggctaagatacctttgctggaatgtctgacacggcattcataccgcgagtgtctcggtcggctggacagtcttcccgaacatgaggattctgagaaagccgaaatgaaacggtctaccgaactagtcttatctccggacatgcctagaactaccaacgagtcgttgctcacaagtttccctaaatcggttgaacacgtttccccagacacagccgacgccgagtcaggaaaagaaatcagagagtcttgccagtcaacagtccatcagcaggatgagacaacaatcgatactaaggacggtgacctgcccttcttcaatgtgtccctgctagattggatcaatgtgcaggatcgtcctaatgatgtcgagagcctcgtgagaaagtgttttgacagcatgagtcgcttggacccccgcatcattcgtccattcatcgctgagtgtcggcagactatcgcaaagctagacaaccagaatatgaaggccatcaagggtttagaggataggctgtacgccttggaccagatgatcgcttcttgcggccggctcgtaaacgagcagaaggaactggcccaaggctttctagcaaaccagaagcgcgcggagaacctgaaggacgcaagtgtgttgccagacctttgcctgtcacacgcaaatcaattgatgattatgcttcagaaccaccgcaagctcttggatatcaagcagaaatgcacgaccgccaagcaggagctcgccaataacttgcacgtgcgactgaagtggtgctgtttcgtcatgttgcacgcggaccaagacggtgaaaaactccaggccctgctgagactcgtgatcgaacttttagagcgggtgaagatagtggaggcattatctaccgttccacagatgtattgtctggcagttgttgaagttgttcggaggaagatgttcatcaaacactacagagagtgggctggcgcccttgtgaaggatgggaagaggttgtatgaggcggaaaagagtaagagagagtccttcggcaaacttttcagaaaatcttttcttagaaatcgtttgtttagagggttagattcatggccacccagcttctgcacccagaaaccccgaaagtttgactgtgagctgccagacattagcctaaaagatctccagttcctgcaatccttttgtccttcagaagtgcaaccttttctcagggtgcctttgctttgcgattttgagcccctgcaccagcatgtgctcgccctccataatctcgttaaggctgcccagtccctggatgagatgtcgcaaacaattaccgatctgcttagcgagcagaaggccagtgtctcacagactagtcctcagtctgcaagctccccccgtatggaaagcacggccggcattactaccaccacctctccccggacacctccacccctaacagttcaggatcctctgtgccccgctgtgtgccctctcgaggagttgtcaccagactcgattgatgcgcatactttcgacttcgagacaattcctcatccaaatattgagcagaccattcatcaagtgtctctcgacctcgactctctcgctgagtcccctgaatctgatttcatgagtgccgttaacgagtttgtcattgaggagaacctgtcctcccctaatcccatatcagacccccagtctccggaaatgatggtggaatcactctacagctctgtcattaacgctatagacagtcggcgcatgcaggatactaatgtctgtggaaaagaggatttcggagatcacacaagcctgaatgttcaactcgaacgctgtcgcgttgttgctcaagattctcattttagcatacagacaattaaagaggatctatgtcattttcggacctttgtccagaaggagcaatgtgactttagtaacagtttgaagtgcaccgccgtcgaaataaggaacataatcgagaaagtgaaatgcagcctcgagattacccttaaggagaaacaccaaaaggaacttctctctctgaagaacgagtatgaagggaaacttgatgggttaatcaaggagacagaggagaatgagaataagattaaaaagctgaagggagaactggtatgtctggaggaagtgctccagaacaaggataatgaattcgctctggttaaacatgagaaggaggctgtgatctgcctgcagaacgagaaggatcagaagttgttagagatggaaaatattatgcattcgcagaattgcgagatcaaggagctgaaacaaagccgtgagattgtactggaagacctcaaaaagctgcacgtcgagaacgatgaaaagttgcagttgctgagagctgaactccaatcgctggaacaaagccacttaaaagaactcgaggacaccttgcaggttcgacacatacaagagtttgagaaagtgatgacagaccacagggtttcactggaggagctgaagaaggaaaaccagcaaataataaaccaaattcaggagtcacacgctgagattatccaagagaaggagaaacagctacaggagctcaagctgaaggtttcagacctgagtgacaccaggtgtaagttagaggttgaactggcgttgaaagaggctgaaaccgatgaaataaagatactactggaagagtctcgcgcccagcaaaaagagaccctaaagtctctcctcgagcaggagacggagaatctgcgcacagaaatcagcaaactgaaccagaaaatccaggataacaatgagaattaccaggtggggctggccgagctgcggactctgatgacaatcgagaaggatcagtgtatctcagaactcatttcccgacacgaggaggagagcaacatcctcaaagccgaactgaacaaagtgacctctttgcataaccaagcatttgagatcgagaagaacctgaaagagcagattattgagctccagtcgaaacttgattccgaactttcagctctggaaaggcagaaagacgaaaaaatcacccagcaggaggaaaaatatgaagctattatccaaaatctcgagaaggatcggcaaaagctcgtttcctcacaggaacaagatagggaacaattgatccagaaactaaattgcgaaaaggatgaggcgatccagacggctctgaaagagttcaagctcgagagggaagtcgtggaaaaagagctcctggaaaaggttaagcatttagagaatcagatcgcgaagagccccgccattgatagcacccggggagattcgtcttctctcgtcgccgagcttcaggaaaaactccaagaagagaaagctaaattcctggaacaattagaggagcaggagaaaagaaaaaacgaagagatgcagaatgttcgcacctcacttattgctgagcagcagacaaacttcaataccgttctgacccgcgaaaaaatgcggaaggaaaatatcattaatgatttatcagataagctgaagtctaccatgcagcagcaggagcgagacaaagatctcatcgaatcattgagtgaggacagggctaggctcctggaggagaaaaagaaactggaggaggaggtgtctaagctgcggtcttcatcatttgtgccatcaccatatgtagcgaccgctccggaattgtatggcgcttgtgctcctgaactgcctggtgaatccgataggtctgcagtggagacggctgatgaaggccgtgtggactcggctatggagacttccatgatgtccgtgcaagaaaatatccatatgctgtctgaggaaaagcagcggatcatgttgctggagcgtactcttcagctgaaggaggaggaaaataaaagattgaatcaacgcttaatgtcccagtcaatgagctccgtctcttcaaggcattcagagaaaattgccatccgcgattttcaggttggtgacctagtccttataattttagacgaaagacacgacaactacgtcctctttacagttagtcctactttgtacttcctgcacagtgagtccttaccagcactggacctgaagcccggcgaaggggcctccggtgcctctcggcgtccttgggtcttgggcaaagttatggagaaagagtactgtcaggccaaaaaagctcagaacagattcaaggtgcccctgggcaccaaattctatcgcgtcaaggcagtgtcttggaataaaaaagtgtag

SEQ ID NO: 26094 - DNA, 4776 bp, synthetic construct
  misc_feature 1..4776: note = Description of Artificial Sequence: Synthetic coding sequence
  source 1..4776: mol_type = other DNA
atgaagctgtacgtgttcctggtgaacaccggcaccaccctgaccttcgataccgagctgaccgtacaaacagtggcagacctgaaacatgctattcagtccaaatataaaatagctatccaacaccaagtactcgtcgttaacgggggtgagtgcatggctgcggatcgccgagtctgtacatatagtgcagggacagatactaatcctatcttcctgtttaacaaagagatgatcctctgtgaccgcccccctgcaatcccgaagaccaccttcagcacagaaaacgatatggaaatcaaggttgaagaatcacttatgatgcccgccgtatttcacacggtggcctcccgaactcagttggcactggagatgtatgaagtcgcaaagaagctgtgctctttttgcgaaggccttgttcatgacgagcacctccagcaccaggggtgggctgctatcatggctaacttggaggattgtagcaattcctaccaaaaacttctgttcaagtttgaaagtatctattcaaattatctgcagagtatcgaggacattaagctgaagttgacccatctgggtaccgccgtgagcgtaatggcgaagatcccgctcctggagtgcttgacccgccattcttacagagagtgtttgggccggttagacagtctccctgagcacgaggacagcgaaaaggcagagatgaagcgctcaactgagctcgtactatcccctgacatgccccggactacaaacgaaagtttgttgacttcgttccccaaaagcgtggagcatgtttccccagacacagctgacgccgagagtggaaaagagatccgggagtcctgccagagcaccgttcaccagcaagatgagaccacaatcgatacaaaagatggagacctgccttttttcaatgtgagccttctggactggatcaatgtgcaggaccggccgaatgacgtcgagtctctggtaaggaaatgttttgattccatgagtcgacttgacccccgaatcattcggccttttatagcagagtgccgccagacaatcgccaagctcgataatcagaatatgaaagcgatcaagggactcgaggaccgactgtacgctctggatcaaatgatcgccagttgcgggagattagtgaacgagcagaaagagctagctcaaggtttcctcgctaatcagaaaagggcagagaaccttaaagatgccagcgtcctgccggatctatgcctatcccatgctaatcagctgatgatcatgctgcagaaccacaggaagctgctggatattaaacagaagtgtaccacagcaaagcaggagctcgcgaataacttacacgttcggctcaaatggtgttgcttcgtaatgttacacgctgatcaggacggcgagaagttgcaggcactgctgcgcctagtgatcgagttgctcgagcgggtgaagattgttgaggcgttaagcaccgttccacagatgtactgcctcgctgtggtggaggtggtgcgacgcaaaatgttcattaaacactacagggaatgggcgggtgccctcgtcaaggacggcaagcggctttacgaggctgagaaatccaagagggaatcattcggcaagttgttcagaaagagttttctgcgtaatcgactctttcgcgggctggattcatggcccccaagtttttgcactcagaagccgcgcaagttcgattgtgagctgcccgatatttctctgaaggacctgcagttcttgcagtcattttgtccatccgaggtccaaccttttctacgcgttcccttgctttgtgactttgagcctctgcatcagcacgtgctggccctgcacaacttggtgaaagccgcacagagtctcgatgagatgtctcagaccattaccgatctgctgagcgaacagaaggccagcgtaagccagacttcaccacagtccgcatccagtccaaggatggagtcaactgctggaatcaccacaaccacctccccgcggactcccccgcccctgaccgtacaggaccccttatgccccgccgtgtgccctctggaagaactatcacccgactctattgatgcacacacatttgattttgaaaccattccccaccccaatattgagcagaccattcaccaggtctccttggatttggacagtctggcggagtcgcccgagtccgatttcatgtccgctgtgaatgaatttgtcattgaggaaaatctctcctcccctaaccccattagtgacccacagagcccagagatgatggtggaaagcttgtacagcagcgtcatcaacgccatcgacagcagacgcatgcaggacactaatgtgtgtgggaaggaggatttcggggatcacacaagcctcaatgttcaactggagagatgcagagtggtggcccaagactcacatttctctatacagacgataaaggaggacctctgtcatttccggactttcgtgcagaaggagcagtgcgatttcagtaacagtctgaagtgcaccgctgtagagatacgtaatattattgagaaggtcaaatgttctctggaaataacactgaaagagaagcatcagaaggaacttttatccctgaagaacgaatacgaaggtaagttggatggactgatcaaggagaccgaagaaaatgaaaataagatcaagaaactgaagggcgaacttgtatgcctggaagaagtgctacaaaataaagacaacgaattcgccctcgtgaagcatgaaaaagaggccgtaatctgtcttcagaacgaaaaggaccagaaactcttagagatggaaaacataatgcactcacagaactgcgagatcaaagagcttaaacagagccgcgagatcgtgctcgaggatctgaaaaagcttcacgttgaaaacgacgaaaagcttcagctactcagagctgaactacagagtctggaacagtcccatcttaaagaactcgaagatacacttcaggtgcggcacatccaagaattcgaaaaggtgatgactgatcatagggtttcactcgaggagttaaaaaaggagaatcagcagatcataaaccaaattcaagagagtcacgccgagatcatccaagagaaggagaagcaactccaggaacttaagctcaaggtttccgacctgagcgatacgaggtgcaaattggaagtggagctggccttgaaggaggcagagacagatgagattaaaatcctgttagaggagtctagagctcagcagaaggagacactgaagagcctcctggagcaggagaccgaaaatctgcgcaccgagatctctaaattgaaccagaaaatccaggataataacgaaaactatcaggtggggttagccgagcttcgtaccctgatgacaatagaaaaggatcaatgtatttccgaactcatatcaagacacgaagaagaaagcaacatactgaaagccgagctcaataaagtgacatctctgcataaccaggcttttgagatcgagaaaaacctaaaggagcagataattgagctgcagtccaagctcgatagcgagttgtcagcacttgaaaggcagaaagatgaaaagatcactcaacaggaagagaaatacgaggctataattcaaaatctcgaaaaggacaggcaaaagctggttagctctcaagagcaagaccgcgaacagttgatccagaaactgaattgcgagaaagatgaggctatccagactgcactcaaggagttcaagcttgaacgagaagtagtcgagaaggagcttctggagaaagtaaagcacctggagaaccagattgctaagtccccagccatcgatagcacaaggggggacagtagcagcctggtggccgagcttcaagagaagctgcaggaggagaaagcaaaatttcttgaacagctggaagaacaggagaagaggaagaacgaagaaatgcagaacgtccgaacttccctcattgccgagcaacagaccaattttaataccgtgctgacaagggagaagatgcgcaaggaaaatatcatcaacgatctctctgataagcttaaatctaccatgcaacagcaagagcgggacaaagacctgattgagagcctgtccgaggacagagcaagattactggaggaaaagaaaaaactcgaggaagaggtcagcaagctgcggtcgtcatcttttgtgccctcaccatatgtcgcgaccgcccccgagctctacggagcttgcgcccccgaactgcctggcgagagcgatagaagtgccgtagagacggccgacgaggggcgtgtggatagtgctatggagacctccatgatgtccgtccaagaaaacattcacatgctgagtgaggaaaagcaacgaattatgcttctggagaggaccttgcagcttaaggaggaggagaataaaagactgaaccagcgtctaatgtcccagtccatgtcaagcgtgtccagccgacacagtgaaaagatagctatcagggattttcaggtcggcgatctagtccttattatactggacgagaggcacgacaattacgtcctttttactgtgtctccaaccctctacttcctgcactccgaatccctgcctgcactcgacctgaagcctgcatccggggcatctcgccgcccctgggtgcttgggaaggtaatggagaaagaatactgtcaagctaaaaaggctcaaaacaggtttaaggtgcccctgggaacaaagttctaccgggtaaaggcagtgtcctggaacaaaaaggtttag

SEQ ID NO: 26095 - DNA, 48 bp, synthetic construct; identical to SEQ ID NO: 12631
  misc_feature 1..48: note = Description of Artificial Sequence: Synthetic coding sequence
  source 1..48: mol_type = other DNA

SEQ ID NO: 26096 - DNA, 4776 bp, synthetic construct
  misc_feature 1..4776: note = Description of Artificial Sequence: Synthetic coding sequence
  source 1..4776: mol_type = other DNA
atgaagctgtacgtgttcctggtgaacaccggcaccaccctgaccttcgatacagagctgacagtccagactgtcgcagatctgaaacacgccatccagtcaaagtacaaaatagctatccagcatcaggtactcgtggtaaatggcggcgagtgtatggcggcagatcgccgagtctgtacttactctgcgggcacggatactaatcccatcttcctttttaacaaggagatgatcctgtgtgacaggccgcctgcgattccaaagaccactttctccacagaaaatgacatggaaatcaaggtcgaggaaagtctgatgatgcccgccgtgtttcatacagtcgcgtcaaggacccaactcgccttggaaatgtatgaggtggcaaaaaaactttgttccttctgtgagggtctcgtccacgacgaacacctgcagcatcaggggtgggctgccatcatggcaaacctggaagattgctccaattcataccagaagctcttgttcaagtttgagtccatatactccaactacttacagtcgatagaggacattaaactgaagctgacccatcttggaaccgcagtttctgtcatggccaagatccctttgctggagtgtttaaccaggcactcatatcgggaatgcctcggacggttagattctctgcccgaacatgaagactcagagaaggctgagatgaaacgctccaccgagctggtgttatcccctgatatgcctaggaccactaacgagtctctgctcacttcctttcccaagagtgttgaacatgtgagcccagataccgcagacgccgagtcggggaaggaaatccgcgaaagctgccagtcaactgtgcatcagcaagatgaaactaccatcgacactaaagatggggatttgccttttttcaatgtcagcttgcttgattggataaatgtgcaggatcgtccgaacgacgtggagtctctggtgcggaaatgttttgacagcatgagtcgccttgatccgaggattatcaggccctttatcgcggagtgtcggcagacaatcgctaaactcgacaaccagaacatgaaggccataaaaggcctggaagatcgtttatatgccttggaccaaatgattgccagttgcggacgcttggttaacgagcagaaagaattagcccaaggatttctggcaaatcagaaaagggcagagaatctcaaggacgctagtgttttacccgacctttgcctgtctcatgctaatcagttgatgattatgctgcagaaccatagaaagctgttggacatcaaacagaagtgcacgacggccaaacaggagcttgccaataacttacatgttaggctgaagtggtgctgctttgtgatgttgcacgccgatcaggatggcgaaaagcttcaagctctgcttagattagtaattgaactgcttgagagggtgaagatagtagaggccctctctacagtgcctcagatgtactgcttagccgttgtggaagtcgtgagaagaaagatgttcatcaaacactacagagaatgggccggcgcactcgtcaaagacggcaaacgactgtacgaagctgaaaaaagcaaacgtgagtcttttggcaaactgtttcgaaaaagtttcctccgaaataggctctttaggggcctggacagttggccaccttccttctgtacacagaagcccagaaaatttgactgcgagttgccagacatctccctcaaggatctccagtttttacaatccttctgtccctctgaagtccagccgtttcttcgcgtccctttgttatgcgactttgagcccctgcaccagcatgttctggccttacataacctggtgaaggccgcgcagtcactggacgaaatgtcacaaaccattacagatcttctgtcggagcagaaggcgtctgtcagtcagacatcgcctcaatcagcgtcaagtcccagaatggagtccacagccgggatcacaacgacaacatctccaagaacccctccccccctcactgttcaggacccactgtgtccagctgtctgccctttagaggaacttagccccgatagcattgacgcccacacgttcgacttcgaaaccattcctcatcctaatatcgagcagactatacaccaagtcagtctcgacttggatagtctcgcggagtcccctgagagcgattttatgtcagccgtgaatgagtttgttatcgaagagaatctctcttctcccaacccaatatcagacccccaaagcccagagatgatggtggaatcactgtattcatccgtcatcaacgccatcgattctaggaggatgcaagacactaacgtgtgcggtaaagaggatttcggtgaccacacctctctcaacgtacagttggagcggtgcagagttgtcgcccaggactcacacttttctatccaaacaatcaaagaggatctctgtcattttcgtacctttgtgcaaaaagaacagtgtgactttagcaacagcctgaaatgtacagcagtcgagatacgcaatataatcgaaaaggtgaagtgctcgctagagataactctgaaggagaaacatcaaaaggagctcctctcgctgaaaaatgagtacgaaggtaaattggatgggctgattaaggagaccgaggaaaatgagaataagatcaaaaaattaaaaggtgagctggtgtgcttggaagaggtgctgcagaacaaggataacgaattcgcccttgtcaagcacgagaaggaggcagtgatctgtttgcagaatgaaaaggaccagaagctgctggaaatggaaaacattatgcactcacagaactgcgagatcaaagagctgaagcagtcgagggaaatagtgctggaggatctgaaaaagctccacgtagaaaacgatgagaagttgcagctgttgagggctgaactgcaatctctagagcaatcccacttgaaggagctggaggacactctccaagtaaggcacattcaggagttcgaaaaagtaatgaccgaccacagagtttccttagaagagctgaagaaggagaaccagcagatcattaatcagatccaggaatctcatgcagaaattatccaggagaaagaaaaacagttgcaggagctgaagctgaaagtgagcgatctgtctgatactcgatgcaagttagaagttgaattagcactcaaagaggcggagaccgatgagataaagattctgttagaggaaagccgggctcagcagaaagagacactcaaatcgctgctggagcaggaaacagagaacctgcgcacagagatcagtaagctcaatcagaagattcaagacaacaacgagaactaccaggtgggattggcagagctcaggacgttgatgaccattgagaaggatcagtgtatttcagagctgatctcgaggcacgaggaagagtctaacatcctgaaagctgagctcaacaaagttacaagtcttcacaaccaggctttcgagatcgaaaaaaatttaaaggagcagatcatcgagcttcagagcaaattggattctgaactgtccgcactcgagagacagaaggacgaaaagatcacgcagcaagaggagaagtatgaagccatcattcagaacttggagaaggataggcagaagctcgtgtcaagccaggagcaggatcgcgagcagctgatccagaagcttaattgtgaaaaggacgaggccatccagaccgccctgaaagagttcaagctggagagggaggtggtcgagaaggagttattggagaaagtcaagcacttggaaaaccagatcgcgaagtctccggctatagattctacccgaggtgactcttcgtctctggtcgcagagctacaggagaagctccaagaggaaaaagccaaattccttgaacagctggaggagcaggagaaaaggaagaacgaggaaatgcagaatgtaagaacaagcttaattgcagaacagcaaactaacttcaacactgtgctcactagggaaaagatgaggaaggaaaacattatcaatgacctgtccgacaagttgaagtctacaatgcagcagcaggaacgggacaaagatctaatcgagtccttatccgaagacagagcaaggttgctcgaagagaaaaaaaaactagaggaggaagtcagcaaattgcggagctcatcctttgtgccatctccttatgtagctacagccccggagctttatggagcatgtgcaccagagctccccggtgaatccgataggtctgccgtagaaactgccgatgaaggaagggtggactccgcgatggaaacctcaatgatgtcagtgcaggagaatattcacatgctcagcgaagagaaacaacggattatgctgcttgagcgtacactccaactgaaggaggaagaaaacaagagattaaaccagcggttgatgtcgcagtccatgtcaagtgtgagctctagacatagtgagaagatcgccatacgtgactttcaggtaggcgacctcgtgctgatcatactcgacgagcggcacgacaattacgtcctttttaccgtatcccccacgctctacttcctacacagcgaaagtctgcccgctctggacctgaaacccgccagtggagcctctcggcgaccttgggtgttgggcaaggtgatggagaaggagtactgtcaggccaaaaaggcccagaaccgcttcaaggtgcccctggggactaaattttaccgcgtaaaggccgtgagctggaataagaaggtctag

SEQ ID NO: 26097 - DNA, 6471 bp, synthetic construct
  misc_feature 1..6471: note = Description of Artificial Sequence: Synthetic coding sequence
  source 1..6471: mol_type = other DNA
atgagcgacacccccagcaccggcttcagcatcatccaccccacctcatcagaggggcaggtacctccaccgcgccatttgtcactgactcacccagtagttgcaaaacgcatttccttctacaagagcggggatccccagttcgggggggtccgcgtcgtggtgaaccccagatccttcaagtcatttgatgcccttctagataacctgtcccgaaaggttcccctgcccttcggcgtgcgaaatataagcacccctcgaggtaggcactccattactcgcctggaggaactggaagacggggaatcctacctctgttcccacggacgtaaggtccagcccgtcgatctggacaaagctcgacggcgtccaaggccatggctctctagtagggcaatcagcgcacattcaccaccacaccccgtggctgtggccgcacctggcatgcccaggccacccaggtctctggtcgtctttaggaatggggacccaaaaacccgtcgtgcagttctgctgtcccggcgggtgacccagagcttcgaagcatttctccaacacctgaccgaagttatgcagaggcctgtcgttaagctctacgcaactgacggcagaagggtaccctctctgcaggccgtgattctcagcagcggcgccgttgtggccgccggacgggaaccattcaaacccggaaactatgacatccagaagtacttgctccctgctcgcttgccagggataagtcaacgcgtgtatccgaaagggaatgctaaatcagagtctagaaaaatctcaactcatatgtctagtagcagccggtctcagatttactccgttagttcagagaagacccacaacaacgactgctacctggattactcatttgttccggaaaagtatctggccctggagaagaacgattcgcagaacttacccatttacccttcggaagacgacattgaaaagagtatcatattcaatcaggacggaacgatgacggtcgagatgaaagtcagatttaggatcaaggaagaggagaccattaagtggaccaccaccgtgtctaaaaccggacccagtaataacgacgaaaaaagcgagatgtccttcccaggtcggacggaaagtagatcctccggcttgaagctggcagcttgcagtttttctgccgacgtatcccccatggagcggtcatctaatcaggagggcagtctggcagaagaaatcaacattcaaatgactgaccaggttgcagaaacctgcagctccgcctcatgggagaacgctactgtcgatactgacatcattcagggaacccaggaccaggcaaaacatagattctatagaccgcctacaccaggccttagacgagtgaggcagaaaaaatcagtgatcggctcagtgacactcgtgtcagaaaccgaagtacaggagaagatgattgggcagttttcttacagtgaagagagagagtctggggaaaataaatccgagtatcacatgtttacacactcgtgctccaaaatgtccagcgtgtcgaacaagcccgttcttgtccaaatcaacaataatgatcagatggaagaatcctcgctggagagaaaaaaagaaaattccttactgaagtccagcgccatcagtgctggggtgatcgagataacgtcccaaaaaatgctggaaatgtcccacaacaacggattgccaagcactatcagcaacaattctatcgttgaggaagacgtggttgactgtgttgtgctggataataaaactggaataaagaatttcaagacttacggcaatacaaatgaccggttttctcctatatcagcagatgctacccatttctcttcaaacaattccggcactgataagaacatcagtgaagcacctgcctctgaggcttcatcgaccgtgacggcgcggatagaccggctgatcaacgagtttgcacagtgcggcctaacaaaactgccaaaaaatgagaagaagattttgtcaagcgtggcctcaaagaaaaagaagaagtctcgacagcaagctattaatagccgataccaggatggccagctggcaacaaaggggatcctgaataagaatgaaaggataaatacaaagggtaggatcaccaaggagatgatcgtccaagactcagattcccccttaaaaggggggattctctgtgaggaggacctgcagaaaagtgacacagtgatcgaatctaacaccttctgctcgaagtcaaacctgaactctaccatttccaagaattttcatcgaaacaaactgaacacaacccagaattctaaagtccaaggcctgctgacaaagaggaaaagtcgaagcctgaacaagatttccctgggagccccaaagaagagggagattggtcaacgggacaaagtcttcccccacaatgagtcaaagtattgtaaaagtaccttcgagaataaatctctttttcacgtgtttaacattctcgaacagaagccgaaggatttctacgctcctcaatcacaggccgaggttgcaagcggctatctgcgcggtatggcgaagaaaagtctcgtgagcaaggtgaccgattctcacattacattgaaatcccaaaagaaacggaaaggcgataaggtgaaggcatccgcgatcctgagcaaacagcacgccacgacacgggccaattcgcttgcaagtctcaagaaaccagatttcccagaggccattgctcaccactctattcaaaattacatacagtcctggctgcaaaatattaacccatacccgacactgaagccgattaagagtgctcctgtgtgtagaaatgagacttcagtggtcaattgttcaaataacagcttcagtggcaacgatccgcacacaaactccgggaaaatttcaaatttcgtgatggaaagcaacaagcacatcactaaaatagccggtctcactggagacaatctgtgcaaggaaggcgataaatctttcattgcaaacgatacaggtgaagaagatttgcacgaaactcaggtggggtccctgaatgatgcttatcttgtgccacttcacgaacattgtacactttcacagtccgcaataaatgaccacaataccaaatctcacattgccgctgagaagtcaggcccagaaaagaaactcgtttaccaggaaatcaatttggcgcgaaaacgccagtccgtagaggcagccattcaggttgaccccatcgaggaggaaacccctaaagatctgctccctgtgcttatgctgcaccagctccaggcatccgttcccggaatccataagacccagaatggggtagtacaaatgcctggctccctggccggagtacccttccactccgcgatctgcaacagttccaccaatctactgctcgcctggctcctagtgctcaaccttaaaggatctatgaattctttctgtcaggtcgatgcccataaggctaccaacaaaagcagtgaaaccttagccctcctggaaattctcaaacacatcgccattacagaggaggctgacgacctcaaagccgcagtggccaacctggtggagagcacaacatctcattttggcctaagcgaaaaagagcaagatatggtgcctatcgacctgtcagccaactgttccaccgttaatatccaatcagttcccaagtgtagtgaaaatgaaaggacgcaggggatctcttcattggatggtggatgcagcgcaagtgaggcttgcgccccagaagtgtgcgtattggaggtgacatgttctccctgtgagatgtgcaccgtgaacaaagcctactcccccaaagaaacctgtaacccttcggacactttttttccatccgatgggtatggcgtggatcagacctccatgaacaaggcctgctttctgggggaagtttgttctctgactgatacggtcttctccgacaaggcctgcgctcaaaaggaaaatcatacatacgagggcgcgtgtccaatcgatgaaacctacgtcccagtcaatgtctgcaacactatcgactttctgaatagcaaagaaaatacatataccgacaacctcgacagcactgaagagctggaaaggggggacgacatccagaaagatctgaacatcctgaccgaccccgagtacaaaaatgggttcaacactctcgtctcccaccagaacgtgtctaacctcagcagctgcggactgtgcctgtctgagaaggaagcggagctggacaagaaacacagcagcctagatgactttgaaaactgttccctgcgcaaatttcaagacgagaatgcgtacacttcttttgatatggaggagccccgtacctccgaggaaccaggcagcatcacaaactcaatgacaagtagtgagaggaacatttccgaattagaatccttcgaggagctcgagaatcatgacacagatattttcaacactgtcgttaatgggggtgagcaggctacagaggagctgatacaggaagaagtggaagcttccaaaactctggaactcattgacattagttctaaaaacatcatggaagagaagcgtatgaacggaatcatatacgaaatcatcagtaaacggctggctaccccccccagtttggatttttgctatgacagcaaacagaacagcgaaaaggagactaatgaaggcgagaccaagatggtgaagatgatggtgaagactatggagactggatcgtacagtgaatcctcccccgacctgaagaaatgtataaaaagccccgtaacctcggattggtccgattacagaccggatagcgattcagagcagccttacaaaacttcttcagatgatccaaacgacagcggcgagctcacccaggaaaaagagtacaatattgggttcgtgaaacgcgcaatagagaagctttacggaaaagctgacataatcaagccctcattctttcctggcagcacaagaaagtcccaagtgtgcccttacaatagcgttgaattccagtgcagtcggaaagcctccctctacgactctgaaggccagtccttcggctcttccgagcaggtttcctcctctagctctatgctgcaggagtttcaggaggagaggcaggacaaatgtgacgtgtcggcagtgagagacaattattgtcggggagacatagtagaaccaggtactaagcaaaacgatgacagccgcatactgaccgatatcgaggaaggggttctgatagataaggggaaatggttgctgaaggagaaccacctccttcgaatgagtagcgagaacccagggatgtgcggcaatgccgacacaacaagcgtggacacactcctggataataactcctctgaagtgccctattctcattttggtaatttggctcctggcccaacgatggacgagctgtcctccagcgaattggaagagctgacccagccactcgaattaaaatgtaactactttaatatgccccatgggtcggattccgagccttttcacgaagatctgctggatgtgaggaatgaaacatgcgcaaaggagagaatcgccaaccaccacaccgaagagaaggggagtcatcagtccgaaagagtctgtacaagcgtaactcattcattcatctcagccgggaataaggtctaccctgtgtcagacgacgctataaagaatcagccgctccccgggagtaatatgattcacggaaccctgcaagaggccgattctctcgacaagctttacgccttgtgcgggcaacactgccccattctgaccgtgataatccagccaatgaatgaggaggataggggattcgcctatcgcaaagagagcgacattgaaaattttttaggcttctatctctggatgaaaatccacccttaccttctccagacagataagaacgtttttagagaagagaacaacaaggcctccatgcggcaaaacctcatagataatgctataggcgacatcttcgaccagttctatttttccaatacatttgatctcatggggaagcgtcgaaaacagaaaagaataaatttcttgggtctggaagaagaggggaatttaaaaaaatttcagcctgatctcaaggaaaggttttgtatgaactttctgcatacctcgctactggtagtgggaaatgtggactctaatacacaagacctgagcggccagacaaacgaaatctttaaagctgtagatgagaacaataacctcttaaataatcggttccaaggcagtaggaccaatctgaaccaggtcgtacgagagaatattaattgtcactatttttttgagatgctgggacaagcatgccttctggacatttgtcaagttgaaacttcgctgaatatttcaaaccgcaacattctagagctttgcatgtttgaaggtgaaaatctctttatttgggaggaagaggacatcctgaatctgactgatcttgaaagcagtcgcgaacaggaagatctttag

SEQ ID NO: 26098 - DNA, 1212 bp, synthetic construct
  misc_feature 1..1212: note = Description of Artificial Sequence: Synthetic coding sequence
  source 1..1212: mol_type = other DNA
atgaccccccccctgctgcaccacgacctgaagacccagaacatcctgttagataatgaattccacgtgaagatagccgacttcgggctgtccaagtggcgcatgatgtccctctcacagtctcgcagctccaaatccgctcctgaggggggcaccattatctatatgccgccagagaattatgagcccgggcagaaatcccgggcgtccatcaagcacgacatttactcttacgcagtgataacatgggaggtgctctctaggaagcagcccttcgaggacgttaccaatcccttgcagataatgtatagcgtcagtcagggccataggccagtgatcaatgaagagagcctcccctacgatatccctcatagagctaggatgatttcactgatcgaatccggctgggctcagaaccctgacgagcgtccttcgtttctgaaatgccttattgagttggagccagtactcagaacattcgaggagattacctttctcgaagctgtaatccagttgaagaagaccaaactgcagagtgttagctccgctatccacctgtgtgacaagaagaaaatggagctctccctgaatattcccgttaatcacggaccccaggaagagtcttgcggatccagtcagctgcatgaaaacagcggcagccctgaaacttctagaagtctcccagccccccaagataatgacttcctaagccgaaaggctcaagattgctattttatgaagctccaccattgcccgggcaaccactcttgggactcaacgatttccgggtcgcagcgggctgctttctgcgatcataagaccaccccttgcagctccgccatcatcaaccccctgtccaccgcaggaaacagtgaacgtctgcagcccggtatagcgcaacagtggatacagtccaagagggaagatatcgtgaaccagatgaccgaagcctgtttgaatcagtctctggatgccctgctttcaagagacctgataatgaaggaagactacgagttagtctctactaagcccaccagaacatctaaggtgcgccaactcctggataccacggatattcagggcgaggaattcgcaaaggtgatagtccagaaactcaaagacaacaagcagatgggtcttcagccttatccggaaatcctggtggtgtcccgcagtcccagtctgaacctgttgcaaaataagtctatgtag

SEQ ID NO: 26099 - DNA, 10377 bp, synthetic construct
  misc_feature 1..10377: note = Description of Artificial Sequence: Synthetic coding sequence
  source 1..10377: mol_type = other DNA
atggagcggagcggctgggcccggcagaccttcctgctggccctgttgcttggggcaaccttgcgagcccgcgcagccgctgggtactaccccaggttttcaccattttttttcctgtgcacacaccatggcgagcttgagggtgatggggaacagggagaggtgcttatcagcctccacattgccggcaatcccacatattatgtaccaggccaggaatatcatgtgactattagtaccagcacttttttcgatggcttacttgtcacaggcctttatacgtccacttcggtgcaggccagtcagagcatcggcggctcatcagcgttcgggtttgggatcatgtctgaccatcaattcggcaaccagtttatgtgctccgtagtggcgagccatgtgagtcatctgccaaccacaaatctttcctttatctggattgctcccccagccggaaccggctgtgtaaatttcatggccactgctacccacaggggacaagtcattttcaaggatgctctcgcccagcagctttgtgagcaaggcgctccaactgacgtgacagtgcatccacatctcgctgaaattcattctgatagtataattctccgcgatgactttgacagctaccaccagctccagctgaatccgaatatttgggtggagtgcaacaattgtgaaaccggggaacaatgcggcgcgatcatgcatggaaacgcagtgacgttttgcgagccatatggacctcgcgagctcataacaacaggcctcaacacaaccacagcgtcagtgctgcagttcagtatcggctccgggagttgccggttcagctactctgatcccagtattatcgtgctgtatgcgaaaaataattctgcggattggatccagctggagaagatacgggctccaagcaatgtttccactattatacatattttatacctgccagaggatgccaaaggggaaaacgttcaattccagtggaagcaggagaatcttcgcgttggagaagtgtacgaggcgtgttgggcactagacaatattctgatcattaacagcgcccataggcaggtcgtcctggaagatagtctcgacccagtggacacaggtaactggctgtttttcccaggggctacggttaagcacagctgtcagagcgacggcaacagtatctattttcatggcaacgaggggtctgaatttaattttgctactactagggatgtggacttgtccacagaggacatccaggaacagtggtccgaagaattcgaaagccagccgacaggctgggatgttcttggagcagtgatcggcaccgagtgcggtactattgaatcaggtctcagtatggtgttcctgaaggacggcgagagaaaactctgtacaccctccatggatacgactggatatggaaatcttaggttctacttcgtcatgggcgggatctgtgaccccgggaatagtcacgagaatgacattattctgtatgcgaagattgaggggagaaaggagcacatcacgctcgataccctctcctacagcagttataaggtgccatctctggtctctgttgtcatcaacccagaactgcagacaccagcaacaaagttctgcctgcggcaaaagaaccatcagggccacaacagaaacgtctgggccgtggatttcttccatgttctccccgtgttgccttccaccatgtctcatatgatccagttctccatcaatctgggctgcggcacacatcagccaggcaactcggtgtccctggagttctctaccaaccacgggcggagctggtcgctgttgcatacggagtgtctgcctgaaatctgcgctggaccacacctgccgcatagtactgtctatagcagtgagaattactcaggatggaacagaattactatccccctgcccaatgccgccttaactaggaacaccaggatccggtggcgccagacaggtcctatcttgggtaatatgtgggctatcgataatgtgtatatcggcccatcatgtctcaaattttgctcagggagaggccaatgtacgagacacggctgtaagtgcgaccccggcttctccggtcccgcgtgtgagatggcttcccagactttccccatgtttatctccgaatcttttggctcttcacgactgtccagttaccataacttctacagcattagaggggccgaggtctccttcggttgtggcgtccttgctagcgggaaagccctggttttcaataaagatggcaggcggcagcttataacgtcttttttggactcatcccagtcaagattcctacaattcactctgcgcttgggatccaagtctgtgctgagcacctgccgcgcgcccgaccagccaggggaaggggtgctgttgcactactcctacgacaatggcataacgtggaagttgttggaacattacagctaccttagctatcacgagccgcgtatcattagtgtggaactgccaggggacgccaaacagtttggaatacaattcaggtggtggcagccttaccactcctcgcagcgggaggacgtgtgggcaattgatgaaataatcatgacatcagtattatttaacagcatcagcttggattttactaatctggtggaggtgacacaaagcctcggtttctacttaggtaatgtgcaaccttattgtggtcacgattggactctgtgctttacaggcgattctaagcttgcctctagtatgcgctatgtcgagactcaaagtatgcagatcggcgcaagctatatgatccagttctcattggtgatgggatgcgggcaaaaatacacaccacatatggacaaccaggtcaagttggaatactccacaaaccacgggttaacctggcacctggtgcaagaggaatgcctcccaagcatgccatcgtgtcaggagtttacgagcgctagcatttaccacgcctctgaatttacgcagtggaggagagtcattgtactactgccccaaaaaacatggtcatctgccacacgtttccgatggtcccagtcctactacactgcgcaagatgagtgggccctcgattctatctatatcggccaacagtgtcccaacatgtgctccggacatggcagttgcgatcacgggatttgccgctgtgatcagggctatcagggcacggagtgtcacccagaggctgcgctccctagcacaattatgagtgactttgaaaatcagaacggatgggaaagcgactggcaggaggtaatcggtggagaaattgtaaaacctgagcagggttgtggggtaattagcagtggctcctctttatattttagcaaggctggaaaacggcagctggtgtcatgggacttggacaccagctgggttgattttgttcagttctacattcagatcggtggggaatcggccagctgcaacaaacccgatagccgggaggaaggagtcctactgcaatattctaataacggcgggatacagtggcatctgcttgcagagatgtacttctcggacttcagcaagccacggttcgtgtatctcgagctccctgcagcagccaagaccccatgtacacggtttcggtggtggcagcctgtattcagcggagaggattacgatcagtgggcagtggacgacattattattctgagcgagaagcaaaagcagatcatcccagtgatcaatcccacacttccacagaacttttatgagaaaccagcattcgattatccaatgaatcagatgtctgtatggttgatgctcgccaacgagggtatggtaaaaaatgagacattctgcgccgcaaccccatccgccatgatcttcggcaagtcggacggtgaccggttcgcggtgacccgcgacctgacacttaaaccagggtacgtgttacagtttaaactgaacatcggatgtgccaatcagttctcctctacagctccggtcttgttgcaatatagtcatgacgctggtatgtcttggttcctagtcaaggaaggttgttaccccgcgtccgccggcaaagggtgtgagggcaactctagagaactgtccgagccaaccatgtaccacaccggggattttgaggagtggactcgcatcacaattgtaatcccgagaagcctggcctccagcaaaacgcgtttcagatggatacaagaatcctcctcgcagaaaaatgtgcctccatttggactggatggcgtatacatctcggaaccttgcccttcatattgttctggacatggcgattgcataagcggggtttgtttttgtgacctggggtacactgctgcgcagggcacttgcgtgagtaacgttcccaatcataacgagatgttcgatcggtttgaaggaaaactgtcgcctttgtggtataagatcacgggggcccaagtggggaccggctgtggcacactcaatgatggtaagagcctgtactttaacggaccaggcaagagggaggcacggactgtcccccttgatacgagaaacatcaggttagtccaattctacattcagatcggctcgaaaacctccggcattacctgtataaagccacggacacgaaacgaaggcctgatcgtccaatacagtaatgataatggtatactttggcacctcctgcgcgagcttgacttcatgagctttctggagcctcagataatttcaattgatctgcctcaggatgctaaaacccccgccacggctttccggtggtggcagccccagcacggaaagcactcagcccagtgggccctggatgacgtgctgattgggatgaacgattcgtcccagactggattccaggacaagttcgacgggtccatcgacttacaggccaattggtacagaatacagggcggccaggttgatatagactgcctgtccatggacacggcactgatttttactgagaacattggaaaaccccgctacgccgagacatgggactttcatgtctctgctagcactttcctccagttcgagatgtctatgggctgttccaaaccattcagcaattcacactcagtgcagcttcagtactcacttaataatgggaaggactggcacctagtgacggaggagtgcgtccctccaacaatcggctgtctgcattatactgagagctccatttataccagtgagaggtttcaaaactggaagcggatcacagtgtatctgcctttgagcacaatttcccctagaactagatttagatggatccaggcaaactacaccgtgggggccgattcctgggccattgacaacgtggtgcttgccagtgggtgcccttggatgtgctctggccgcgggatttgtgacgcagggaggtgcgtatgcgacaggggcttcggcggaccttattgtgtgcctgtggtgcctttacctagtatactgaaagacgacttcaacgggaacttgcatcctgacttatggccagaagtctatggtgccgaacggggaaacctgaacggagagactatcaagagcggtacatccctgatctttaagggggaaggactgcgaatgttaataagtagggacctagattgcaccaacacaatgtacgttcagttttccttacggttcattgctaaaagtacgcccgaacgatcccacagtatcctactccaattcagtatctccggtgggatcacttggcaccttatggacgagttttatttcccgcagaccacgaatatactgttcataaacgttccgttaccttatacagcccagactaatgctacaaggttccgtctctggcaaccatacaacaatggaaaaaaagaggagatctggatcgtggatgattttataatcgacgggaataacgtcaacaaccccgtgatgttactggacacttttgacttcgggcctcgggaagataactggtttttctacccaggggggaacattggactctactgcccatacagctcaaagggcgcccccgaggaagactcagccatggtctttgtgtcaaacgaagtcggcgagcacagcatcactacaagagatctgaatgtgaacgaaaatactataatccaatttgaaatcaatgtcgggtgcagcaccgactcatctagtgcagaccctgtgaggctggagttctccagagacttcggagcaacttggcatctgctgcttccgctctgctatcattccagctctcacgtctcctctttgtgtagtaccgaacaccaccctagttcaacatactatgccggtacaatgcaaggatggaggagagaggtggtgcactttgggaagctccatctgtgtgggagtgtgcgcttccgctggtaccagggtttctacccagcaggatctcagcccgtgacatgggctatcgataacgtctacatcgggccacagtgcgaggagatgtgtaacggacagggcagttgcatcaacggcactaaatgtatttgtgatccagggtatagcgggcccacctgcaagatcagtaccaagaacccagactttttgaaagacgatttcgaggggcagctagagtcagacagattcctgctgatgtccgggggcaaacccagccggaaatgcggtatactgtcttccggcaacaacttattcttcaacgaagatggtctgcggatgctgatgacgcgtgatcttgatctgagccacgcaaggtttgttcagttttttatgcggttgggatgtggtaagggagtacctgatcccagatcacagcccgtgctactgcaatacagtctcaacggtggcttaagctggtctcttctacaagagtttctcttcagcaatagcagtaacgtcggcagatatatagcacttgagatccctctcaaggccaggagtggttctacacggttaagatggtggcagccttcagaaaatgggcacttctacagcccatgggtgattgatcaaatactgattggaggtaatatctccggcaataccgtcttggaggacgatttcacaactttagatagtcgtaagtggcttttgcatcccggcggaaccaagatgccagtgtgtggatccactggggatgccttagtcttcatagagaaggcatcgacgcgctacgttgtgtcaactgatgtggcggtcaatgaggactcatttctgcagatagacttcgccgctagctgctcagtgaccgactcctgttatgcaatcgagctggaatactctgtggaccttggactgagttggcaccctctggtccgcgattgcctgccgactaatgtggagtgttcaaggtaccacctccaacgaatcctagtttctgacaccttcaacaagtggacaaggatcactctgcccctccctccttatacccgaagccaggcaacccgatttcggtggcaccagccagcgcctttcgacaagcaacagacgtgggcaatcgacaacgtatacatcggagacggttgtatcgacatgtgttctggacacgggcggtgtattcaggggaattgcgtatgtgatgagcaatggggaggcctctactgcgacgatcccgagacttctctgccaacccaattaaaggacaattttaatcgcgccccatcctcacagaactggctgacggtaaacggtggcaagctgagcacagtgtgcggagccgtcgcttcaggaatggccctgcatttcagcggaggctgctcacggctgctcgttaccgtggacctgaatttaaccaatgcagagtttatccagttctacttcatgtatggttgcctaataacacctaataacagaaatcaaggtgtgcttctggagtattccgtcaacggaggaatcacatggaatctgttaatggagattttctatgaccagtattccaaacctggattcgttaacattctgttaccacccgatgccaaggaaatagcaactcgattcagatggtggcagccccggcatgatgggttagaccagaacgattgggcgattgacaatgtgcttatttctggctccgccgatcagcgaactgttatgctggacaccttcagtagcgccccggtgcctcagcacgagcgaagccccgctgatgccggtccggtaggtaggatcgcattcgatatgttcatggaggacaaaactagcgtgaacgagcattggctgtttcacgacgactgcactgtggagcggttctgtgatagtcccgacggggtcatgctttgcggtagtcacgatggacgagaagtgtacgcagttacacacgacctcacccctactgaaggatggatcatgcaatttaagatttcagttgggtgtaaggtcagcgagaagatcgcacagaaccagatccacgtgcagtatagtaccgacttcggagtgagctggaactatctggtgccacagtgccttccagccgaccccaagtgctctggctcagtgagtcagccttcagtttttttccctaccaaaggctggaaacggattacatacccattgccagaaagcctcgtagggaaccctgttcgtttcagattttaccagaaatattcagatatgcaatgggccattgacaatttctacttgggacccggatgtctggataactgtcgcgggcacggggactgcctgagggagcaatgtatctgcgaccccggctactctgggcccaattgctatctgacgcacaccttgaaaacattcttgaaagagaggttcgacagcgaagagataaagcccgatctttggatgtccctggagggcggctcaacctgtactgaatgcggcatccttgcagaagatacggctctctactttggcggtagtactgtgcggcaggctgtgactcaggatctggatctgagaggtgccaagtttctccagtactgggggagaatcggatctgagaacaatatgactagctgccaccgccctatctgtagaaaggagggagtgcttctcgattatagcactgacggaggtataacttggacactcctacatgagatggattaccagaagtacatcagcgtgcgtcacgattacattttgcttcctgaggacgcccttaccaatacaacacgccttcggtggtggcaaccttttgtgatttcaaacggtatcgtcgtctccggcgtggagagggcccagtgggccctcgataatatcctcatcggaggcgcagagataaatccctcgcagctagtggacacatttgacgatgagggtacgagccatgaggaaaactggtcattctaccctaatgccgtccgaactgctggcttctgtggcaatccctcttttcacctttattggcccaataagaaaaaggacaagactcacaatgctctgtcgtcgcgagagctcattattcagcctggctatatgatgcagttcaagatcgtagtgggctgcgaggccacctcttgcggagatttgcactccgtcatgctggaatatactaaggacgccaggtccgacagctggcaacttgttcagacccagtgtctaccaagcagttctaatagcattggttgctctcccttccagtttcacgaggcaaccatctacaattcggtgaactcgtcttcgtggaagcgtatcacaattcagctgccagaccacgtgagcagttccgccacccagttccggtggatccaaaaaggtgaggagactgagaagcagtcttgggcaatagaccatgtgtacatcggcgaggcctgtcctaagctgtgttccgggcacggctactgcactacaggcgcaatctgcatttgcgacgagtctttccagggtgacgattgtagcgtgttcagtcacgatcttcccagttacatcaaggacaattttgaaagcgccagggtcactgaggcaaattgggaaacaatccagggaggggtgatcgggtcaggatgtggccaattggctccctacgcccacggcgattcactttacttcaatgggtgccagatacggcaggccgccaccaaaccgctggatttaaccagggcctcgaaaatcatgttcgtcctgcagattggatctatgagccagactgactcttgcaactcagatctgtctggacctcacgcagtggacaaggccgtcctgcttcaatacagtgtgaataatggcatcacctggcatgttatagcccaacatcagcccaaagacttcacacaggcacagagagtgtcatataatgttcccctggaggctcgtatgaaaggcgtcttactacggtggtggcaacctagacacaatggcactggacacgaccagtgggccctggatcatgtggaagttgtactaaccagaaagcagaattatatgatgaacttctcccgccaacatgggctgcgccatttttacaatcggcgacggagatctcttaggcgatacccttag

SEQ ID NO: 26100 - DNA, 10383 bp, synthetic construct
  misc_feature 1..10383: note = Description of Artificial Sequence: Synthetic coding sequence
  source 1..10383: mol_type = other DNA
atggagcggagcggctgggcccggcagaccttcctgctggccctgctcctcggcgctacactcagggccagggctgcggctggctattatccgcgcttcagcccctttttcttcttatgtacgcatcacggagagcttgagggcgacggggagcagggagaggtactgatcagtctacacattgcaggtaatccaacctactatgtccccgggcaggagtaccatgttaccatctcaacgtcaactttctttgatggtctgctcgtcaccgggctgtacacatccacctcagtccaggctagtcaaagtatcggaggaagtagtgcattcgggttcgggatcatgtctgaccatcagttcggtaaccagtttatgtgtagtgtggtggcttctcatgtctctcacctcccgacaacaaacctttccttcatttggatcgcccctccagccgggaccggttgcgtcaattttatggccactgccactcaccgcgggcaggtgatcttcaaagatgccctggcacaacagttgtgcgaacagggcgcccccaccgatgtgacagtacacccccacctcgcagagatccactcagactctatcattctaagggatgatttcgactcatatcaccagcttcagcttaaccctaacatctgggtggaatgtaacaactgtgagacaggcgagcagtgcggggcaataatgcacgggaacgccgtgacattctgcgaaccctacgggccacgggaactgatcaccacgggactgaacaccaccacggccagtgttttgcagttttccattggcagcgggagttgtaggttctcctattccgacccaagtataattgttctgtacgcaaagaacaacagcgcagattggattcaacttgagaaaatcagagctccaagcaatgtgagtaccattattcacattctgtacctccctgaagatgccaaaggcgaaaacgtgcagttccagtggaaacaggaaaacttgagggtgggcgaggtatacgaggcttgctgggccctggacaatattctcattataaactctgcacaccgccaagtcgtcttagaagatagcctggaccctgtggacactgggaactggctcttttttcctggcgccacggtgaaacattcatgtcaatctgatggcaattccatttattttcatggcaatgagggttccgagttcaacttcgccaccacgcgggacgtagatttatcaacagaagatattcaggaacaatggagtgaggaattcgaaagccagcctactggatgggacgtgcttggcgccgtgatcggcacggagtgtggaaccattgagtccggcctctctatggtgttcctgaaggacggtgagaggaagttgtgtacaccatccatggacaccacggggtacgggaatctgagattttacttcgtaatgggcggaatctgtgatcccggaaactcccacgagaacgacatcattctgtacgccaagatagaggggcggaaagagcacatcacactagacaccctcagttactctagttataaggtgcccagcctcgtatctgtggttatcaatcccgagctgcagacaccagccaccaaattctgcctgcgccagaagaatcatcaaggacacaatagaaacgtctgggcagtagactttttccatgtccttccagtgctcccttccacgatgagccacatgatccagttcagcatcaacctcggatgcggcacccatcaacccggtaacagtgtctcacttgaattctctaccaatcacggtcgatcctggtctctgctgcacacagaatgtctgcctgagatatgtgctggaccacacctgccgcactcaacagtctattcatctgagaactattctggttggaaccgaatcaccatccctttgccaaacgccgccctgacccgcaatacaaggataagatggcggcagaccggacccatactgggtaacatgtgggccatcgataatgtttacattggccccagctgccttaaattttgttctggtcgaggacagtgtacccgccacgggtgtaagtgtgatcctggcttctctgggccagcctgcgagatggccagtcaaacattccccatgttcatctccgagtccttcggaagctcaagactgagctcttatcacaacttctattccatccgcggcgccgaagtctcctttgggtgtggcgtcctcgcctctggtaaggcattggtctttaataaagacggccgccgccagctgatcacctccttcctagacagctcccagtccagattccttcagtttaccctccggctgggaagcaaatcggttctcagtacttgccgggcaccagaccagcccggtgaaggagtactgctccactacagttacgacaatgggatcacctggaaactcctagaacactactcgtacctcagttaccatgagcccagaatcatttcagtcgagttaccaggtgacgcaaaacaattcggaatccagttcagatggtggcagccataccactcttcacagagagaagacgtgtgggccattgacgaaatcattatgacatctgtactgttcaatagcatttccctggattttaccaatttggttgaagtcacccagtctctgggattttatctcggaaacgtccagccttactgtgggcatgattggacactgtgttttacaggtgactccaaactggcaagtagtatgcggtatgtggagacgcaatccatgcagataggagcatcatatatgatacagttctctctagtcatgggatgcggccagaagtatactccacacatggacaaccaggtaaaattagaatactctacgaaccacgggcttacttggcacctggtccaggaggagtgccttccctcaatgcctagctgtcaggagtttacctccgctagtatctatcatgctagtgagttcacacagtggcgaagggtgatcgtgctactgccccagaaaacctggagctctgcaacgcggtttaggtggagccagtcctactacaccgcacaggatgaatgggccctggactctatttatattgggcaacaatgcccgaatatgtgttcagggcacgggtcatgcgatcatggaatctgtcgctgcgaccagggctaccaaggcactgaatgtcacccagaggctgcacttcctagcaccatcatgtccgattttgagaaccaaaatggctgggaatccgattggcaagaagtaatcggcggggagatcgtcaaacccgagcagggatgcggcgtgatcagctccggtagctccctatattttagcaaagctggaaaaagacagctggtcagttgggacctggacaccagttgggttgatttcgtccagttttacatacagatcgggggcgagtcagccagctgtaacaaacctgattctcgcgaagagggcgttttactccagtatagtaacaacgggggaatccagtggcatttgcttgccgagatgtatttttctgacttctccaagcccaggtttgtgtaccttgagcttccagcagcagcgaagactccttgcacaagatttcgatggtggcagccagtgttttcgggcgaggactacgatcagtgggcggtggatgacattattatcctttctgagaagcaaaagcaaatcattcctgtgatcaaccctaccctgccacaaaatttttatgagaagcccgcatttgactatcccatgaaccagatgagcgtgtggctgatgttagctaacgaggggatggtcaaaaacgaaaccttttgcgctgctaccccatccgcaatgatttttggaaagagcgatggggacaggttcgctgtgaccagggatctgactctaaaaccaggatacgtattgcagttcaaactgaacatcggctgtgcgaaccagtttagttctactgcgccagttctcttacagtatagccacgatgccggaatgtcatggtttcttgtcaaggagggatgttaccccgccagcgccggaaagggatgcgagggcaactcaagggagttatcagaaccaacaatgtaccatacgggcgatttcgaagaatggactcgtataaccatcgttatcccccgcagcctggcctcctctaagacacggtttcgttggatccaggaaagctcttctcagaaaaacgtgccgccttttgggttggatggtgtgtacataagcgaaccctgcccatcgtattgctcaggtcatggcgattgcatcagcggcgtgtgtttttgtgacttagggtacaccgccgcccaggggacgtgcgtgtcaaacgtgcccaatcacaacgaaatgttcgaccgcttcgagggaaagctcagtcctttatggtataaaattaccggcgcccaggtcggaaccggttgtggtaccttaaacgacgggaagagtctgtattttaacgggcccggaaagagagaagcccgaacggtgcctctggatacgcgcaacattaggctcgttcagttttacatccagatcgggtctaagacctccgggattacctgcattaaaccaagaacccggaatgaaggcctgatcgtacagtatagcaatgacaacgggatcctttggcaccttctccgcgagctggactttatgtccttcctggagccccagatcattagtattgatctgcctcaggacgcaaagacccccgccaccgcctttcggtggtggcagccccaacatgggaagcattcagcccagtgggctctggacgatgtgctcataggcatgaacgactcttctcaaactggattccaggacaagtttgatggttcaattgacctgcaggccaattggtataggatccagggcggacaagttgatatcgattgcctcagcatggatactgccctcatattcaccgagaatatcggaaaaccgagatacgcagaaacatgggatttccacgtttctgctagcacatttctccagttcgagatgtctatgggctgctctaaacctttttcaaactcccacagtgtccagctgcagtatagcctaaacaatgggaaagattggcatcttgtgactgaggaatgcgtgcccccaaccatcgggtgcctgcactatacagaatcttctatctatacctccgaacgttttcagaactggaagagaatcaccgtctacctcccgttgagcacaatatcacccagaacgcgatttaggtggatccaggccaattataccgtcggtgccgacagctgggccatcgacaacgtggtcctcgccagcggctgcccatggatgtgttctggtcgcggcatctgtgatgctggacgttgcgtatgcgatagggggtttggggggccttactgcgtaccagtggttccattgccttcaatactcaaggacgatttcaacggcaacttgcacccagatctgtggcccgaggtatacggcgctgagagaggaaacctgaatggggagactatcaaaagtggcacaagtctgatcttcaagggggaaggcctgagaatgctgatatctcgcgacctggactgtaccaatacgatgtatgtccagttttcccttcggttcatcgctaaatctacccccgagcgaagtcacagcattctgctccaattctccatttctggaggtattacctggcatctcatggacgagttctactttcctcagacaacaaatatactgttcattaacgtcccattgccctacacggcacagactaacgcaactagatttcgcctgtggcaaccgtataataatggaaagaaggaggagatttggatcgtggatgatttcataattgatggaaataacgttaacaaccctgtaatgttactggacacatttgactttggaccgcgcgaggataattggtttttctatccaggcgggaatatcggtctttactgcccatattctagtaagggggcaccagaggaagactccgccatggtattcgtgtctaacgaggttggcgaacactccattactaccagagatctgaatgttaatgagaatactatcattcaattcgaaatcaatgtcggatgtagtacggactcctcaagcgcagatccagtgcgcttggaattcagccgggactttggcgccacctggcacctgttgctacccctgtgttatcatagcagctctcacgtctcttctctgtgttccaccgagcatcacccatccagcacgtactacgcagggactatgcaggggtggagaagagaggtcgttcatttcggaaagttacatctctgcggatctgttagatttcgctggtaccaggggttctatcctgcggggagccaaccagtaacctgggctatcgataacgtctacatcggcccacagtgtgaggagatgtgcaatggccaggggtcgtgcattaatggaacaaaatgcatctgtgatcccggctatagtggccctacatgtaaaattagtacaaagaatcccgattttctaaaagatgacttcgagggccagctggagtccgaccgcttcctgctcatgagcggtggcaaaccctctcggaaatgtggcatcctcagctccggcaataacttgtttttcaatgaggacgggctgcgcatgctcatgactcgggacctcgacttaagccatgctaggttcgttcaattcttcatgagactggggtgcggcaaaggagttcctgacccacgctcccagccagtgctcctccaatacagtctgaacggcgggctgagttggtcactcctgcaggaattcctcttttccaattccagtaatgtaggacggtatatcgcactggaaatccccctgaaggcgcggtctggaagtactcgcttgcgctggtggcagccatccgagaatggacacttctacagtccgtgggtcatcgaccagattctgattggagggaacatctcagggaataccgtcctcgaagatgattttactactctggattccaggaaatggttactgcatcccggcgggactaagatgcccgtgtgcggcagcactggtgacgcgctggtttttatagaaaaagcctcgacgcgctacgtcgtttccaccgacgtcgccgtgaacgaagattcctttctccagattgacttcgccgcgtcatgttctgtgaccgatagttgttatgccatcgagctggagtacagtgtggacctgggcctctcttggcaccccttggtgcgtgactgccttccaacaaacgtggaatgttctcgctatcacctccaaagaattctcgtatcagacactttcaataagtggacgagaatcacactgcccctcccaccgtacacaaggagccaagccacacggtttcggtggcaccagccggctccattcgacaaacagcagacctgggctatcgacaacgtgtacattggtgacggttgtatcgatatgtgtagtggacatgggcgttgtattcaaggtaactgtgtgtgtgatgagcagtggggtgggttgtactgcgatgatccggagacctctctgcctacccagttgaaggataatttcaatcgtgcaccatcgtctcagaattggttgactgtgaacggtggtaagctgtcaacagtctgcggcgcggtggcctccggaatggcgctgcatttttctggcggctgctctagattgctcgtcactgttgacctcaacctcacgaatgccgagtttattcagttctacttcatgtacgggtgcctgattacccccaacaatcgtaaccagggagttctcctggagtattctgtgaatggggggattacctggaatttgttaatggagatcttctacgaccaatactccaaaccaggctttgtaaatatcctcctcccccccgatgctaaagagattgctacaaggtttaggtggtggcagcccagacacgacggactggaccagaacgactgggctattgataatgtgctgattagtggaagcgccgatcaacggactgttatgcttgataccttctcttcggcacccgtcccccagcacgagcggagccctgccgatgccggtccagttggtcgaattgcgttcgacatgtttatggaggataagacctctgtgaacgagcactggttattccacgatgattgtacggtggagagattttgcgatagtcccgacggagtcatgctctgtggttcacatgacgggcgggaggtctatgcggtgacgcacgatctgactcctaccgaggggtggattatgcaattcaagatttcagtaggctgtaaggtctccgagaaaatcgcccagaaccagattcacgttcaatacagcacagattttggcgtgtcttggaactatctggtccctcagtgccttcctgcggatcctaagtgcagcggctccgtgagtcagccctctgtattcttccctaccaaaggctggaaacgcattacctaccccctacccgaatcactggtcggaaacccagtaaggttccgcttctaccagaagtacagtgacatgcaatgggccatcgataatttctatctgggtccaggctgtttagataactgtcgcggtcacggtgactgtctgagagagcagtgcatctgcgaccctggctacagcgggccgaattgttacctgacccacaccctgaaaacattcctaaaagagaggtttgactcagaagagatcaagccagatctgtggatgtccctggagggaggctccacctgcactgaatgcggcatacttgctgaagataccgcactgtattttggtggaagcaccgttaggcaggccgtcacgcaggatctcgatttacggggagccaagttcttacagtactgggggcgcatcggttccgagaataatatgacaagctgccacaggcccatctgcagaaaggaaggggtcttactcgactacagtactgatggcgggatcacctggacactgctacacgaaatggattatcagaagtatatctcagtcagacacgactacatcttacttcctgaagatgccctgaccaatacaacgcggctacgttggtggcaaccttttgtcatctcaaatgggatcgtggtttcgggcgtggagagggcccagtgggctctcgacaatatcctgatagggggagccgagataaatcccagccagcttgtggacaccttcgacgatgaaggcacctcacatgaagaaaattggtcattctacccaaacgccgtccgaaccgccggattctgcggcaacccgagtttccatctctactggcccaacaagaagaaggacaagacccacaatgccctgtcatctcgagaacttattatccagcccggttatatgatgcagtttaaaattgtcgtgggctgtgaagccacatcatgtggcgatctgcattcagtcatgttggagtacaccaaagatgctagatccgactcatggcagctcgtccaaacacaatgcctcccatcttcgagtaattctattggctgcagcccctttcagttccatgaagcaaccatctacaatagcgtaaacagctcaagctggaagcgcattactatccagctccctgatcatgtgtcaagctccgctacccagttccggtggatacagaaaggggaagaaactgaaaaacagagctgggctatcgatcatgtgtatatcggggaagcttgcccgaagctgtgcagcggccatggatactgtactacgggggcgatttgcatctgcgacgagagcttccagggggatgactgctcagttttctctcacgacttgccctcgtatatcaaagacaactttgagtcggctcgagtgacagaggccaattgggaaacaatacagggcggtgtcatcggaagcggatgcggacagctcgctccgtacgctcatggcgattcactgtattttaatggctgtcaaattcgccaggccgccaccaagcctctagacttgacccgagcgtcaaaaattatgttcgtactgcagatcggatcaatgagccagaccgattcatgtaactcagatttatcaggccctcacgcagtggacaaggcagttttgttgcagtatagcgtaaacaatggaattacatggcatgttatcgcccagcaccaacctaaggattttacacaagcgcagagggtatcttataatgtgccgctggaggctaggatgaaaggggtgctgctgcggtggtggcagcctaggcacaatggtacagggcacgaccagtgggctctagaccacgtggaggtggtgctgttttccactcggaagcaaaactacatgatgaattttagtagacagcatggcttaagacacttctataatcgcagaaggcggtccctgcgcagatacccttag

SEQ ID NO: 26101 - DNA, 2934 bp, synthetic construct
  misc_feature 1..2934: note = Description of Artificial Sequence: Synthetic coding sequence
  source 1..2934: mol_type = other DNA
atgtgcagcggccacggccggtgcatccagggcaactgcgtgtgcgacgagcaatggggcgggctttactgtgatgacccagagacctctctccccacgcaacttaaggacaacttcaatagagcaccaagctcgcagaactggctcacagtcaacggaggaaaactgtcgacagtatgtggcgcagttgcatccggaatggctctccatttctccggcggctgttcgcgcctgctggtgacagtcgaccttaatttgacaaacgcagaattcatccagttctatttcatgtacggctgtctgatcacgccaaataatcgaaatcagggcgttcttctggaatactctgtaaacggcgggatcacctggaatcttctgatggaaattttttacgaccaatactctaagccagggttcgtaaacattctgttgccgccagacgcaaaggaaatcgccactcggttccgctggtggcagccccgccatgacgggctggaccagaacgattgggctatcgacaatgtgctcattagtgggagtgccgaccagaggaccgtcatgctcgacacgttttcttccgccccggtgccacaacacgagcggtcaccagccgatgcaggccctgtgggtcgcattgctttcgatatgttcatggaggacaaaaccagcgtgaatgagcattggcttttccatgacgactgcacagtggagcggttctgtgactccccagatggcgtgatgctgtgcgggagccacgatggtcgagaggtttacgctgtcacccacgacctgacaccgacagaagggtggataatgcagtttaagatctctgtggggtgtaaggtgtcagagaagatcgcacagaatcaaattcacgttcaatattccacagatttcggggtgtcatggaactatctggttcctcagtgtctgcctgcggaccccaagtgttcaggatctgtatcccagccttcagttttcttccctaccaaggggtggaaacgaatcacataccccctacctgagtccctagtcggaaacccagtgcgttttcgcttctaccaaaagtattctgatatgcagtgggccatagataacttctatcttggacccgggtgtttggacaattgtagaggccatggcgattgcctccgcgaacagtgcatctgtgaccccggatactcgggcccgaactgttaccttacgcacactttgaagacttttctgaaagaaaggttcgacagcgaagaaataaagcccgacctgtggatgtcccttgaagggggctcaacatgtacagagtgcggcatcctggctgaggatacggctctgtatttcggaggcagtacagttaggcaggccgtgacccaggacctcgatctgagaggggctaaattccttcagtattggggaaggatcgggtctgagaataacatgacatcctgtcatagaccaatctgcagaaaggagggggtgctgctggactatagcactgacggaggaataacatggacgttactgcatgagatggactaccagaaatacatctcagtgaggcacgactatatccttctccccgaagacgctctgacaaacacaacccgcctcaggtggtggcagcctttcgtgatctccaatggcatcgtagtctctggagtcgaacgggcacaatgggcactggacaacatccttattggtggcgccgagattaatccatcgcaactggtggatactttcgacgatgagggtacctcacacgaagagaactggtccttttacccaaacgctgtgcggaccgcaggattttgcggaaacccatcattccatttgtactggccaaataaaaaaaaggataagacacataatgccttaagtagcagggaacttattattcagccaggctacatgatgcagttcaagattgtcgtcggatgcgaagcaacctcctgtggcgacctgcacagcgtaatgctggagtacacaaaagacgcccggagcgattcttggcagcttgttcagacccagtgcctcccgagctccagtaactcgattggatgttccccatttcagttccacgaggcgacaatctataactcggtgaatagcagttcttggaagcgtataacaattcagttaccagaccacgtttccagttcagcaacgcagttccgatggatccagaagggggaggagaccgagaaacagtcttgggcgattgatcacgtctacataggagaagcatgtccaaaactttgctctgggcatggatattgtacaactggtgcaatttgcatttgtgacgaatctttccagggagacgactgctccgtcttctctcatgacctcccctcttacataaaagacaactttgaaagtgccagggtcactgaggccaactgggagacaattcagggaggtgtgattgggtctgggtgtgggcagctcgctccttacgctcacggtgactctttatacttcaacggctgccaaatccggcaggccgcaacaaagccactagatctgacgagggcctctaagataatgtttgtgctgcagatcggttcaatgtcccagaccgatagttgcaatagcgatctctcgggccctcacgcagtggataaggctgttctccttcagtatagtgtcaacaatggaatcacttggcacgttatcgcccagcatcagcctaaggacttcacacaagcacaaagagtgagctacaatgtgccgctggaagctcggatgaagggggtgctgctcaggtggtggcagccccgccacaacgggactggccatgatcagtgggctttggaccacgtggaagtcgtcctcgtgacgacccggaaacagaactacatgatgaatttttcccgccagcacgggctgaggcacttctataataggcgccgccgcagcctgaggcggtatccttag

SEQ ID NO: 26102 - DNA, 10383 bp, synthetic construct
  misc_feature 1..10383: note = Description of Artificial Sequence: Synthetic coding sequence
  source 1..10383: mol_type = other DNA
atggagcggagcggctgggcccggcagaccttcctgctggccctgctactgggagccactctgcgagcgcgagccgcggctgggtattatccgagattcagcccctttttttttctctgtacacaccacggcgagttggagggcgacggggaacagggcgaggtcctgattagcttacacatcgccggcaatccaacatactacgttcccggccaggagtaccatgtaactatatccacaagtactttctttgacggtttgctggtgaccggcctgtatacctccaccagtgtacaggctagtcagtctatcggcggttctagcgcatttggatttggaatcatgtcagaccaccaattcggaaatcaatttatgtgtagtgtggttgcgtctcacgtgtcccaccttcctactacgaacctgagtttcatatggattgcacctcctgccggtactggatgtgtgaattttatggcaaccgctacccaccggggacaggttatctttaaggacgccttggcacagcaattatgcgagcagggagctcctactgatgtgaccgtccacccacacctggcagagatacatagtgatagcatcattctgcgcgatgacttcgatagctaccatcagctccaattgaatcccaacatctgggtggaatgcaacaactgcgagaccggtgagcaatgcggagcgattatgcacggcaacgccgtcacattctgtgagccctatggcccaagggaactgatcacgacgggcttaaatactaccaccgcttctgttctgcagttttccatcggtagtggctcgtgtcggttcagttactcagatcccagcatcatagtgctctacgcgaaaaataatagtgccgactggatacagttggaaaagatacgcgcaccatccaatgtctctactattattcacattttataccttcctgaagacgcgaagggagagaatgtccagtttcaatggaaacaagagaacttacgagttggtgaggtctacgaagcctgctgggcactggacaatattttaataattaatagcgcacaccgtcaggttgttttagaggactccctcgaccccgttgatactggtaactggctgttcttcccaggcgctaccgtcaaacacagctgccagagtgatggaaattctatttattttcatggcaacgaggggagtgagtttaatttcgccactacacgcgacgtcgacctgtcgactgaggatatccaggagcaatggtctgaagagttcgagtcccaacccaccggatgggatgtcttaggggccgtgatcggcaccgagtgcggaactatcgagtcaggactgtcgatggtattcctgaaggatggtgagaggaaattgtgtacaccttccatggacaccaccggttatgggaacctcaggttttatttcgtaatggggggaatctgcgacccaggcaactctcacgagaatgacattattctctatgccaaaatcgaagggagaaaggagcacattacccttgataccctcagctacagtagctacaaggtgcccagtcttgtttccgtggtaattaacccagagttgcaaacaccagcaacgaagttttgcttacgtcaaaagaaccatcaggggcataacagaaatgtgtgggcagtggatttcttccatgttctcccagtgctcccctccacaatgtcccatatgatccaattttctatcaatctagggtgcggaacccaccagccgggcaactctgtgtctctggagttttctaccaaccacgggaggtcttggtcactccttcacacagagtgtttgcccgagatctgcgctggcccccacctgccgcactccactgtgtattcttccgagaactactctggctggaaccgtattaccattcctctgcctaacgctgccctgactcggaatacccggatccggtggcggcagacgggacccatcttggggaacatgtgggctatcgataacgtatacattggtcccagttgtctgaaattttgctctggccgcggccaatgcacaagacacggctgtaaatgcgatccagggttttctgggcctgcatgtgagatggcctctcagaccttccccatgtttatttccgagtcttttggttcttctcggttgagctcctatcacaacttttactctatccggggagctgaagtcagctttggttgtggtgttcttgcatcagggaaagctctggttttcaacaaggacgggaggcggcagctgattacttcattccttgattcttcgcagtctaggtttctccaattcacccttagactcgggagcaaaagcgtactgagtacctgccgggcaccggaccaacccggggaaggagtgcttttacactactcgtatgacaatggcataacatggaagctgttggagcattactcatacctgagctaccacgagccacgaatcatcagcgttgagctgccgggagatgccaaacagttcggtattcagtttagatggtggcagccttatcacagctctcagagagaggacgtgtgggcaattgatgagattataatgaccagtgtgctctttaattctatttctcttgactttactaacctagtggaagtgacgcaaagcctcggattttacttggggaatgtgcagccttactgtgggcatgactggactctgtgcttcactggggactcaaagctcgcatcatcaatgcggtacgtggaaactcaatccatgcaaataggcgctagttacatgatacagttcagtctggtgatgggctgcggccaaaaatacacgccacatatggacaatcaggttaagctggaatacagtaccaatcatggactaacatggcacttggtgcaagaggagtgccttccaagcatgccgagctgtcaggagtttacgagcgcctccatctaccacgctagtgaatttacccagtggcggcgagtcatagtgctgcttccccagaaaacctggtctagtgcaacaagattccggtggagccagtcttactataccgctcaggacgagtgggccctggacagcatctacatcggacaacaatgtccgaacatgtgctccggccacgggagctgtgatcacggtatttgccgatgtgatcagggatatcaagggactgaatgtcatcccgaagctgccttgccctccaccatcatgagtgactttgaaaaccaaaacggatgggagagtgactggcaggaagtgatcgggggcgagatagtcaagcccgaacagggatgtggcgtcatttcctcagggtccagtctgtactttagcaaagccggcaaacgccagttagttagttgggatcttgacacttcgtgggtggacttcgtgcaattctatatccaaattgggggagagtcagcatcttgtaacaagcccgacagcagagaggagggcgtactgttgcagtattcgaataatggtggtatacaatggcatctcctggctgagatgtacttctcagattttagcaaaccacggtttgtgtacctggagctgccagcagcagctaagactccctgcacaagattccgctggtggcagcccgtcttctccggcgaggactatgaccaatgggcagttgatgatattataatcctgtccgaaaaacagaagcagatcattccagttatcaatccaaccctcccccaaaacttctatgaaaagcccgccttcgattacccaatgaaccaaatgagcgtctggttgatgcttgccaacgaagggatggtgaaaaatgaaacattctgtgccgccaccccatcagctatgatttttgggaaatctgatggagaccgcttcgcagttacaagggatctgactctgaagccgggatacgtactgcagttcaagctcaatataggatgtgcgaaccagttcagctctactgcacccgtgctgctgcaatacagtcacgatgccggcatgagctggttcttagtgaaggagggatgctaccccgcatcagctggaaagggatgcgaaggcaactctcgagagctttccgagcccacaatgtaccacactggggattttgaggaatggacccgaatcacaatcgtcataccaagaagcttggcaagttccaagactagattccgctggattcaagagagcagctctcagaaaaatgtgcctccattcggtcttgatggagtttatatctcagagccgtgtcctagttattgcagcgggcacggggattgtatatccggcgtgtgtttctgtgacctgggttataccgcggcccaggggacttgtgtgagtaacgttccaaatcataatgagatgtttgacagatttgaggggaagctcagtccactctggtataagataactggggcccaggtgggcactggctgtgggacactgaatgatggaaagtccctgtacttcaacggcccaggaaaacgggaggcacgcacggttcctctggatacccgtaacatcaggcttgttcagttctatattcagattggatccaaaacgtctggtataacgtgcataaaaccaaggacacgcaatgagggcctcattgtccagtactcaaatgataatgggatcctgtggcacctgctgcgagagttggacttcatgagctttttagaacctcagatcatttcaatagatcttccccaagacgccaaaactcctgctactgcatttcggtggtggcagccgcagcatggtaagcactcggcccaatgggcactagacgatgtcctgattggaatgaatgactccagtcaaacagggtttcaggacaagttcgatggctcaatcgatcttcaggcaaactggtatagaattcaggggggacaggtcgacatcgactgtcttagcatggacaccgcactcatctttactgagaacatcggaaagccgcggtacgccgaaacttgggacttccacgtgagcgccagcaccttcctgcagtttgaaatgtccatgggatgttccaagcctttcagcaacagtcattccgttcagctccaatattccttgaataacggtaaggactggcacctagtgactgaggagtgtgttccacccacaatcggctgtctccactatacagaatcttccatctatactagcgaaaggttccagaactggaaacggataactgtgtatttacccctatccaccatctccccacgtacccggttccgctggattcaagctaactatactgttggagcagacagctgggcgatcgataacgttgtactcgcctccggttgcccttggatgtgtagcgggcgcgggatctgcgacgcgggccgatgcgtctgcgatcgcggctttggtggaccatattgcgtcccggttgtccctctgccttccatactgaaggacgatttcaacggcaatttgcacccagacctgtggccagaagtttatggcgccgaacggggaaatctgaacggcgaaaccatcaagtctgggacatcattgatctttaagggggaaggtctgaggatgttaattagccgggaccttgattgcacgaatacaatgtacgtgcagtttagtttgaggtttattgccaagagtactcctgagaggagtcactccattctgctgcaattcagtataagcgggggtataacatggcacctcatggatgagttttactttccccaaaccaccaacatcttatttatcaatgtgcccttaccctataccgctcagacaaatgccacaaggttccgattgtggcagccttacaacaatggaaagaaagaagaaatttggatcgtcgacgacttcatcatcgacggcaataacgtgaataacccggtcatgctgctggacacatttgactttgggccgagagaggataactggttcttctacccaggcggcaacatcggcctgtattgcccctattcttccaagggagctccagaggaggactccgcaatggtgtttgtgtccaatgaggttggcgaacactctatcaccacccgggatctgaacgtcaacgagaacacaatcatccagttcgagattaatgtcgggtgctccaccgatagttcaagcgccgaccccgtgcggcttgaattcagtcgcgatttcggtgctacctggcatctattgctgccactctgttaccacagttcctcacacgtttcctcgctgtgctcgactgagcaccacccttcgagcacttattacgccgggacaatgcagggttggcgtagggaggtggtccatttcgggaagttacacttgtgcggtagcgtccgttttcggtggtaccagggattctatccagcaggctcccagccagtgacatgggccattgataacgtgtacattgggccccagtgcgaagaaatgtgcaacggccagggtagctgcattaatgggacaaagtgcatttgcgatcctgggtattcaggcccaacctgcaagattagcaccaagaacccggatttcttaaaagacgactttgaaggccagctggaatctgataggttccttcttatgagcggggggaaaccctccagaaagtgcggaattctcagttcgggtaataatctgttctttaacgaggatgggcttaggatgctcatgacacgcgatctggacctgtctcatgcacgcttcgtgcagttcttcatgcgcctggggtgcgggaagggggtccctgaccctagaagccagcctgtcctcctgcagtactctcttaacggcggactgtcttggtccctcttgcaggaattcctcttctctaactcatcaaatgttgggagatacattgcccttgagatacctctgaaagccagatccggatctacaaggctgaggtggtggcagccctccgagaacgggcacttttactcgccttgggtcattgaccaaatcctgatcggcggcaacatctccgggaatacagtccttgaagatgatttcaccaccctggattcccgcaagtggcttctgcatccggggggcactaagatgcctgtgtgcgggtcaaccggcgatgccctggtgtttatcgagaaagcatctactagatacgtggtgtcgacagacgtcgccgtgaatgaggactctttcctgcagattgactttgccgcatcttgcagtgtcaccgactcctgctacgccatcgagttagaatatagtgtggacctgggcctttcatggcacccccttgtaagggattgtctgcccacgaatgtggaatgcagtcggtaccacttacagcgaatcctggtgtctgacaccttcaataagtggaccaggattaccctcccattgccaccatacaccagatcccaggcaaccagatttcgttggcatcagccagcaccatttgacaaacagcaaacgtgggccattgacaatgtatacataggcgacggatgcatcgatatgtgttcaggtcacggaaggtgcatccaaggtaactgtgtatgtgatgagcaatggggcggcctctactgcgacgacccggaaacgtctcttcccacgcagctcaaggataacttcaaccgcgcccccagctcacaaaattggttaacagtcaacggcggaaagctgtcgactgtttgcggggccgttgcttccggcatggcactccactttagtggcggttgcagccgactgctcgtgactgtagaccttaacctcactaacgccgagttcatccaattctactttatgtacggatgcctcatcacccccaataatcgcaatcagggagtcctcctggaatattccgtgaatggcggaatcacatggaacttacttatggaaattttctatgaccagtattccaaaccggggttcgtgaacattttgctgcctcctgacgccaaggagatcgcaacacgttttcggtggtggcagccgagacacgacgggctggatcaaaatgactgggccattgataacgtgctgatctctggatcggccgatcaaaggactgtgatgctcgacacattcagctcagccccagtgccccagcacgaaagaagtccagctgatgccggcccagtcgggcggatcgcttttgacatgtttatggaggacaagaccagcgtaaatgagcactggctattccacgacgactgtacagtagagcggttctgcgactcaccggacggggttatgctctgcgggagccatgacgggcgggaggtgtatgctgtgacacacgacctcacacccacggaaggttggatcatgcagttcaaaatttccgttggatgtaaagtctctgagaagatcgcccaaaatcagatccatgtgcagtactccacagactttggagtgagttggaattatctggtgccccagtgtcttcccgccgatcccaagtgttccgggtcggtgagtcagccgagcgtgtttttccccacaaagggatggaaaagaattacgtatcccctgcccgagagcttggtgggaaaccctgtgcggttccgattttaccagaaatactcagacatgcaatgggctattgacaacttctaccttggacctggctgcctggacaattgtcgcggccacggcgactgccttagggagcagtgtatttgcgaccctgggtactcggggcctaattgttatctgactcacaccctgaaaaccttcctgaaggaacgttttgattcagaagaaattaagccagacctgtggatgtccctcgagggggggagtacctgcaccgagtgcggaattttggccgaagacacggccctttattttggtgggtcaacagtgagacaggccgtgacccaggacctggatctgcgcggtgcaaagttcttgcagtattggggcagaattggatctgagaacaatatgactagttgccacagaccaatctgccgcaaggagggggtgctgcttgactacagcaccgacgggggtataacttggaccctactccacgagatggactaccagaagtatatttctgtgcggcatgactacatcctcctacccgaagatgccctgaccaacacaacccgcttgagatggtggcagccatttgtaatctcgaatggcatagtggtcagcggggtagaaagagcacaatgggccctggacaatatccttattggcggcgcagagattaatccgagccagcttgtggacacctttgatgatgagggcacttcacatgaagaaaattggtcattctatcctaacgctgtgcgcaccgccggcttctgtggaaacccatcatttcatctttactggcctaataaaaagaaggacaaaactcataatgccctgagttcccgggagctgatcatccaacctggatatatgatgcagtttaagattgtggtgggatgcgaagcaacatcgtgtggtgacttacattctgtgatgcttgaatacacaaaggacgccaggtcggattcgtggcagttggtacagactcagtgcctgcctagttcctccaattctattgggtgctcgccctttcaatttcatgaggcaacaatttataactccgtgaactcctcgtcttggaaaagaattacaatccagctgcccgaccacgtcagcagttccgcaacgcagtttcgatggattcagaagggagaagaaacagagaagcagtcctgggcaattgatcatgtctatattggagaggcatgtcccaagctctgcagtggccacggctactgcacgaccggcgccatctgtatttgcgacgaaagctttcaaggcgacgattgttccgtttttagtcatgacctgccatcgtacataaaggataattttgagagtgcccgtgttacagaagccaactgggaaacaattcaagggggagtgatcggcagcgggtgtggacagctggccccttatgcccatggagatagtctatactttaatggatgccaaatccggcaagcagcaacgaaacccctggatctcactcgcgcatccaaaatcatgtttgtattacaaatcgggtctatgtcgcagacagattcatgcaattctgacctgagcggcccccatgccgtggataaggcagtcttgcttcagtactccgtcaacaatggcataacttggcacgtgatcgcgcaacatcagccgaaagactttacacaagcacaacgggtgagctacaatgtgccactggaggcgcgcatgaaaggtgtcttactccgctggtggcagccacgccataacggcacaggccatgaccagtgggctctggatcacgtggaagtggtcctggtatccacacggaagcagaattacatgatgaattttagccggcagcatggcctacggcacttctataatcgccggagacgctctttgagaagatatccatag

SEQ ID NO: 26103 - DNA, 10284 bp, synthetic construct
  misc_feature 1..10284: note = Description of Artificial Sequence: Synthetic coding sequence
  source 1..10284: mol_type = other DNA
atggagcggagcggctgggcccggcagaccttcctgctggccctgcttttgggtgctactctccgagcacgggctgctgcaggatattatccaaggttttctccttttttctttctctgcacccatcatggggagctggagggagatggagagcagggggaggttttaattagtctgcatatcgccgggaatcctacctactacgtgcctggccaagaataccatgtgactataagtacctccacattcttcgatgggctcctcgtaacagggctgtacaccagtacgtccgtgcaggccagtcaatctattggcggttcttcagccttcggatttggcatcatgtcagatcatcagttcgggaaccagtttatgtgtagcgtggtcgcgagccacgtgtctcatctgcccactaccaatctgtctttcatttggattgccccaccggccggcaccgggtgtgtgaactttatggccacagctactcatcgtgggcaggtgatttttaaagacgccttggctcagcaactgtgtgaacagggggcacccactgacgtgacagtccatcctcatctggccgagattcactcggactcgatcatactcagagacgattttgactcctaccaccagctgcagctgaatccaaacatctgggtagagtgcaacaattgcgagacaggagaacagtgtggtgcaatcatgcatggaaacgccgtgacattctgcgagccctatgggccgagagagctcattaccacaggactgaatacaaccacagcgagtgtgctccagttctcgatcgggtctggttcttgcaggttttcatattctgatccgtctataatcgtactgtatgccaagaacaattcagccgactggatccagctggaaaagatcagagcaccatctaacgtgtctactattatacacatcctgtacttgccagaggatgctaagggagaaaacgtgcaatttcagtggaaacaggaaaacctgagggtgggtgaagtgtacgaggcttgctgggctctagacaatattctgatcatcaattccgcacatcgtcaagtagtcttagaggactccctggaccccgtcgacacgggtaattggctctttttccctggagcaacagtaaagcactcatgccagtctgatggaaactccatctatttccacggaaacgaaggttctgagttcaactttgctacgacacgcgacgttgatctcagtactgaagatatacaagaacagtggagcgaagaatttgagtcccagccgactggatgggatgtacttggtgctgtaatcggaacagagtgcggtaccatagagagtgggttaagcatggtgtttctcaaagacggggagagaaagctgtgcactcccagcatggataccaccggctacgggaacctccgattctacttcgtaatgggcggcatatgcgatccaggcaactcccatgagaacgatataatcctgtatgccaagatcgaaggaaggaaggaacacatcacactcgatacccttagttatagttcctacaaggtaccgtccttggtgtccgtggtgatcaatccagagctgcagactcccgccacaaaattctgtctgaggcagaagaatcaccagggacataaccgcaatgtatgggcggtggacttcttccacgtcctccctgtcctgccctcaactatgtcacacatgattcagttctcaatcaatctcgggtgtggtacacaccaaccagggaactccgtgtcactcgagttctctaccaaccacggccgcagttggtcactgcttcacaccgaatgtctcccagagatctgtgccggcccacacctgccacattctaccgtgtactcttcagagaactactccggctggaaccgcattactatcccactcccaaatgccgccctgacccggaacacccggattaggtggaggcaaacaggtcccatcctgggcaatatgtgggctattgacaatgtctatataggaccatcttgtctgaagttctgctcggggagggggcagtgtacgcgtcacggatgcaagtgtgatccagggtttagtggcccggcttgtgaaatggccagccagacgtttccgatgttcataagcgaatcctttggaagtagtagattatccagctatcacaatttttatagtattagaggagctgaggtatctttcggatgcggcgtgctggctagtggcaaggcgctcgtgtttaataaggacggaagacgccagctgattacctccttcttagacagcagtcagtcaaggttcttacagtttaccctgcgcctcgggtccaagtccgtgctatccacctgcagagcccccgaccaaccaggggagggcgttctgctgcactatagttatgataacggaattacgtggaaattgctggaacactattcatatctgagttatcacgagcctcgtatcatttctgtggagctgcctggggacgccaaacaattcggaatccaatttcgctggtggcagccctaccacagtagccagagggaagacgtctgggccatagacgaaattattatgacaagcgtgctatttaactcaatctcactcgatttcacaaatctggtcgaggtgacccagtccctgggattctacctggggaatgtgcagccgtactgcgggcatgattggaccctttgttttacgggggactctaaactggctagtagcatgcgatacgtggagacccagtctatgcagatcggcgcttcatacatgattcagtttagcctggtaatgggctgcggacagaagtacacccctcacatggacaatcaagtcaaactggagtattccaccaatcatggtctaacttggcacctggttcaggaagagtgtctgccaagcatgcctagttgtcaggaattcacctccgcatcaatctatcatgcgagcgagtttacccagtggcgccgggtgatcgtgctgcttcctcagaagacctggtcttctgccacccggtttaggtggtctcagagttattatacagctcaagacgaatgggcacttgactccatttacattggacaacagtgtcccaacatgtgctctggccacggaagctgcgaccacggcatatgtcggtgtgatcaggggtaccagggtaccgaatgccatcctgaagcagctctgcccagtacgatcatgtcagactttgagaaccagaacggttgggagagcgattggcaagaagtcattggaggagagatcgtgaagccagaacagggctgtggggtcatctcttccgggtcaagcctgtatttttcaaaagccggcaagcggcagcttgtatcgtgggatctggacacttcatgggtcgactttgtgcaattctacatccaaatcggaggcgagagcgcgtcttgcaacaaacctgacagtagagaggaaggtgtgttgttgcaatacagcaacaatgggggcatacagtggcatctgctagctgaaatgtatttttcagatttcagcaaacctcgctttgtttacctcgagctccctgccgctgccaagaccccttgcacacgcttccggtggtggcagcccgtgttctcaggggaggattatgaccagtgggcagtcgacgacattattattctgtccgaaaagcaaaagcaaataattccagttataaacccaactcttcctcagaatttttatgaaaagcctgctttcgattatcctatgaatcagatgtccgtctggttgatgctcgcaaatgagggcatggtgaagaacgaaacgttctgtgccgcgacccccagcgccatgatctttgggaagtcagatggcgatcgctttgccgttactcgggacctcaccttgaaaccaggctacgttctccagtttaagctgaacatcggttgcgcgaatcaattctcctccactgcccccgtccttttgcagtactcgcacgacgctggcatgtcatggtttctcgttaaggagggctgctatcctgcatcagctggcaaaggatgtgagggtaatagccgtgaactgtccgaacccaccatgtatcatactggagactttgaggaatggacaagaataaccattgtgattcctcgatccctagccagctcaaagaccagatttaggtggattcaggaaagctccagtcagaagaacgtccccccattcgggctggatggtgtatacatctccgagccctgcccatcatactgtagtgggcacggcgactgcattagcggcgtgtgcttctgcgacctggggtataccgccgcccaagggacctgcgtgtctaacgtgccaaaccataatgagatgtttgatcgctttgaaggtaagctgtctccactatggtataagatcactggcgcccaagtgggaacaggctgcgggactctgaacgacggcaagtccctgtatttcaatgggcccggcaaacgcgaggcccgaacagttcccctggatactcgaaacatcaggctggtgcagttttatattcagattggaagcaagacaagtggaatcacttgcatcaagcctagaaccaggaatgagggccttatcgttcagtactctaatgacaatggcatcctttggcacctgctccgggaactggactttatgtcatttctcgagccacagatcataagcatcgatctcccacaggatgccaagactcccgcaacagctttcagatggtggcagcctcagcacggaaaacactccgcccagtgggcactagacgatgtgctcatcggcatgaatgattcttcgcaaacgggctttcaggacaagttcgacgggtcgatagatttacaggcaaattggtaccgcattcagggcggacaggtagacatcgactgcctgagcatggataccgcattgatattcactgaaaacatcggtaaaccgcgctatgcagaaacatgggatttccacgtttccgcttcaacttttctgcagtttgagatgagcatgggctgttccaaaccgttttcaaactcccattccgttcagctgcagtactccctgaataatggcaaagactggcacctggtgacagaagagtgtgtacccccaactattggttgccttcattatactgaatcctccatctacacatccgagcggtttcagaattggaagcgaatcacggtgtatctgcccctcagtacaattagtcctagaacccgttttcgctggatccaggccaactacactgtcggtgccgattcttgggcgatcgataatgtggtgctcgctagcgggtgcccctggatgtgttctgggaggggcatctgcgacgcaggccgctgtgtatgtgaccggggctttggggggccctattgcgtccccgtggtgccattgccaagtatcttgaaggacgacttcaacggtaacctgcatccagacctctggccagaagtgtatggcgctgagcgtgggaacctgaacggcgagaccatcaagagcggtacatcgttgatattcaagggggaaggtttgcggatgctgataagccgggatctggactgcacaaacacaatgtatgtacagttctctctgcgattcattgcgaaatctaccccggaaaggagccatagcatattgctccagttctccatctctggcggaatcacatggcatcttatggacgagttctacttccctcagactaccaacattctgttcatcaatgtgccactgccctatacggctcaaaccaacgccacacgttttcggctttggcaaccttataacaatggaaagaaggaagagatatggatagttgacgattttatcatcgatgggaataacgtgaacaatccggtgatgctgctggacacctttgattttggcccgagagaggacaattggtttttttaccctgggggaaacatcggcctatactgtccgtactcctcaaagggtgccccagaggaggactccgcaatggtgtttgtttctaatgaagtgggcgaacactccatcacaactagagatctgaacgtcaacgagaataccatcatccagttcgagatcaacgtcggctgttcaacagattcctcatcagctgatccagtgagactggagtttagcagggatttcggcgcaacatggcacctgctcctcccattgtgctatcatagttccagtcatgtgagtagtctgtgtagtaccgagcaccatccttcttcaacgtactacgcaggcaccatgcaggggtggaggcgcgaagtcgtacactttggcaaactgcatctgtgtgggagtgtgcgcttcaggtggtaccaaggcttctatcccgcagggtcgcagccagtcacctgggccattgacaacgtttacataggaccccagtgcgaagagatgtgtaatgggcaaggtagctgtattaacggcaccaagtgcatctgtgaccccggctattcaggcccaacgtgtaagatcagcaccaagaatcccgactttctgaaggatgactttgagggacaactcgagagtgaccgctttttgctcatgtcaggtggtaagccttcccgtaagtgtggtattctcagttccggaaataatctgttttttaacgaggatggcttacgcatgctcatgacccgagacctcgacctgtctcacgctagatttgttcagttctttatgaggctaggctgcggcaaaggcgtgccagatccaagaagtcagccagtcctgcttcagtactcactaaatggcggtctgtcctggtctctcctgcaggagttcctgttcagcaactcatcgaacgtgggaaggtatattgcactcgaaataccattgaaagcccgatccggaagcacgcgcctccgctggtggcaaccttctgagaacggccatttctattcaccatgggtcatcgatcagatcctcattggggggaacataagcggaaacaccgtattggaggatgatttcactacactggatagtaggaaatggttactgcacccaggaggcactaaaatgcccgtgtgcgggtcgacaggagacgctttggtatttatagaaaaggccagtacacgctacgtagtgtctaccgacgttgctgtgaacgaggatagcttcctgcagattgattttgccgcctcctgtagcgttacagattcttgttacgccattgagttagagtactctgtggacctgggcttgtcctggcatcctctggtacgtgactgtctacccactaacgtcgagtgttcaaggtaccacctccaacgcattttggtgtctgacacattcaacaaatggactagaattacccttcctctgcctccatacacccggtcacaggcgacgagattccggtggcatcagccagcccccttcgacaagcagcagacatgggcaatcgacaatgtgtatattggagatgggtgtatcgatatgtgttccggacacgggagatgcattcaaggcaactgtgtttgtgacgagcagtggggaggactttattgcgatgatcccgagacatcactgcctacccagctgaaagacaatttcaacagggccccctcgtcccagaactggctgacagtgaatggaggaaagttaagtaccgtctgcggagccgtcgccagcggaatggcgctgcattttagcggaggttgttctcggttgctggttactgttgatctgaatttaaccaacgccgaatttatccagttttattttatgtacggttgcttgatcactcctaacaaccggaatcagggcgtgctactcgaatactctgtgaacggcggtataacttggaatttgctcatggagattttttacgaccaatactccaagccgggcttcgtgaatatcttgctgccccctgatgctaaggagatcgccacaaggtttcggtggtggcagcccaggcatgatggattggaccagaatgactgggccatcgataacgtgctaattagtggcagtgcagatcaaaggactgtcatgttggacaccttctcatctgcgcctgtcccacaacatgagcgaagccctgcggacgccggacccgtgggccggatcgcatttgatatgtttatggaggacaagactagcgtcaacgagcactggctgtttcatgacgattgcactgttgaaaggttctgtgacagccctgacggggttatgctgtgtggttcccacgatggcagggaagtgtacgcggttacacatgatctgactccaaccgagggctggatcatgcagttcaaaattagtgttggttgcaaagtcagtgaaaaaatcgcacagaatcagattcacgttcagtattctacagattttggggtcagttggaactatctggtgcctcagtgcctccctgcagaccctaagtgttccgggtcagtatcacaaccatccgttttttttcctacaaagggctggaaaagaatcacatacccattacctgaaagcctcgtggggaatccagtgagattccggttttaccaaaagtatagcgatatgcagtgggccatagacaatttttatctgggacccgggtgtcttgataactgtcgggggcatggcgactgtctccgagaacagtgcatctgtgatcctgggtacagcgggcccaactgttatttgactcataccttgaaaacttttttaaaagaacgctttgactccgaggaaattaagcccgacctgtggatgtccctagagggggggagtacctgtaccgagtgcggtatcttagcagaggacacggctctttacttcggaggttccactgtcaggcaggcagtgacacaagatctggatttacgcggcgctaaatttctgcagtactggggccggatcggcagtgaaaacaacatgacatcatgccacaggcccatctgtaggaaggagggcgtgcttttggattacagcaccgacggtggtattacatggacactgctgcacgagatggactaccaaaaatacatttccgtacggcatgattacatcttactacccgaagacgcgctcacaaatacaaccaggctaaggtggtggcagccctttgtaatatcgaacggcatcgtagtcagcggagtagagagggcacagtgggccttggataatatactgattgggggcgcggagattaacccctcccagctagtggacaccttcgatgatgaggggacgagtcacgaggaaaattggagcttctatcccaatgctgttcgcaccgccggcttctgtggcaatccctccttccatctgtactggccgaacaaaaagaaggacaaaacccataatgccttgtcttcgagggaattgatcatacagcccggttatatgatgcagtttaagattgtagtgggatgtgaagcgacatcctgcggcgacctacattctgtcatgctggaatacaccaaggatgctcgttcagactcatggcagttggtacaaactcagtgcctcccatcttctagcaactctatcggatgctccccctttcagttccacgaggcaacgatctataattctgtgaactccagcagctggaaaagaatcaccattcagctacccgaccacgtgagttccagcgcaacccagtttagatggattcagaagggggaggagaccgagaagcagtcctgggcaattgatcatgtttatatcggcgaggcctgcccgaaactgtgctcggggcacggatactgtacaacaggtgctatatgcatatgtgatgagtccttccagggcgatgattgttctgtgttctcacacgacttgccgtcttatattaaggataacttcgagagtgccagggtcactgaggctaattgggagaccatccaagggggggtgatcggaagtggctgcggacaactcgctccatatgcccacggggacagcctgtattttaatggctgccagattagacaggcggcaacgaagccgttggatttgacccgggcatcgaaaattatgttcgttttgcagatcggctcgatgtcacagacggactcctgtaactcagatctgtcaggtcctcatgccgtcgataaggccgtgctcctccagtatagcgtgaataatggcataacctggcacgtgattgcccaacaccagcctaaggattttacacaagcccagcgagtgagttataatgttccattggaggcccgtatgaagggagttctcctgaggtggtggcaaccgaggcataatgggacaggccacgatcagtgggcattagaccacgtggaggtggtactgtag

SEQ ID NO: 26104 - DNA, 1668 bp, synthetic construct
  misc_feature 1..1668: note = Description of Artificial Sequence: Synthetic coding sequence
  source 1..1668: mol_type = other DNA
atgaagaagcacgacttcgccgagaacctgcccagcagcctgctgataattatacttgtgatttttaccctctcaggaagtaagtttggcagggggactggactgactcagcctagccagcgtacctcagcaagaaggagctttggccgctccaaacgtttttctattactagaagccttgatgatctggagtctgctaccgtaagtgacggcgagctgactggagctgacctgaaggattgcgtgagcaacaacagcctgagctctaacgcctctttaccgtctgtgcaatcttgcagacgattgagagagcgccgagtggccagctgggccgtttccttcgagaggcttttgcaagaccccgtgggtgtgaggtactttagcgactttctccggaaggagttttctgaagagaacatactgttctggcaagcctgcgagtacttcaaccatgtgccagcccacgataaaaaagaactttcctatcgggctcgggagattttctctaaattcctttgctctaaggcaacaacaccagtcaacattgattctcaggcacagctcgctgacgatgttctgagggctccccatcccgacatgttcaaggaacagcagctccagatctttaacctgatgaagtttgactcatacactcggttcttgaaatctcccctgtaccaggaatgcatcctcgccgaagtggaaggcagggcccttcctgatagccaacaggtcccttcaagccctgcctcaaaacactccttaggttccgatcactctagtgtgagcacaccaaaaaaactttcaggaaaaagcaaatctggccgctcactcaatgaggagctgggagatgaggacagcgaaaagaaacggaaaggagccttctttagctggagtcggaccaggtcaaccggtcgatcacaaaaaaagcgcgaacatggcgaccacgcggatgatgccctgcatgcaaacggaggcttatgcaggcgggaatctcaaggtagcgtgtcatccgccggcagtctggatctgtcagaggcctgtaggactctggctcctgagaaagacaaagcgaccaaacactgttgtatccatttgcctgatggcacctcctgcgtggtagcagtgaaagcaggatttagtatcaaagatattctgagtggactctgcgagaggcacggcatcaacggggctgcggcagacctttttctggttgggggcgacaaacctcttgtgctgcatcaggatagctcaatcctggagagcagggatttaagactggagaagaggacgctttttcgcctggatctcgtccctatcaataggagcgtcggtcttaaggctaagccgacaaaaccagttacggaagtgcttcggcctgtagtggcacgatatggattggacctctctggcctgctagtgaggctcagcggcgagaaggagccgcttgatctgggagcccctatctctagcttggatggccagcgagtggtgctagaagagaaggacccctctcgcggcaaagccagcgccgacaagcagaagggagtgccggttaaacagaacacagccgtcaacagttccagcagaaaccactccgcgacgagttttctgtcgctgttcccaaagctgcgagctacagaacagatgactaatgtgggttgctag

SEQ ID NO: 26105 - DNA, 4131 bp, synthetic construct
  misc_feature 1..4131: note = Description of Artificial Sequence: Synthetic coding sequence
  source 1..4131: mol_type = other DNA
atgttccgggccggcgaggccagcaagcggcccctgcccggccccagcccaccaagggtgagaagtgtggaagtcgctcggggccgcgcgggttacggctttactctctctgggcaagcgccgtgtgtgttgtcttgcgtcatgaggggatctcccgccgactttgtgggacttagggcaggagaccaaatcctggctgttaatgaaattaacgtgaagaaggcttctcatgaggatgtggtgaaactaatcggcaagtgttcgggtgtgttgcacatggtcatcgcagagggtgtgggacggttcgaatcctgttcttccgacgaagaggggggactctatgaaggaaaaggctggctcaagccaaagctagacagcaaagcccttgggattaacagggcagaacgagtggtggaggaaatgcagagtggtggcatcttcaacatgattttcgaaaatccctcattgtgtgcaagcaactcagaaccgctaaaattaaaacagcgctccttgagcgaatctgccgccacccgtttcgacgtggggcacgagtctattaataaccctaaccccaacatgctgtctaaggaagaaatatctaaggtgattcatgacgattcagtgtttagcattggactggaatcccacgacgacttcgctcttgacgcctcaattctgaacgttgccatgatcgtcgggtatttgggctccatcgagctgccctccacgtcttccaatttagagtctgattctctgcaggctattcgtgggtgcatgcgcaggctgcgagccgagcagaaaatacatagcttggtgactatgaagattatgcatgattgtgtccagctgtctaccgacaaggccggagtcgtggccgagtatccagcggaaaagctggcattttctgcagtgtgccccgacgacagaaggtttttcggcttggtcacaatgcagaccaacgacgacggcagcctagcccaggaggaagaaggtgcactgaggaccagctgccacgttttcatggtcgaccctgacctgtttaatcacaagatccaccaagggatagccaggcgcttcggcttcgagtgcacagccgacccagatactaacggctgcttagagttccctgctagctccctgccagtgctgcaatttatctcagtcctgtatagagacatgggagagcttatagaaggcatgcgtgctcgggcgtttctcgacggagacgcagatgcacaccagaataattccacatcttcaaactctgactctggcatcggcaattttcaccaggaagaaaagtctaatagagttctcgtggtggaccttggcggctcctcgtcacgacacggcccggggggcagtgcgtgggatggcgtaggggggaggggagcccagccctggggggcgccgtggacaggaccattttgtccagaccccgagggttcacctccatttgaagccgcacatcagactgaccgtttttgggatcttaataaacacttagggcccgcttcacctgttgaagtgccaccggctagcctaaggtccagcgtgccaccatccaaacgcggtacggtgggcgcaggctgcggatttaaccaacgctggctccctgtgcatgtactcagggaatggcagtgcggtcacaccagtgatcaggatagctacaccgactccacagacggctggagtagcattaactgtgggacgttgcctccgcccatgagcaagatccctgccgatagataccgtgtcgagggtagcttcgcgcagccaccactaaatgctcctaagcgagagtggtctcgaaaggcttttggcatgcagtccatattcggaccccacaggaacgttcgaaagacaaaggaagacaagaaaggttccaagttcggccgggggaccggactcacccagccatcccaacggactagcgcacgacgtagcttcgggaggtccaagcggttctctattacgagatctctggacgatctcgagtctgccacggtaagtgacggcgaactgacgggcgctgatctaaaagattgcgtctcaaataactctttgtctagtaatgcatccttgcccagcgtgcagagctgccgaaggctcagagaacgaagggtggcgagctgggctgtgagcttcgagagactgcttcaagatccagtcggagtgcggtacttttccgattttttgcgcaaggaattttccgaagaaaacattctcttttggcaggcctgcgagtactttaatcacgtcccagctcacgataaaaaagagctgagttacagagctagggaaattttcagcaaattcctttgttctaaggcgacgactcctgtgaatattgactctcaggcccagcttgctgacgacgtgctgagggccccccaccccgacatgtttaaagagcaacagttgcaaatatttaatttaatgaaattcgacagctacactaggttcttgaagagtcctctgtatcaggagtgtatcctggctgaagtggaaggtcgggcactgccagactcacagcaggtgccttcctcacccgcttctaaacactccctgggcagcgaccacagttcagtaagcactccaaagaagctatctgggaagtcgaaaagcggacgttcactaaacgaagaactgggtgacgaggacagtgagaagaaacgcaagggtgccttcttcagctggtctcgcaccaggagtaccggacgttctcagaagaaaagagagcacggcgaccatgccgatgatgcactccacgcaaatggaggcctatgtcgtagagaaagccagggatccgtctcatcagccggtagtctggatctgtccgaggcctgcagaacactggctccggagaaagacaaggccacaaagcattgctgcattcacctgccagacggaaccagttgtgttgtggccgtgaaagcaggattctccattaaagatatcttgagcgggttatgtgagagacacggcatcaatggggcagcagccgaccttttcttagttggcggggataagcccctggtgttgcaccaggattcttccatcttggaaagtcgggatctcaggctggagaaacgcactctattccggttagacttggtgcccattaataggtccgtcggcctgaaagctaagcctaccaagcccgtgactgaggttctcaggccggtggtggcgcgttacggccttgacttgagcggcctgttagttagactgagcggcgagaaggagccactggatctcggagcacctatttcgtccctggacgggcagcgggtggtgctcgaggaaaaagacccttccagaggcaaggccagcgcagataagcagaagggggtgcccgtgaagcaaaacactgctgtgaattcctcaagccgaaaccacagcgctactggagaagaaaggaccctcggcaaatcaaactctatcaagatcaagggggagaacggcaagaacgcccgcgatcctagactcagtaaacgggaagagtcaatcgctaaaatcggtaagaaaaaatatcagaagatcaatctggatgaagccgaggaattcttcgagttgataagcaaggcccagtccaacagagctgacgatcagcggggcctactgcgcaaggaagatcttgtgttgcctgagtttctgcggctcccccccggcagcacggagctcactctgcctacacctgccgccgtcgcaaagggtttcagtaaacgtagcgctactgggaatggccgagaatctgcctctcagcccggcgagcagtgggaacccgtacaagaaagttctgacagccctagcacaagcccaggcagcgcctcctccccgccaggaccaccagggacaacaccccccggccagaagagcccatccggccctttctgcactccccaatctccagtctctttggctcaggagggcaccgcacaaatatggaaacgccagtctcaggaagtcgaagctggggggatccagaccgtggaggatgaacacgtcgccgagctcaccctaatgggggagggtgacatcagctcaccaaactcaacgctgctgccacccccaagcaccccacaggaggtaccaggtcctagtaggcctggcacttcgagattctag

SEQ ID NO: 26106 - DNA, 2400 bp, synthetic construct
  misc_feature 1..2400: note = Description of Artificial Sequence: Synthetic coding sequence
  source 1..2400: mol_type = other DNA
atgaacctgggcaaggagctgagcaacgagacccacgtgagcaacgaccagcaaagtgccacagtttctgatggcgaactcacaggggctgacttgaaggactgcgtctccaacaactcactgagttcaaatgccagcctgcctagcgtgcaatcttgcaggcgcttacgtgaacgccgagttgcttcatgggccgtgagtttcgagcgcttactgcaggaccccgtgggagtgcgatatttcagcgactttctgagaaaggagtttagcgaagaaaacattctgttttggcaggcatgcgagtacttcaaccacgtgcccgcacacgataaaaaggaactttcttacagggctagggaaatcttcagcaagttcctgtgtagcaaagcaacaacaccagtgaatatcgattcacaggcgcagctagctgatgacgtcctgcgcgccccgcacccggacatgtttaaagagcagcagcttcaaatctttaacctaatgaagtttgatagctacacacgatttctgaaatcgcccctgtatcaggaatgtatcctcgctgaggtggagggccgcgccctgcccgacagccagcaggtgccgtcttctcccgcttccaagcattccctgggctccgaccatagcagcgtgagcactcctaaaaagctaagtggcaaatcaaagtcaggcagatctctcaatgaagaacttggtgatgaggatagcgaaaaaaaacgaaagggcgctttcttcagctggtcccgaacccgttctacaggacggtcccagaaaaagcgtgagcatggcgaccacgccgatgatgccctgcacgccaatgggggtttatgtcgcagggagagccaggggagtgttagcagcgcaggcagccttgatctgtcagaagcatgtcgaaccctagcccccgagaaggataaagccacaaagcactgttgcatccacctgccggacggtacaagttgcgttgtcgccgtaaaagcaggtttttctatcaaagacattctgagcggcctttgtgagcgacacggtattaatggggccgcagccgacctgttcctggtcggaggcgataaaccactggttttgcatcaggacagttcgattttggagtcacgggatctgcgactcgagaaaaggaccttgttcagattagatttggtgccgatcaatcgcagtgttggcctgaaggccaagcccactaaaccagtgacagaagttctgagacccgtcgttgctagatacgggctagacctgtcaggcttattagtgcgactgagcggcgaaaaagaaccactggatctgggggccccaatctcctccttggacgggcagcgggttgtgctagaagaaaaagaccccagtcgaggcaaagcttccgctgacaaacagaaaggcgtgccggtcaagcagaacacagccgtgaacagctcaagcaggaaccactctgctaccggcgaggagaggacactgggaaagagcaatagcatcaaaatcaaaggggagaatgggaagaatgctcgcgacccacggttgagcaagcgtgaggagagtatcgccaagattggcaagaaaaaatatcaaaagattaatttggatgaggccgaagaattcttcgagctaatttctaaggcccaatcaaacagagctgacgaccagcgagggctcttgcgcaaagaggacctagtactgcccgaattcctccgcctgcctccaggcagcactgaattgactttgcccacgcccgcagcggtcgcaaaaggcttctcaaaaagatctgccaccggcaatggacgcgagtcagcatcacaaccaggagaacagtgggaacccgtgcaagaatcatcagacagccctagcacctcgccaggatccgcttcgtcccctccagggcctcctggtacaacaccccctgggcaaaagtccccctccggccccttctgtactccccagtcgcctgtctctctagcccaggaaggtactgcccagatttggaaaagacaatcccaagaggtcgaggctggtggaattcagactgtagaggatgaacatgtagccgaattgactcttatgggagagggagatatcagcagccccaactccactctcctgcctcctcccagtacacctcaggaggtacctggacctagtaggccgggcagtggcactcacggctccagggatctgccagttaatagaattattgacgtcgacctggtcacagggtccgcacctggccgggacgggggcattgcgggagcacaagccggaccagggaggtcacaagcgagtggaggacccccaacatccgatctcccagggctcggtccagttcctggcgaaccagccaaaccaaagaccagtgctcatcatgccacattcgtatag

SEQ ID NO: 26107 - DNA, 4344 bp, synthetic construct
  misc_feature 1..4344: note = Description of Artificial Sequence: Synthetic coding sequence
  source 1..4344: mol_type = other DNA
atgttccgggccggcgaggccagcaagcggcccctgcccggcccctctccccctagggttagatcagtagaggtggcaagaggacgcgctggttacgggttcacactgagcggacaggccccatgcgtactgagctgcgtcatgcgagggtcacctgctgatttcgtcgggcttcgggcaggcgatcagattctggctgtgaacgagataaatgtcaagaaggctagccatgaggacgtcgtcaagctgattggcaaatgctcgggagtgctgcatatggtgattgcagagggggtaggcagattcgaatcatgttcctcagacgaggaggggggcctatacgagggaaaaggctggctcaagcctaaactggatagcaaggcactcggcatcaaccgggccgagagagtggtcgaagaaatgcagtcagggggaatcttcaacatgatatttgaaaatccgagcctatgtgctagcaactcggaaccccttaagctcaagcaacgcagcctgagtgaatcggccgcaacacgtttcgatgtgggccatgaatcgatcaacaaccctaatcccaatatgttgtcaaaagaggagatttccaaagtgattcacgatgactctgtctttagtatcggtttggagtcacacgatgattttgctctcgacgcatctatccttaatgtggctatgattgtcggctatctggggtccattgagctgccctcaacgtccagcaaccttgagtccgatagcctgcaagctataagaggatgtatgcgcaggctgagagcggagcagaagattcactcacttgtgactatgaagatcatgcacgattgtgttcaacttagcaccgacaaggctggagtagtcgctgagtatccagccgagaaactagccttttctgctgtatgccctgacgatagacgctttttcggtctcgttaccatgcagacaaatgacgatgggagcctggcacaggaggaagaaggtgccctgcgcacttcttgtcatgttttcatggtcgaccccgatctgttcaaccacaaaattcatcaaggcatagcacgtcgctttgggttcgagtgcactgccgaccctgatacaaacggctgtttggaatttcctgcgagctcactgccggtgttacagttcatatcagtcctgtaccgcgatatgggcgaactaattgaggggatgcgagcaagggcgttcctggatggcgatgccgacgcccaccagaacaattctacaagctccaactctgacagtggcattggaaattttcaccaggaagaaaaatcaaatcgggtcttggtagtggacctggggggtagttcaagtaggcatggcccggggggatccgcctgggacggggtaggaggaaggggtgcacagccctggggagcgccctggacaggaccattctgcccagatccggagggatcaccaccatttgaggctgcacatcaaacggatcggttttgggatctgaacaaacatctgggccccgcctcacctgtggaggtgcctccagcctctctgcggagctccgtgcctccaagcaaacgtgggaccgttggtgccggatgcgggtttaaccagcggtggcttccagtgcacgtcctacgtgagtggcaatgtggccacacttccgaccaagacagctatactgattctaccgacggctggagctcaatcaattgcggcaccctaccacccccgatgagcaaaatccctgctgatcgctacagggtggaaggcagcttcgcgcagcctccgcttaacgcgcctaaaagagagtggagtcggaaagcatttggaatgcaatccatctttggaccacatcggaacgttaggaagaccaaggaagataagaaaggatccaaattcggacgggggacagggctaacacagcccagccaacgaacatctgctagaaggagtttcggccgatcaaaaaggttcagcattaccaggagtctcgacgaccttgaatccgctaccgtcagcgacggagaactgaccggagccgacctcaaggattgtgtgtcgaacaatagcctatctagtaatgcctctctaccttctgtacagtcctgcaggcgcttgcgcgagcgaagagttgcatcctgggccgtgagtttcgagaggctgctccaggaccccgttggtgtgcggtactttagcgactttctacgcaaagagttctcggaggagaatattttattctggcaggcctgcgagtactttaaccatgttcctgcccatgacaagaaggaattgagttatcgagcaagggagattttcagtaagttcttgtgctcaaaggcaactacccccgtgaatatagactcccaggcgcaactagctgacgacgtattaagggccccccatcccgacatgttcaaggaacaacaattgcagatattcaacctgatgaagttcgattcctacaccagatttctgaagtcacccttgtatcaggaatgcatattggctgaagtcgagggacgtgctctcccagactctcagcaggttccctcctccccagcttcaaagcactcccttggtagcgaccacagctctgtgagcacccccaagaagctctctggcaagtccaaatccggcaggtccctgaacgaagaactgggagatgaggactcggaaaagaagcggaaaggggcgttcttctcgtggtcacgcactcgcagcactggtcgctcccagaagaaacgtgaacacggcgaccatgctgatgatgctctccacgctaacgggggactctgcaggcgggagtctcagggtagtgtctctagtgccggatctttggacctgagcgaggcatgtcggacactcgcgcctgagaaagacaaagccaccaaacactgctgcattcaccttcctgatgggaccagctgtgtcgtcgcagttaaggccggattttctattaaggatattctgagcggactctgtgagaggcacggcattaacggtgctgcggccgacttgttccttgtgggcggcgacaagccattggtcctgcatcaagactcctcaatactggaatctcgggacctacgccttgagaaaagaacactgttccgactggacctggtcccaatcaatcggtccgtgggcctgaaagcgaagcccacaaaaccagtcacagaggtcctgcggccagtcgtggctaggtacggactggacttgtctggtctgttggtgaggttgtctggggagaaggagcctctggacctgggtgccccaatttcgagcttggatggacagcgggtggttctcgaggaaaaagaccccagccgcgggaaagcatctgccgataagcagaagggggttcccgttaagcagaatactgccgtgaacagctcctcaagaaaccactctgccacaggagaggaacgcacactggggaagtcaaatagcatcaaaatcaagggtgaaaatggtaaaaatgcgcgggaccctaggttaagcaagcgcgaagagtcaatcgccaaaatcggaaagaagaagtatcaaaagatcaatttagacgaagctgaggagttcttcgagctgatttctaaggcccagtctaatcgcgcagacgaccagagggggctccttcgaaaggaggacttagttctgcccgaattcctaaggctgcctcctggcagcacagaattgacgcttcccacacctgctgccgtggcaaaaggattttccaagcggagcgccacagggaacggaagagagagcgctagccagccgggcgagcaatgggaaccggttcaggagtcatcagacagcccatccacctctccaggtagtgcctctagcccacccgggccgccaggcaccacccctcccggccaaaagtctccttctggacctttctgcactccacagtcccccgtgtccctggcccaggaaggtacagctcagatttggaaaagacaaagccaggaagtggaagcaggcggaatacagaccgtggaggacgaacacgtggccgagcttacattaatgggcgagggcgatatctcctcacctaatagcacacttctgcctccccctagcacaccgcaggaggtgcccgggccgtccagacctgggtctgggacccacggctccagagatctgccggtgaaccggatcatcgacgtggacttggtcacggggtccgcacctggccgagatggaggcatcgctggagcccaggctggtcccggccgcagtcaagcctccggaggcccccccacaagcgacctcccaggcttggggcctgtcccgggcgaacctgctaagcccaaaacttccgcacaccatgctacttttgtatag

SEQ ID NO: 26108 - DNA, 4131 bp, synthetic construct
  misc_feature 1..4131: note = Description of Artificial Sequence: Synthetic coding sequence
  source 1..4131: mol_type = other DNA
atgttccgggccggcgaggccagcaagcggcccctgcccggcccctccccaccaagggtgagatctgtagaggtggcacgtgggagagccggctatggttttactctgtcagggcaggccccgtgcgtcctttcttgtgtaatgcgcggaagtccagctgattttgtgggcctgagagccggagaccagatccttgcagttaatgaaatcaatgtgaagaaggcatcacacgaggacgtggtcaaactgattggaaaatgttcaggcgtgctgcacatggtcattgctgagggtgtgggcagattcgagtcatgcagttcagatgaggagggaggtctatatgagggaaagggctggctcaaacccaaactggatagcaaggcgctcggaattaatagggccgagcgcgtcgtggaggagatgcagtcaggagggatttttaatatgattttcgaaaatccctctctctgtgcgtccaactctgagccactcaaattgaaacagaggtctctgtcagaaagtgcagcgactcggtttgacgttggacatgagagtattaacaatcccaatcccaacatgctcagtaaagaggagatttcaaaggtcatacatgacgattcagtcttcagcattggactagaatcacacgacgattttgctctggatgctagcatcctgaatgtggccatgatcgtgggatacctagggtctatcgagctgccttctacaagcagtaacctggaatctgattctctccaggccatacggggttgcatgagaagactcagggccgagcagaagatccactcacttgttactatgaaaattatgcacgactgtgtgcaattgtcaactgacaaagccggagtggtagccgaataccctgccgaaaaattagccttctccgctgtctgtccagacgatcgaagattctttggactggtaacaatgcaaacgaacgatgatggctcactcgctcaggaggaagaaggagctctgcgcaccagctgccacgttttcatggtggaccctgacttgtttaaccataagatacatcagggcatcgcacggagattcggtttcgagtgtacagccgaccccgacactaatggatgcctagagttccctgcaagttcactgcccgtcctgcagtttatttccgttctctatcgcgacatgggtgagctcatcgagggaatgagggcacgggccttcctggatggtgacgcagacgcccatcagaacaactctacatcttccaactcagacagtggcatcggcaatttccaccaggaagagaagagcaatcgggtgctcgtggtggaccttggcggatcctcgtctcggcacggtcccggaggctctgcatgggatggagtgggagggcgcggcgctcagccatggggtgccccgtggaccggacctttctgccctgatcccgagggcagcccgccttttgaagccgcccaccaaaccgatcgattttgggatctgaacaagcatcttggtcctgcatcacccgtggaggttcctccagcttctttacggagttcagtgcccccttctaaaaggggaaccgtaggggccgggtgtggcttcaatcagagatggctgccagtgcacgtgttgagagagtggcagtgcggccatacctccgatcaagactcatatacagacagtaccgatggctggtcctcaatcaattgtggaacgctgccacctccaatgagtaaaatcccggccgaccggtaccgagtggaagggtccttcgcccagcctccgcttaatgctccaaagagagagtggagcagaaaggcttttggaatgcagtctatatttggcccacatagaaatgtgcgtaagacaaaggaggataagaaggggtccaaatttgggcgcggaactgggctgacccagcccagtcagcgcaccagcgccaggagatcatttggccgctcgaagcggttttctattacacgcagtctggacgacttggaatcagctacagtttctgacggggagctcactggcgccgatttaaaagactgtgtgtccaacaacagcctcagttccaatgcctccttgccctctgtgcagtcctgccgtcgcctcagagaaaggagggtcgcaagttgggctgttagctttgagcgcctgcttcaggaccctgttggcgtacgatacttctccgactttctgcgcaaagagttttcggaagaaaatattctgttctggcaagcatgcgagtacttcaatcatgtacctgcccatgataaaaaggagttatcttaccgggcgagagagatctttagtaagttcctgtgcagcaaggccaccaccccagtaaacatagactcccaagcgcagctagccgacgacgtcctcagggccccccaccccgacatgttcaaagaacagcagcttcagattttcaatctgatgaaatttgattcatatacacgatttctgaaatcgccactctaccaggagtgtatcctcgccgaagtggaggggcgcgcactgccagatagtcagcaggtgccctcatctcctgccagcaagcatagcctgggttccgaccacagctccgtgtctactccaaagaagctgagcggaaagtcaaagtcaggacgaagtctgaacgaggagctgggggacgaagactccgaaaagaaacggaaaggggcatttttttcctggagcagaacccggtctactggtcgcagccagaagaaacgggagcatggagaccacgccgatgatgcgctgcatgcgaacggaggactctgccgacgtgaatcccagggatcagtgtcatccgccggctcgctcgatctctctgaagcatgtcgaactctagcaccagaaaaggacaaggcgactaaacattgttgcatccaccttcctgacgggacctcctgtgttgtggctgtgaaagctggcttttccattaaagatattctgtccggtctatgcgagcgccacgggatcaatggcgctgccgcagacctgtttttagtggggggtgataagcctctggtactacatcaagattcttcgatcctggagtcacgtgaccttcgtctggaaaagcgaactctgtttcggctggatctggtgccaatcaacaggtccgtgggactcaaggcaaaacctaccaagcctgttaccgaggtcttgcggcctgtcgtagcccgctacgggctcgatttgtctgggctgctggtgcgcctgagtggagagaaagaacccctggatctaggggcccccattagcagcctggatggtcagagagtggtattagaagagaaggatccttcacggggcaaggcctccgcagataaacaaaaaggggtcccggtgaaacaaaatacagcagttaactcctcatctagaaatcacagcgcaactggcgaggagcgaactctcgggaagtcaaactccattaaaatcaagggcgagaatgggaaaaacgccagagatcctaggctatctaagagagaagagtccattgctaaaatcgggaaaaaaaagtatcagaagattaatctcgacgaagctgaagaattttttgagttgatttccaaagcccagagcaatcgagccgatgatcagagaggtctcctgcggaaggaagaccttgtgctgccggaattcctgaggcttccaccagggtccactgaactgaccctgcccacacccgcggcagtcgcaaaggggttctcaaagcggtcagctactggtaatgggagagagagcgctagtcagccaggcgaacagtgggaacccgtccaggaatctagcgactctccctctacctcccccggcagcgctagctctccaccgggtccgcccggaacgactccaccaggtcagaagtcccctagtggtcccttttgcacgccgcaatcccccgtgtcccttgcccaggaggggactgcccagatctggaaaaggcagtcgcaggaagtagaagctgggggaatccaaacggtggaagacgaacatgtggcagaattgactctcatgggagagggggatatcagcagccccaactccaccctgctgccccccccaagtacaccccaggaggtcccaggaccgtctagacccggcacgtctcgattttag

SEQ ID NO: 26109 - DNA, 1500 bp, synthetic construct
  misc_feature 1..1500: note = Description of Artificial Sequence: Synthetic coding sequence
  source 1..1500: mol_type = other DNA
atgagcctgagcctgttcttccagagcgccaccgtgagcgacggcgagttaacgggggctgatttgaaggactgtgtgtccaataattcacttagttctaatgccagcctgccgtcagtgcagtcctgtaggcggttacgggaacgaagagtggccagttgggcagtgtcatttgaacgtctgctgcaggacccagtcggagttcgatacttttctgattttcttagaaaagagttttctgaagaaaatattctcttctggcaagcatgtgagtattttaatcacgtgccggctcatgataaaaaggaactgtcctacagggcccgtgagattttcagtaaatttctgtgttctaaagctacaactccagttaatattgatagccaggcacaactcgccgatgatgtattgcgtgcaccccaccccgacatgtttaaagaacaacagctgcagatcttcaacttgatgaaatttgattcttataccagatttctgaaatccccactttaccaggaatgcattctggctgaagtggaaggcagagcgttacctgactcgcagcaagtgccttcctctccagcgagcaagcattctttaggcagtgaccactcttctgtatctacccctaaaaaactctccggcaagagtaaaagcggacgctctctgaatgaggagttgggcgatgaagactcagagaagaagcgaaagggagcctttttttcatggtctaggacaagatccactggtaggtcccagaagaagagggagcatggagatcatgcggacgatgcactgcacgcaaacgggggcctgtgccgccgcgagagccagggcagcgtgagctccgccggcagcctggacctctccgaggcttgtcggactcttgccccagagaaagataaggccacaaagcactgctgtatccacctgcctgatggaactagctgcgtcgtagccgttaaagctgggttttccattaaagacatcttatcaggcctttgcgagcgccacggaattaatggagctgcagcggacctcttcctggtaggcggtgataagcctctcgttttgcaccaagatagttcaatcctggagtcccgcgatctgcgcctcgagaagaggacactgttcagactcgacctggtgccaattaatcgctccgtgggcctgaaggccaagccaacaaaacccgtgaccgaggtactcaggccagttgtggcccgatatggcttagatttgagtgggctgcttgtgaggctgtccggcgaaaaggagcccctagacctaggagcacccatctcgagcttggacggccagcgggtcgtgctggaagagaaggacccttcccgcggtaaggcatccgcagacaagcagaagggagtcccagtaaagcagaacactgccgttaatagcagcagccgaaatcactcagctaccagcttcttatctctgttccccaaactcagggctaccgagcagatgactaatgtcgggtgttag

SEQ ID NO: 26110 - DNA, 2004 bp, synthetic construct
  misc_feature 1..2004: note = Description of Artificial Sequence: Synthetic coding sequence
  source 1..2004: mol_type = other DNA
atgttccgggccggcgaggccagcaagcggcccctgcccggccccagccctcctagggtgcggtccgtggaagtggccaggggaagagcaggatatggttttacactgtctgggcaggccccctgcgtgctctcttgcgtgatgcgcgggagccctgccgacttcgtcggcctgcgcgctggtgaccagattctcgccgtcaacgagatcaacgtcaaaaaagctagccatgaggacgtcgtcaagctaatcggtaagtgttcaggagtgctgcatatggtaatcgccgaaggggttggcaggtttgaatcctgttctagcgatgaggaaggcggcctatacgagggtaaaggatggctcaaacccaaattggattctaaggccctagggatcaaccgcgctgagcgtgtggtagaagaaatgcagagtggaggcatctttaacatgattttcgaaaacccttctctgtgtgcttccaattccgaacctctcaagcttaagcaacggagcttatctgaatcagcagcaactaggttcgatgtaggccatgagtcgattaataaccccaacccaaatatgctgagcaaggaggaaattagcaaagtgatccatgatgatagcgtttttagtataggactggagtcccacgacgactttgccctagatgcctctatcctgaacgtggccatgatagtggggtacctgggttctatcgagctcccgagcacgagctcaaatttggagagcgattccctacaggccattcggggctgcatgaggaggcttagagccgagcaaaaaattcactctttggtaaccatgaagattatgcacgactgtgtccagctatcaaccgacaaggctggcgtcgtggcagagtaccccgcagagaaactcgctttctcggcggtgtgccccgacgatcgccgtttttttgggctggtaactatgcaaaccaacgacgacgggtccctagctcaggaagaagaaggcgctctgcgtaccagttgccatgtcttcatggttgaccctgacctgtttaaccataagattcatcaaggcatcgcccggcgcttcgggttcgaatgcaccgcagatcccgacacgaatggctgcctagagtttccagcgtccagcctgccagtactgcagtttataagcgttctgtatagagatatgggagaattgattgagggaatgagagcgcgggcgttcctggacggagacgccgacgcgcaccagaacaacagcacaagctccaactccgactcaggaatagggaacttccaccaagaggagaaatccaatcgcgtgttggtcgtggacctgggtgggtcctcctcccgccacggtccgggagggagcgcgtgggacggtgtgggcggacgcggagcgcaaccgtggggcgccccctggactgggcctttttgtccggatcctgaaggatccccaccattcgaggccgctcaccagacagatcggttctgggacctcaacaagcatctgggccccgccagccccgtggaggtccccccagctagtttgcgatcgtcggtgccgccgtccaaacgtggaaccgtgggagccggctgcggctttaaccaaaggtggttgcctgtacacgttctgcgggagtggcagtgtggtcacaccagtgaccaggattcttatacagatagcacagatggctggtcctccatcaattgcgggacactgcctcctcccatgtctaagattcccgcagataggtatagagtggaaggttccttcgctcagccccctttgaacgccccaaagcgagagtggtcacgtaaagcatttgggatgcagtcaatcttcggcccacatcggaatgtgagaaagacgaaggaggataagaagggatcaaagttcggtcggggaacggggttgacacaaccctcccagcgtaccagcgcccgacgctccttcggaaggagcaaacgttttagtatcacccgcagcctcgacgacctggaatcgtag

SEQ ID NO: 26111 - DNA, 636 bp, synthetic construct
  misc_feature 1..636: note = Description of Artificial Sequence: Synthetic coding sequence
  source 1..636: mol_type = other DNA
atgcagagcgccatgttcctggccgtgcagcacgactgccggcccatggataagagcgccggcagcgggcacaaatctgaggaaaaacgtgagaagatgaagcgtactctgctgaaagattggaaaacacggttaagttatttccttcagaattcaagtacacctgggaagccaaaaaccggcaaaaagagcaagcaacaggccttcattaagccatctcccgaggaggctcagctgtggagcgaggcattcgatgagttgctggctagcaaatacggcctggcagcgtttagagccttccttaagtctgagttctgtgaggaaaacatcgagttctggctggcttgcgaggactttaaaaaaaccaagtccccccagaaattaagtagcaaggccaggaagatttatactgatttcatcgaaaaagaggctcccaaggaaattaatatcgatttccagacgaaaacactgatcgcacaaaacatccaggaggcaacgagcgggtgtttcactaccgcacagaaacgcgtctattctctcatggagaacaattcctacccacggttcttggagtccgaattttatcaagacctctgtaagaagcctcaaatcaccacagaacctcatgccacatag

SEQ ID NO: 26112 - DNA, 4203 bp, synthetic construct
  misc_feature 1..4203: note = Description of Artificial Sequence: Synthetic coding sequence
  source 1..4203: mol_type = other DNA
atgcccaagatcgtgctgaacggcgtgaccgtggacttccccttccaaccatacaagtgtcaacaggagtatatgactaaggtactagaatgcttacagcagaaggttaacggcatcctggagagtccaacaggtaccggcaaaacactttgtctcctttgcaccactcttgcctggcgggaacatctgcgagatgggattagtgcccgcaagatcgctgagcgggctcagggcgagttgttccccgatcgcgcacttagtagttggggaaacgccgcagcggcggccggggatcccattgcctgctacaccgacatacctaaaattatttacgcaagcaggacgcacagtcaactgacccaggtcatcaacgaactaagaaacacctcctaccggccaaaagtatgcgtactaggaagtcgtgagcagctatgtatccatcctgaggtgaagaagcaggagtccaatcacctgcagatccatctctgtcgaaaaaaagttgctagccgaagctgtcacttttataacaacgtagaggagaagtctcttgaacaggagctcgccagccctattctggacatcgaagaccttgtcaagtccggctcgaaacaccgcgtctgcccatattatctgagccgcaacttaaagcagcaagcggatattatcttcatgccttacaactaccttcttgatgcaaaaagtaggagggcccacaacattgacttgaagggcacggtggtcatcttcgatgaggcccataacgttgagaaaatgtgcgaggaatccgcgtcatttgatctgactccccacgacttagccagcgggctagatgtcatcgatcaagtcttggaggaacagacaaaggccgcgcaacagggggagcctcaccccgaattctctgcggacagtccctcgccagggctcaatatggagctggaggatattgcaaagctaaagatgattctgttaaggcttgagggagcaatcgacgccgtggagctccccggggacgattcgggcgttaccaagcctgggagttacatctttgaattgttcgccgaggcgcaaatcacttttcagacgaaaggatgcatcctggatagcctggaccagataattcaacatctggcaggcagagccggcgtattcaccaataccgctgggcttcagaagctggccgacataattcagatcgtattcagtgtcgacccttccgagggatcgcccgggagtcccgcaggccttggggccctgcagagctataaagtgcatattcaccccgatgcgggccaccggcgcacagcccagagaagcgacgcctggagcaccaccgcggccaggaaacggggaaaagtcctaagctactggtgtttttctcctggacacagcatgcacgagcttgttagacagggggtcagatcactcattcttactagtggaacgctcgctcctgtctcttcatttgcattggagatgcagatcccttttccggtttgcctggaaaacccccatataatcgacaagcaccagatttgggttggcgtagtgccccggggccccgatggcgcacagctgagttccgccttcgatcgacgattctctgaggagtgcctgagctccttgggtaaagctctgggtaatatcgcaagggttgtgccctacgggttattaattttttttcctagctatcctgttatggagaagtcattggagttctggcgcgcacgcgatctggccaggaagatggaagccttgaagcccctcttcgtcgagccccgcagcaagggctcctttagcgagacaatcagcgcatattacgccagagtggctgcccccggctctactggtgccaccttcctggccgtgtgtcgaggcaaggcatccgaaggattggacttcagcgataccaatggtaggggcgtgatcgtaactgggctgccataccccccgaggatggatcctcgagtcgtgctgaagatgcagttcctggacgaaatgaaaggacagggcggcgcaggcggacagtttctgagcggccaagaatggtataggcaacaggcatctcgggcagtaaaccaggcaatagggcgcgtcatcagacatcggcaagactatggggcagtgtttttgtgcgatcataggtttgcattcgccgatgctcgtgcccagctccccagttgggtaagaccccacgttcgggtgtatgataatttcggacatgtcatcagagacgtggcccagttttttagagtagcagaaaggaccatgcccgctcccgccccacgcgctaccgccccaagtgttcgtggagaggacgctgtgtctgaggccaaatccccaggacccttcttttccactaggaaggccaagagtttggatctgcatgtgccctccttgaagcagcgtagcagtggatcccccgccgccggcgacccagagtccagcttatgcgttgagtatgagcaagagccagtcccagctcgacagaggcctcgcgggcttttggcagcgctggaacactccgagcagcgggctgggtctcccggggaagagcaggctcattcttgcagcaccttaagtctgctgagcgaaaaaaggccagctgaagaacccaggggaggtcggaaaaagattcgtctcgtatcccatcctgaggaaccagtcgccggtgcccagacagaccgggctaaactgttcatggtcgccgttaaacaggaactgtcccaagccaacttcgccaccttcacccaggctctccaggattataagggctcagacgactttgccgccctggctgcttgtttgggtcctctcttcgctgaggatccgaaaaaacataatctcctgcagggtttctaccagttcgtcaggccgcatcataagcaacagtttgaagaggtgtgcatccagctgactggaagggggtgcgggtacaggccagagcattcaatcccacgaaggcagcgggctcagccagtgctagatcccaccgggcgtacggcgccggaccccaaattgactgtctctaccgccgcggcgcagcagcttgatccccaggagcatttaaaccagggtcgcccccacttatcacctcgcccgccccctaccggagacccgggcagccagccccagtgggggtcaggagtccctagagctggtaagcaggggcagcacgccgttagtgcctacttggcagatgctcgacgggcgttaggatccgccggctgttcacaattattggccgctcttaccgcctacaaacaggacgatgatctggataaggtcctggctgtactggccgcgctgaccacagctaagcctgaggacttcccactgttgcacagattttctatgtttgttcggccccaccataagcaacgcttttcccagacgtgcacggatctcacaggtcgcccttatcccggcatggaacctcccgggccacaggaagagcgcctcgctgttccacctgtgctcacccatcgagccccccaacccggtcccagtaggtcagaaaaaactgggaagacacaatcgaaaatttcgagcttcttacgccagaggcccgctgggaccgtgggcgccgggggggaggatgctgggccctcacaatcctctggtccaccgcacggccccgcagcatcagagtggggggaaccccacggcagagacatcgccggacagcaagcgacgggagctccaggaggaccactgtctgccggatgtgtatgccaggggtgcggagccgaggacgttgtgcccttccagtgtcctgcttgtgattttcagcgatgtcaggcctgctggcagcggcatctccaggcctctagaatgtgtcctgcatgtcacaccgcgagcaggaaacagagtgtgatgcaagtgttctggccggagccccacaaggatcatgagggagctgggggagcccgccccgttgccgctgtccccggcgtaggggcggcttgcccagccgccggcgctgggtgcactcgatccgggagaaacactcatctaccgctagccggacgaagggataggggagccgctggggtgaggccagtcccccccaggcacttgtgcgccgcagccgtgccccctcggcagccccacgatgtttggcccgtgagcactgctccactccacgctgtgttggaattaccaagggccctgccactgttacaaagaccattacgaggggcgtag

SEQ ID NO: 26113 - DNA, 1638 bp, synthetic construct
  misc_feature 1..1638: note = Description of Artificial Sequence: Synthetic coding sequence
  source 1..1638: mol_type = other DNA
atgcccgcccccgccccccgggccaccgcccccagcgtgcggggcgaagacgccgtgagcgaggctaaatccccgggaccattcttttctacccgtaaggcaaaaagcctggacttacacgttccaagcttgaagcagcgcagctccggcagtcccgctgctggtgacccagaatctagcctatgcgttgaatacgagcaggagcctgttcctgcccgccaacgtcctcgtgggctcctggctgcacttgaacacagcgaacagagagctggcagccccggcgaggagcaggcccattcctgttcaacccttagtttgctgagtgagaagcggcccgctgaggagccccgcggaggtcggaaaaagattagactcgtgtctcatcccgaagagcctgtggcgggtgcccagacagatagagctaaacttttcatggtggcagtcaaacaggaactgtcccaggccaattttgctaccttcacacaggccctgcaggattataagggctccgatgatttcgctgcactcgctgcctgccttgggccccttttcgccgaagaccccaagaagcacaaccttctacaagggttttaccaattcgtacggcctcaccacaagcagcaattcgaagaggtgtgtatccagcttaccggcaggggttgcggatataggccagagcactctatccctaggaggcagagagcacaaccagtcctggacccgactggcagaacagcacccgacccaaaattaacagtgtccacagcagcggcacagcaactagatccacaagagcaccttaaccaagggcgccctcacctgtcccctcggcctcctcccaccggtgatccaggatcacagccgcagtgggggtccggcgtgccacgcgcagggaaacagggtcaacacgcggtaagcgcttacctggctgacgcccgaagggccctggggtctgctgggtgttctcagctgctcgctgctctcaccgcctacaagcaggacgatgatctggataaggtgttggctgtcttagctgctctgacaacggctaaacctgaggacttcccactgctgcacagattctctatgttcgtccgccctcaccacaaacagaggttctctcagacttgcactgacttaaccgggagaccatatccaggtatggaaccccctggcccccaggaagaacggcttgcagtgcctccggtgttaacacaccgcgcaccccagcccggaccttccagatctgagaagaccggtaagactcaaagtaagataagtagcttcctgcgccagagaccagcaggaacagtgggtgcaggcggcgaggatgctggacccagtcagtcgtctggaccaccccacgggccagccgcctcagaatggggtgaacctcatggaagggacatcgcaggccagcaggccactggtgcacccggagggccactgtcggcgggctgcgtgtgccagggctgcggcgccgaagacgttgttcccttccagtgtcccgcctgcgatttccagcgttgccaggcctgttggcagcgccatctgcaggcctctagaatgtgtccagcttgtcataccgcttcacggaagcagagcgtgatgcaggttttttggccggagccccagtag

SEQ ID NO: 26114 - DNA, 3660 bp, synthetic construct
  misc_feature 1..3660: note = Description of Artificial Sequence: Synthetic coding sequence
  source 1..3660: mol_type = other DNA
atgcccaagatcgtgctgaacggcgtgaccgtggacttccccttccaaccatataagtgtcagcaggaatatatgacaaaggtattggagtgtctacaacagaaagtgaatggcattttagaaagtccaaccggtaccggcaaaacactctgtcttttgtgtacgaccctggcatggagagagcacttaagagatgggatctcagctaggaaaatcgccgagagagcacagggagagctcttcccagaccgagccctgtccagctggggtaacgctgcagcggctgcaggtgatcccatcgcatgttatacagatataccaaagattatttatgcgtctcggacgcattctcaacttacgcaggttatcaacgaactgagaaatacctcatatagacctaaggtatgcgtgctgggatcccgtgaacagctgtgcattcacccggaagtcaagaaacaggagtccaatcatctgcaaattcatttatgtcgcaaaaaagttgcctcaaggagctgtcatttctacaacaatgtggaggaaaaaagtctagagcaggaactggcttcaccgattctcgatattgaggatcttgttaagtcaggctctaagcaccgagtctgcccatattatctgagtcggaacctgaaacaacaggctgacataatttttatgccttataattatttgctggacgccaagtcacgacgggctcacaatatcgatctaaaaggaaccgtcgtgatttttgacgaggcccataacgtggaaaagatgtgcgaggagtctgcctctttcgatttgacaccacatgatctcgcctctggactagatgtgattgatcaggtgttggaagagcagactaaggctgcccagcaaggggagccacacccggaatttagtgcagactccccctctccaggccttaacatggagctggaggacatcgccaagctgaaaatgattctgctgcggctcgaaggggctattgacgccgtcgagctgcccggcgacgatagcggtgtgaccaagcctggatcgtacatctttgagctgtttgctgaggctcagattaccttccagacaaaggggtgcatcctggactcattggaccagattatccagcacctggccggtcgtgctggggtcttcacgaacactgccggcctgcaaaagcttgccgacattattcagatcgtgttctctgtggaccccagtgagggatccccaggatcccccgcaggactgggcgccctccagtcctataaggtgcacatccaccccgatgcgggccacagaagaaccgctcagaggtccgatgcctggtctactaccgctgctagaaaacggggcaaggtcttgagttactggtgtttctctccaggacattctatgcacgagctggttagacagggagtacgttctctcatccttacctccggcaccctcgcccctgtctcttccttcgcgctggagatgcagattccatttcccgtctgtctggaaaacccacacatcatagacaagcaccagatctgggtgggagtggtacctcgcggccctgacggggcccagctgtcaagcgctttcgaccgcaggtttagcgaggaatgtctgtcctcgctcgggaaagcccttgggaacattgcaagagtggttccctacgggctgctgattttttttccgagctacccagtaatggaaaagtccctcgagttctggcgtgccagggacctggcacggaagatggaagccttaaaacctcttttcgtcgaaccacgctccaagggaagcttctcagaaactatttcggcctattacgcaagggtggcagcccctggctcaaccggagctacttttcttgcagtttgtcgcggcaaggcctccgaagggctggacttctccgatactaatggaagaggtgtgattgtcactgggctgccctaccccccgagaatggaccccagagtagtgttgaagatgcagttcctggacgaaatgaaaggtcaagggggggcgggcggacagttcctcagcggccaggagtggtatagacagcaggctagccgtgctgtaaatcaggctataggtagagtcatcagacaccggcaggactatggtgcagtgtttctctgcgaccaccggttcgcattcgcagacgctagggctcagctgcctagctgggtgagacctcatgtgagagtgtacgacaattttggtcacgttatcagagatgtcgcccaattttttcgcgtggctgagcgaacaatgccagccccagcgcctagagcaactgcaccctctgtccggggggaggatgccgtgagtgaagccaagtctccaggcccattcttcagcacccgcaaggcaaagtcactcgatctgcacgtcccctcactaaaacagcgcagtagcggatcccccgcagccggagaccccgaaagttctctgtgcgtagagtatgaacaagaacccgtgccagccaggcagcgcccccggggactgcttgccgcactcgagcacagcgagcagagggctggcagccccggggaggaacaggcacacagttgctccaccctctctctgctgagcgaaaaaaggcccgcagaggaaccccgtgggggtagaaagaaaatcaggctggtgtctcatcccgaagagcctgtcgccggagcacagactgatcgggcgaagctctttatggtggcagtgaaacaggaactgagtcaggctaatttcgccaccttcacccaggccctacaggattacaagggctccgacgatttcgccgcactggcagcatgtctggggcctctcttcgcagaggatccgaagaagcataatctgctgcagggattctatcagttcgtccgacctcaccacaaacaacagtttgaagaggtatgtatccagctaaccggcaggggctgcggatatagaccagagcattccattccaaggcggcaacgcgctcagcccgtgcttgaccctacgggacggaccgctcccgatcctaagctgaccgtcagcactgccgcggcccaacagctggacccccaggagcacctcaaccagggtaggccacatttgtcgccccgtccccctcccaccggagacccaggatcccagccgcagtggggaagcggagttcccagagctggtaagcagggtcaacacgcagtgtccgcttatttagcggacgctcgtcgagctttgggctctgcaggctgctcacagctgttagctgctctgaccgcttacaagcaggatgatgacttggataaagtgctggcagtcctagccgccctgaccaccgctaaacccgaagacttccctctgttgcataggttttccatgttcgtcaggccccaccataagcagagattctctcagacatgtaccgacctcaccgggcggccatacccagggatggaaccccctggaccccaggaagagagactggccgtcccaccagttctgactcatcgagccccacagcccggccccagcagaagtgaaaagacaggcaagacccaaagtaaaatctcttccttcctgcgccagcggccagccgggactgtcggcgccggaggcgaagacgccggaccatctcaatcttcaggccccccgcacggccccgccgcaagcgaatggggcctgtag

SEQ ID NO: 26115 - DNA, 3732 bp, synthetic construct
  misc_feature 1..3732: note = Description of Artificial Sequence: Synthetic coding sequence
  source 1..3732: mol_type = other DNA
atgcccaagatcgtgctgaacggcgtgaccgtggacttccccttccagccctacaagtgtcagcaagagtatatgaccaaagttctggagtgcttgcagcagaaggtgaacggaatactcgagtcaccgaccggtacaggaaaaacactgtgcctgctgtgtactactctagcctggcgcgaacacctgcgggatggcattagcgctcggaagattgctgagcgagcacagggtgagcttttcccagacagggctctgtcctcctgggggaatgctgctgccgcggccggtgatcccatcgcatgctacacagacatccccaaaatcatctatgcgtcgagaactcactcccaactcacccaggttattaatgaattgcgaaacacctcataccggagcagatgcagagcaaccctatgggtccttgagactgcccctcctagacccacagtactgtcacccacccgtccaaaggtgtgcgtcctggggagtagagagcaactgtgtatccaccccgaggtaaagaagcaagaatccaatcacctgcagatccatttatgccggaagaaggtcgccagccggtcctgtcacttctacaataacgtggaagaaaagtctctcgagcaggaacttgcatcccctattctggatattgaggacctggtgaagagtgggtctaagcatagagtgtgtccatactacctgagtcggaacttaaaacagcaggccgacatcattttcatgccttataactacttgctagatgctaaatctaggagagcccataacattgacttgaaaggcacagtggtgatcttcgatgaggctcataacgtggagaaaatgtgcgaagaatccgcctcttttgatttgacacctcatgacttggcaagtgggctggacgtaattgatcaggtactggaggaacagacaaaggcggcccaacagggagagccacaccctgaattcagcgccgactctccatctcccggactcaatatggagttagaagacatcgccaaacttaagatgatcttgctccggcttgagggagcaattgatgccgtggaactacccggggacgactctggggtcaccaagcccggcagttacatttttgagctgtttgcagaggctcagatcacctttcagacaaagggctgcatcctggatagtctggatcagataatccagcacttagccgggagagctggggtgttcactaatactgctggcctgcagaagctggcagacattattcagatagtattctcagtcgatccctctgaaggcagcccaggctctcccgccgggctcggagctcttcaatcctacaaggtgcacatccaccccgacgccgggcaccgacggactgcgcagagatctgatgcatggtctactactgccgctcgtaagcgcggaaaagtcctctcttactggtgctttagccctggccactcgatgcatgagcttgtcaggcaaggagttcgttctttgatactgacaagcgggactctggcccctgtgtcctccttcgctctagagatgcagatccccttccctgtttgcctggaaaatcctcatataatcgataagcatcaaatctgggttggcgtggtccctagggggcccgatggtgctcagctttctagtgcgtttgaccgtcggttttccgaagagtgtctctcttctttggggaaagctctgggtaatatcgctcgggtggtcccgtatggtctgcttatatttttccccagctaccccgtgatggagaaaagcctggagttctggcgggccagagatctggcaagaaagatggaggcgttgaagcccctatttgttgaaccccgtagcaagggaagcttctctgagaccataagtgcctattatgctcgcgtggctgcccctggaagtaccggggctacctttttggcagtgtgccggggcaaggccagcgagggccttgatttcagtgacactaatggtcgaggggtgattgtcaccggattgccctacccccctcgcatggatccaagagtagtcttgaaaatgcaattcttggatgaaatgaaagggcagggcggtgcaggaggtcagtttctctctggtcaggaatggtaccgtcagcaggcatcgagggccgtcaaccaggcaatcggcagggttatcaggcatcgccaggactatggcgctgtcttcctgtgtgaccacagattcgccttcgccgatgctagagcacagctgcctagttgggtgcggccccacgttcgggtgtatgataacttcggacatgtaattcgagacgtggcgcaattctttcgggtcgccgaaagaacaatgcctgcaccagcgccaagggcaacagcacctagcgtgcgtggagaagatgctgtttccgaagctaaatctccaggaccttttttctcaacaaggaaagcgaaaagcttggacctgcacgtgccatcactgaaacaacggtccagcggctctccggccgcaggggaccccgagtcctcactctgcgtggagtacgaacaagaacccgtacctgcccggcagaggccccggggcctgctggccgcactggagcactccgaacaacgcgcagggtcaccgggcgaagagcaggctcatagctgtagtacactgagcctgttatccgagaagcgacccgcagaggagccacgtggcggaagaaaaaagataaggcttgtttcacacccggaggagcctgtggctggcgctcaaaccgacagggcgaagctgtttatggtggccgtgaaacaggagctgagccaagccaactttgctactttcacccaggccctgcaggactataaggggtcagatgatttcgctgccttagccgcatgcttggggccgctgttcgcggaggatccaaaaaagcacaatctcttgcaggggttctaccagtttgtcagacctcaccataagcagcaatttgaggaagtttgcattcagcttacaggacgaggctgcgggtaccgacccgagcactcaattcctagacgccagagagcgcagcccgtgctagacccaacgggccgaacagccccagatcctaagcttaccgtaagtacggctgctgcccagcagctagatccccaggagcacctcaatcagggtcgaccacacctgtctccaagaccccccccgaccggggatcccggatcacaaccccagtgggggtccggcgtcccacgggctggcaagcagggccagcatgccgtgtccgcgtatcttgctgacgctcgaagggctttgggctccgcgggctgtagccagctgctcgctgctctgacagcctacaagcaggacgacgacctcgacaaagtgttagcggttctggcggccctcactactgccaaacccgaagacttccctctgttgcacagcaactccatgttcgtgcggccgcatcacaaacagagattcagtcaaacatgtactgatctcactggtcgaccctatccaggaatggagcctcccggacctcaagaagaacgcctcgctgtgccaccagtgcttacccacagggccccccaacccggccccagccgcagcgagaagacaggtaaaacacagtctaagatttcatctttcctgaggcagaggcccgcgggcaccgtgggtgccggtggcgaggatgcgggaccttctcagtcttcagggccacctcatgggcccgcagccagtgagtggggcctgtag

SEQ ID NO: 26116 - DNA, 3444 bp, synthetic construct
  misc_feature 1..3444: note = Description of Artificial Sequence: Synthetic coding sequence
  source 1..3444: mol_type = other DNA
atggacatccggaagttcttcggcgtgatccccagcggcaagaagctggtttccgagacggttaaaaagaatgagaaaacaaagtctgacgaggaaaccctgaaggctaagaaggggatcaaggagattaaagtcaattcgagcagaaaggaagatgattttaaacaaaaacagcccagtaagaagaagaggatcatctatgatagcgacagtgagtcagaagaaaccttgcaggttaagaacgctaagaagccccccgagaagctgcctgtgtcttctaaacccggaaagatctcgagacaagacccagtcacctatattagcgaaaccgatgaagaggatgacttcatgtgtaagaaggctgcctcgaaaagtaaagaaaatgggcggagtacgaatagccacctgggaacttcgaatatgaagaagaatgaggagaatacaaaaacaaagaacaagcctctgtctccaattaagcttactccaacaagtgtcctggactatttcggcaccgggtcggttcagagatccaacaagaagatggtcgcgtcaaaacggaaagaactctcacagaataccgatgagtccggtctcaacgacgaggccatcgccaaacagctgcagctggacgaagacgccgagctagagagacaacttcatgaagatgaggagttcgccaggacactagctatgctggatgaagagcctaagacaaaaaaggccaggaaggatacggaagctggtgaaacttttagctccgtccaggctaatctcagtaaggccgagaagcacaaataccctcacaaagttaaaacagcccaggtgtccgatgaaaggaaaagttatagcccacgcaagcagtcaaaatatgagtctagcaaggagagtcaacaacacagcaagtctagcgcagataagattggcgaggtgtcttctccgaaggcctccagcaaacttgccattatgaagagaaaagaggaatctagttataaggagatcgagcccgtggcatcgaagcgtaaggagaacgcaattaagttgaagggggaaaccaagactcccaagaaaacaaagtcatcgcctgcaaagaaggaatctgtttcccccgaggacagtgaaaagaagaggacaaattatcaggcctatagaagctacctcaatcgggaaggacctaaggccctgggatcgaaagaaattcccaagggggccgagaactgtctggagggtttgattttcgtgattactggtgtccttgaatctattgagagggatgaagccaagtctctgatcgagcgctacggcggaaaagtgactgggaatgtctcaaaaaagacaaattatctggtgatgggccgcgatagcgggcagagcaaaagcgacaaagcagctgccctggggacgaagatcattgatgaagatggcctgttgaacctcatcaggacaatgcctggaaagaaaagcaaatatgaaattgctgtggagacagagatgaagaaggaatccaagctggagcgcaccccccaaaagaacgtgcagggcaagcggaagatctccccaagcaagaaggagagcgagtccaagaagtctcgccctacatcaaagcgagactctcttgcgaaaaccatcaagaaagaaactgacgtattttggaagagtctggacttcaaggaacaggtcgccgaagagacatctggagatagcaaagcccggaatctggccgatgattctagcgaaaataaggtcgagaacctgctgtgggttgataagtataaacctacatctcttaagactatcattgggcagcagggagaccagtcttgcgccaacaagcttttgagatggctgagaaattggcagaagtctagtagcgaagacaagaaacatgctaaattcgggaagttctcagggaaggatgacggttcatcttttaaagcagcactcctgtcgggtccgcccggcgtcggaaagacgaccaccgcctctctggtgtgccaggagctgggatacagctacgtagagctgaacgcatccgacacacggagcaagagctcactcaaagccatcgtggctgaatcactcaataatacatcaatcaagggcttttattcaaacggcgccgccagttcagtgtccaccaaacatgccctaatcatggatgaggtggacgggatggctggtaatgaggatcggggtggcattcaggagcttattggcctcattaagcacacaaagatccctataatctgcatgtgcaatgaccggaatcatcctaaaatacgctctctcgtccactattgtttcgatctgagatttcagcgccctcgggtggagcagataaagggtgccatgatgtccatagccttcaaagaaggcctcaagattcccccacccgcgatgaacgagattattctaggcgccaatcaggacattcggcaggtccttcacaacttgtccatgtggtgtgcaagaagtaaagcactgacctatgatcaggctaaggcagattcacatcgggcaaaaaaggacatcaagatgggcccattcgacgttgcccgcaaagtgttcgccgctggcgaagaaactgctcacatgagcctagtggataagagtgatctgttctttcacgattactctatcgctccactgttcgtccaggagaactacatacatgtaaagcccgtcgcagccggcggagatatgaaaaaacacctgatgctcctaagccgggcggccgacagcatttgcgatggggatttggtagacagtcaaatccggtcgaaacaaaattggtctttattgccagctcaggccatctacgcctctgtattacccggagagctcatgcggggttacatgacccagttccccaccttcccttcttggctggggaaacattcctccactggaaaacacgacaggatcgttcaagatctggctctgcatatgagcttgaggacttattcttctaaaagaacggtaaatatggactacttatctctattacgcgacgcgctcgtacaacccttaactagtcaaggtgtggacggcgtgcaggatgtagtggctctgatggacacttattacttgatgaaggaggatttcgagaacattatggagataagctcgtggggggggaagccatcccccttttcaaaactggatccgaaagtgaaggctgctttcactagagcgtacaataaggaggctcacttaacaccctactcgctgcaggccatcaaggcatctcggcactctaccagcccatctcttgatagtgagtacaatgaggaactgaacgaagacgactctcagagtgacgagaaagaccaggacgctatcgaaacagatgcaatgattaaaaagaagactaagagctcaaagccctccaaacctgagaaagataaggaacccagaaagggcaagggcaagagtagcaaaaaatag

SEQ ID NO: 26117 - DNA, 3447 bp, synthetic construct
  misc_feature 1..3447: note = Description of Artificial Sequence: Synthetic coding sequence
  source 1..3447: mol_type = other DNA
atggacatccggaagttcttcggcgtgatccccagcggcaagaagctggtttcagagactgtgaagaaaaatgagaagactaaatcagacgaagaaactctgaaagcgaaaaaaggtattaaagaaattaaagtgaactcctccagaaaggaggacgattttaaacaaaagcaaccctccaagaaaaagaggattatctacgatagcgattctgagagtgaggaaactctccaggtgaagaatgcaaagaagcctcccgaaaagctgccagtgtcatccaaacctggaaaaattagtaggcaggatcctgtcacttacatctccgagaccgacgaggaggacgattttatgtgcaaaaaagccgccagcaaaagtaaggagaacggccggtcaactaactcgcatctcggaacgtcaaatatgaaaaaaaacgaagagaacacaaaaactaaaaataagcccctatcaccgatcaaactcacgccaaccagcgtgcttgattacttcggcacaggaagcgtgcaacgctctaataaaaaaatggtggcaagcaagcggaaggaactctctcagaataccgacgagagcgggcttaacgacgaagccattgcaaaacagttgcagctggatgaagatgcagaactcgaacgacagctgcacgaggacgaagagtttgccagaacacttgccatgctggatgaggagcccaaaaccaagaaagctaggaaagacaccgaggccggagaaactttcagctctgtgcaggccaacttatcgaaggccgagaaacacaaatatccccacaaagtcaagacggctcaggtgtcagatgagcgcaagtcttactccccccggaagcagagcaagtacgaatcatccaaagaaagtcagcagcacagcaaaagtagcgccgataagatcggtgaagtatctagtcctaaggcttcctccaagttagctatcatgaaacgaaaagaagagtcctcctacaaggagatcgagccagttgcttccaagcggaaagagaacgcaattaaactcaaaggagaaactaaaacacctaagaaaaccaaaagctctcccgcaaagaaggaaagcgtgtccccagaggacagtgagaagaaaaggacgaactaccaggcttatcgctcctatctgaatcgagaggggccgaaagccctgggctccaaggaaatacctaagggagccgaaaactgtttagagggtcttatttttgtgattacaggcgtgctcgagagtatcgaaagggatgaggcaaagagtcttatcgagcggtatggagggaaggtcaccggcaatgtaagtaaaaaaacaaattatctagtcatgggaagggactctgggcagtcaaagtccgacaaagctgccgcactggggaccaagattatcgacgaagatggcctcctcaatttgattaggaccatgcccgggaagaagagcaagtacgaaatcgctgtagaaacagaaatgaaaaaagagtcaaagctggaacgcaccccccagaaaaacgtccaagggaagcgcaaaattagcccatctaaaaaagaatccgagtcaaagaaatcccgcccaacgtcaaaacgcgatagtttggctaagactatcaaaaaggagacagacgtgttctggaagtcattggacttcaaagagcaggtggctgaggaaacctcaggggatagtaaggcacggaacctcgcagatgatagctctgagaataaggtcgaaaatctactctgggtcgacaaatataagccaacaagtctgaaaaccattatcggacagcagggtgatcaaagttgtgctaataagttactgagatggttacggaactggcagaagtcatcttccgaggataagaaacacgctgccaaattcggtaagttctctgggaaggatgatggctcttccttcaaggctgcccttctgagcgggcctcctggagtcggaaaaaccacgacggccagtctcgtctgtcaagaacttggctacagttacgtggaattaaatgcttcagatacgcgctctaagtccagcctcaaagccatagtcgcagagagcctcaataatacctcgataaaggggttttatagcaacggcgctgcaagttctgttagtacaaagcacgccctcattatggacgaggtggacgggatggccggcaatgaggacagagggggcatccaggagctgatcggccttatcaaacacacgaaaatccccataatctgcatgtgtaatgataggaaccaccctaaaatccggtccctcgtccattactgttttgacttacgctttcagaggccaagggttgagcagattaaaggcgccatgatgtcaattgccttcaaggaaggactgaagattccaccacctgccatgaacgagatcattttgggggccaatcaggacatcaggcaggtccttcataatttgtcaatgtggtgtgctagaagcaaggcactgacctacgaccaagctaaagccgacagccatcgcgcaaaaaaggacatcaagatgggtcccttcgatgtggcaaggaaagtcttcgctgcaggggaagaaaccgcacatatgagcctcgttgacaagtcggacctattttttcacgattattctattgcccctctgtttgtgcaggagaactatattcacgttaaacctgtggccgcggggggggatatgaaaaagcacctgatgttactttcccgcgcagcagacagcatctgtgatggtgacctggtcgattctcagattagatctaagcagaattggagccttctacctgcccaagccatctatgcctcagtgttgccaggcgaactcatgcggggatatatgactcagttcccaactttccccagctggcttgggaaacactcaagcaccggcaagcacgatcgcattgttcaggacctcgctctgcatatgagcctccggacatattcgtctaagagaacagttaatatggactatctctctttgctcagggacgcgctggtgcagccattgacaagccagggcgtcgacggagtccaagatgtggtggctctaatggacacgtattacctgatgaaggaggattttgaaaatattatggaaattagcagttggggtggcaaaccttccccattttctaagctagacccaaaggtaaaggccgctttcacccgggcctacaacaaagaggcccacttaacaccctactctctccaggcaataaaggcctctcggcatagtacatcaccctcgctcgactctgagtataatgaggaactgaatgaggacgacagtcagagcgatgagaaggatcaggatgctatcgaaacagatgctatgatcaaaaagaagactaagtcatcgaaaccgagcaagcccgagaaggataaggaaccgcgaaaaggaaaaggcaaatcgagcaagaaatag

SEQ ID NO: 26118 - DNA, 564 bp, synthetic construct
  misc_feature 1..564: note = Description of Artificial Sequence: Synthetic coding sequence
  source 1..564: mol_type = other DNA
cccgaggacagcgagaagaagcggaccaactaccaggcctaccggtcttatctgaaccgtgaggggcccaaggccctgggcagcaaggaaattcccaagggggccgaaaactgcctggaaggcttaatttttgtgatcactggcgtactggagtctatcgaaagagatgaagcaaagagtttgatcgagcggtacggggggaaagtgacaggaaacgtttccaagaagacaaactatttagttatgggccgggattctggacagtccaagagcgataaagctgctgcgctgggaacaaaaatcatcgacgaagatggtctgctcaatctcattaggacgatgcccgggaaaaagtctaaatacgagatagctgtcgagacagaggagctcggttactcttatgtcgagttgaacgccagtgacacacggtctaagtcaagtctcaaggctatagtggctgagtccctgaataacacaagtatcaagggattctactcaaacggggctgcctcttccgtgtccactaagcacgcattgattatggatgaagtggatggaatgtag

SEQ ID NO: 26119 - DNA, 1851 bp, synthetic construct
  misc_feature 1..1851: note = Description of Artificial Sequence: Synthetic coding sequence
  source 1..1851: mol_type = other DNA
atggtgggccagctgagcgagggcgccatcgccgccatcatgcagaagggggacacaaacattaagcccatcctccaggtgatcaacattaggcccatcacgactggcaatagtcctccccgctatcggttgctgatgagcgatggcttgaatacattgagctctttcatgctcgcgacacagctgaaccctcttgttgaagaagaacagctgagctccaattgtgtttgtcagatacatagatttatcgttaatactctgaaagatggcaggcgggttgtcatactgatggaactggaagtgttaaaatcagccgaagcggtgggagtgaaaataggtaatcctgtcccttataatgaaggtctcggccagccccaggttgcccctcccgcacccgcagcctcgcccgccgcatcatccaggccccagccacaaaacggtagttctggcatgggctccactgtgagcaaagcctacggtgccagcaagacattcggcaaggcagccggtcctagcctgagccacacctccggcggaacccaatccaaagttgtgccgatagcttccctgaccccctaccaatcgaagtggaccatctgcgctagggtgacaaataagtcacagatcagaacatggagtaactctcgtggcgagggaaagctgttttcactagagctggttgatgagtcaggagagatccgagcaaccgccttcaacgaacaggtggataagttttttcctctcattgaggttaataaagtatactacttttctaagggcacactcaaaatagccaacaagcagttcacagcagtgaagaacgactacgaaatgaccttcaacaatgaaacctccgtgatgccatgtgaagatgatcaccacttgcccacagtgcagtttgatttcaccggcattgacgatctcgagaacaagagcaaggactccctcgttgatataattggcatatgcaagagctacgaggacgccactaagattacagtccgcagcaacaaccgagaggtggcgaagagaaacatatatctaatggacacctccggaaaagtggtgactgctaccctctggggcgaggacgccgataagtttgacggcagcagacaacccgtgcttgcgattaagggagcgcgtgtgtccgatttcggtggacggagcctctctgtcttgtccagttccacaatcattgctaatcctgacattcccgaagcatacaagctgcgaggctggttcgatgccgaaggacaagctctcgacggtgtctcaattagcgatttgaagtctggaggggtagggggaagcaacacgaattggaaaaccttatacgaggtgaagtctgaaaacctagggcagggagacaagccagactacttttcgtccgtcgctacagtagtatatctgagaaaggaaaattgtatgtaccaggcatgccccacacaggattgcaataaaaaggtgattgaccaacagaatggcctgtaccgctgtgagaagtgcgataccgaattccccaatttcaagtatcgcatgatcctctcggtgaacatagctgattttcaggaaaatcagtgggtcacatgtttccaggagtcagctgaagccatcctaggccaaaacgctgcctatctgggtgagctgaaagataaaaacgagcaggcctttgaagaagtattccagaacgcaaattttaggagcttcattttccgcgttagggtcaaggtagagacatacaacgacgagtcacggatcaaagctacagtgatggatgtaaaacccgtggactatcgcgaatacggcagacgactcgtgatgagcataagacgatctgcacttatgtag

SEQ ID NO: 26120 - DNA, 2217 bp, synthetic construct
  misc_feature 1..2217: note = Description of Artificial Sequence: Synthetic coding sequence
  source 1..2217: mol_type = other DNA
atgaccagcagcggccccggcccccggttcctgctgctgctgcccctgctgctgcctcccgcagcttcggcctcggacagaccaaggggcagggatccagtgaatcccgaaaagttgctcgtgatcaccgtggccacggcggagaccgaaggataccttaggtttttacgctcagccgaattcttcaattacacggttcggacccttgggctgggggaggagtggcggggtggggacgtcgctaggactgtaggggggggccagaaggttaggtggcttaaaaaggaaatggaaaagtacgcagatagggaagatatgatcatcatgtttgtggatagctacgacgtgatacttgccggcagtcccacagaactcttaaagaagtttgttcagtccggatccagactgctgttctctgcagaatcattctgctggcctgagtggggcttggcagaacagtaccccgaggtgggcacaggcaagcgttttctgaactccggcggcttcattgggtttgccacaaccattcaccagatcgtgaggcagtggaagtataaggatgatgatgatgatcaactgttttatacccgtttatacctagatccaggcctgagggagaagctgtcactgaacctggatcacaagagccgaatctttcagaacctaaatggagctctcgacgaggtggtcctcaaatttgacagaaatcgagtgcgaatcagaaatgtggcatatgacacattaccgatcgtggtccacggcaacggcccaacgaagctgcaattgaactatctcggaaattacgtgcccaacggctggacaccggaaggggggtgtggtttctgtaatcaagataggagaaccctgcccgggggtcagcccccccctcgcgtgtttctggcagttttcgtggagcagcccacgccctttctcccgaggttcctccagcgcctgcttttattagactatcctccagaccgcgtgacactgttcctgcataacaatgaagtctttcacgaaccgcatatcgccgactcctggccgcagcttcaggaccactttagcgccgtcaagctggtcggcccagaggaagcactctcaccgggggaggctcgcgacatggctatggacctgtgccggcaagatcccgaatgcgagttctacttcagtctcgatgcagatgccgttctcacaaatctccaaactctgaggatcctaatcgaagagaatcgaaaggtgattgccccgatgctaagccgtcatgggaagctttggtccaatttttggggtgccctctctccagatgagtactacgccagaagcgaggactacgtggagctcgttcagcgcaaacgggtaggggtgtggaacgtgccctacattagccaggcctatgtcattcgcggcgatacactgcgaatggagctgccccagagggacgtttttagcggatcagataccgaccctgatatggctttttgcaagtctttccgcgataagggaattttccttcatctgtccaatcagcacgagtttgggcggctgttggctacctctcgctacgacacagaacatttacaccctgacctgtggcagattttcgataacccagtggactggaaggagcagtatattcacgagaactacagtagagccctggagggggaagggattgtggagcaaccatgccccgatgtatactggtttcctctgctctcagagcagatgtgcgacgagctcgtggccgagatggaacattacggccagtggtccggaggacggcacgaagactcaagactcgccggcggctacgaaaatgtgcctaccgtagacattcacatgaagcaagtggggtatgaggaccagtggcttcagctcctccggacttatgtgggcccaatgacggaatcactattcccgggctaccacacaaaagctagagccgtgatgaactttgtggtacgctacaggcctgacgaacagccatctctgcggccacatcatgattcctccacctttaccctgaacgtggccttaaaccataaagggttggattatgaaggggggggctgtagattcttacgctatgactgcgtgatctcctctccaagaaagggctgggcacttttacatcccggtcgtctcactcactatcatgaagggcttcccaccacctgggggaccaggtatatcatggtctcgttcgtcgacccttag

SEQ ID NO: 26121 - DNA, 366 bp, synthetic construct
  misc_feature 1..366: note = Description of Artificial Sequence: Synthetic coding sequence
  source 1..366: mol_type = other DNA
atggtggacatgatggacctgccccggagccggatcaacgccggcatgctggcccaattcatcgacaagcccgtttgcttcgtcggacggctcgagaagatacatccaaccgggaagatgttcatactgtcagacggagaaggtaaaaatggaactatcgaacttatggagcccttggacgaggagatttcagggatcgtcgaggtggtcgggagagttaccgcaaaagcaaccattctttgtaccagttacgtgcagtttaaagaagattctcatccattcgatttgggcctgtacaacgaagctgtgaagattattcatgatttcccgcagttttatccccttggtattgtccagcacgactag

SEQ ID NO: 26122 - DNA, 2787 bp, synthetic construct
  misc_feature 1..2787: note = Description of Artificial Sequence: Synthetic coding sequence
  source 1..2787: mol_type = other DNA
atgccccccaagaccccccggaagaccgccgccaccgccgccgccgcggctgcagagcccccagcccctccacctcctcccccaccagaagaagacccagaacaagactctggccctgaggatcttcccctggttaggctcgaatttgaggaaactgaggagccagacttcaccgctctctgccagaagcttaagatcccagaccatgtaagagaaagagcgtggcttacgtgggaaaaagttagctctgtggatggcgtgctcgggggctatatacagaagaagaaagaactgtgggggatctgtatctttattgccgcggttgatctggatgagatgtccttcacattcaccgagctgcagaagaacatagaaattagcgtgcacaaattttttaatctgctcaaggaaattgacaccagcacaaaagtagacaacgccatgagcaggttactcaagaaatatgacgtgctgtttgctctgtttagcaagttggagcgaacatgtgaactgatttatctgacccagccctcctcttccatctcaacagaaatcaactccgcactggtgctaaaagttagctggattacctttctgttagccaaaggtgaggtgctgcagatggaggatgaccttgtgattagtttccaattgatgctgtgtgttctggattacttcataaaactgtcgccccccatgctgctcaaggaaccctacaaaacagctgtaatcccaattaacggtagtccgagaactccccgtaggggccagaataggtctgcaagaatcgcaaagcagctagagaacgacactcgaatcatagaagtgctgtgtaaggaacacgagtgcaatattgacgaagtgaaaaacgtttatttcaagaacttcataccattcatgaattctctgggtcttgtcacatcaaacgggctgcccgaggtcgagaatctttcaaagaggtatgaagaaatttacctcaagaacaaggacctcgacgcgagactgtttctcgatcatgataagacactgcaaaccgactccattgatagcttcgaaacgcaaagaacaccaagaaagtctaacttggacgaggaggtcaacgtgatcccaccacacaccccagtgagaacagtgatgaatacaatccaacagctgatgatgattttgaattccgcaagcgaccagccttcagaaaacttgattagttatttcaacaactgcacagttaaccctaaggagagcatcctgaaacgcgtgaaagacattggctatatattcaaggagaagttcgccaaggctgtggggcagggatgtgtggagatcggaagccagcgctataagctaggcgtaagactttactaccgcgtgatggaatcaatgttaaaatccgaggaggaaaggttatccattcaaaatttctccaagctgctgaatgacaatatttttcatatgtcactgctggcgtgcgcactcgaagtagtgatggccacttactccaggtcaacttcccaaaatttggactcgggaactgacctgagcttcccatggatcttgaacgtgcttaacctaaaggcgtttgatttctacaaggtcatcgaatcctttattaaggctgagggaaatctgacccgggagatgatcaaacatcttgaaaggtgcgagcatcggatcatggagagcctggcatggctgagcgattcaccactgtttgacttgatcaagcagtctaaggaccgggagggcccaaccgaccacctggagtctgcctgccctctcaacctgcctctgcagaataaccacaccgccgctgacatgtatctgtctccggtgcggtcccccaaaaagaaaggctcaaccacccgcgtaaacagcacggccaatgccgaaactcaggctacaagtgcattccaaacacagaagcccctgaaatctacatctctatcactgttctacaaaaaggtttatcgccttgcctatctcaggttgaatactctctgcgagcgcctgttgagcgagcatcctgaattagagcacattatctggacattgttccagcataccctgcaaaacgaatacgaactcatgcgggatagacacctggaccagattatgatgtgcagcatgtacggcatctgtaaggtcaaaaatatcgacctgaaatttaagattatcgtgactgcttacaaagatctgccacatgctgtccaggaaactttcaagcgggtgctgataaaagaggaggaatacgactcaattatcgtattctacaatagtgtgtttatgcagcggctgaaaaccaacatcctccagtatgcctccactcgcccccctacactctctcccattccacatatccctcggagcccttacaagttcccctcttcccctctgcgcataccaggtgggaacatctacatctctcccctgaagtccccctacaaaatcagtgagggcctgccgactccaaccaagatgaccccgagatcccgaattctggtcagcattggggagagcttcgggactagcgaaaaattccaaaagattaaccagatggtatgcaattctgaccgggtccttaagcggagcgccgagggctcgaaccctcctaagccacttaaaaagctgcgcttcgatattgagggcagtgacgaagcagatggaagtaagcaccttcccggtgagagcaagtttcaacagaaattggcagagatgaccagtacacgcacacgcatgcagaagcagaagatgaacgatagcatggacacctccaataaagaagaaaaatag

SEQ ID NO: 26123 - DNA, 162 bp, synthetic construct
  misc_feature 1..162: note = Description of Artificial Sequence: Synthetic coding sequence
  source 1..162: mol_type = other DNA
atgccccccaagaccccccggaagaccgccgccaccgccgccgccgccgcggctgagcctccggcccctccacctccaccccctcctgaagaagaccccgaacaggactccggacccgaagatctgcctctcgttcgcggatctattacaaacggaagatag

SEQ ID NO: 26124 - DNA, 2724 bp, synthetic construct
  misc_feature 1..2724: note = Description of Artificial Sequence: Synthetic coding sequence
  source 1..2724: mol_type = other DNA
atgccccccaagacccccccccccgaggaggaccccgagcaggacagtggccccgaagacctgccgctggtgcgcctggagttcgaagaaacggaagagcctgacttcaccgccctctgtcagaaactgaaaatcccagatcacgttagggagagagcctggctgacgtgggaaaaggtgtcctccgtcgacggcgttctgggcggctacatacagaagaaaaaggagctgtggggcatctgtatatttatcgccgcagtagacctggacgagatgagctttacatttacagagctgcaaaaaaatattgaaatttccgtgcataagttttttaacctgcttaaagagatcgatacctcaaccaaggtagataacgctatgagtcggcttttaaagaagtatgatgtcctcttcgccctgtttagtaaactggagcggacttgcgagctcatttatttaacccaaccaagctcctctatctctaccgagatcaactccgcactcgtgctgaaggtgagctggatcacgttccttctggcaaagggagaagtgttgcagatggaggacgaccttgtgatcagtttccagctaatgctctgcgtcttggactactttatcaagctctccccccccatgctgctgaaagagccatataaaaccgctgtcatccccataaacgggtcgcctaggacacccagaagggggcagaacagatctgctcggatagccaagcagttggaaaatgatacacgaatcatcgaagtattgtgcaaggagcacgagtgtaatattgatgaggtaaaaaacgtatattttaaaaacttcataccgttcatgaactcgctgggcctggtgacttccaatgggctgccagaggtggaaaatttgtccaagcggtacgaagaaatttatctgaagaacaaggatttggatgcccgcctcttcctggatcatgataaaaccctgcagactgacagtattgatagcttcgagacacagagaacacctaggaaaagtaatttggacgaggaggtgaatgtgattcccccccacacgcccgtgaggacagtgatgaataccatacaacaactgatgatgatactcaactcagcgagtgatcaaccaagcgaaaatctgatcagctactttaacaactgcactgtaaacccaaaagagtctatacttaagcgagtcaaggatatcgggtatatctttaaggagaagtttgccaaggctgtgggtcaaggatgcgtagaaattggatcccaaagatataaactgggagtgagactctactaccgggtgatggaatctatgctgaagagtgaggaggagagattgagcatccagaatttctcaaaactgctgaatgacaacattttccatatgtcgctccttgcctgcgcccttgaggtggtgatggccacgtactcccgatcaacctctcaaaatctcgattctggcacagatctcagcttcccctggatcctcaatgttctaaatctgaaggcattcgatttctacaaggtcatcgaatctttcatcaaggcggaaggtaatctgacgagagaaatgatcaagcatcttgagcgctgtgagcatcgcatcatggagtcacttgcatggttatccgactcacccctcttcgatctcattaagcaatcaaaagacagagagggtccaacagaccaccttgaatccgcctgcccccttaacctgcctctgcagaacaaccacaccgccgccgatatgtacctgtctcctgtgaggtcacctaaaaagaaaggatctactacacgcgtcaatagcaccgccaatgccgagacacaagccacaagcgcctttcagactcagaagcccctcaagtcgacctccctgagcttattttacaaaaaggtctacagactggcctacctaagactcaataccctctgcgaacgccttctgtcagagcaccctgaacttgagcatattatttggacattgtttcagcataccctgcagaacgagtatgagcttatgcgggataggcatctcgaccaaattatgatgtgcagcatgtacggcatctgcaaggtcaagaacattgacctgaagttcaaaatcatagtgaccgcttacaaggacctgcctcatgctgttcaggaaaccttcaaaagggtgctgatcaaagaagaggagtacgatagcattatcgtgttttataattcagtatttatgcagcgtctgaaaaccaacatcttacaatacgctagtacgcgccctccaacgctgtcccctattccacatatccctcgcagtccatacaagtttccttcttcaccactccgcattccaggcggcaatatttacatctcacctctgaaatcgccctacaaaataagtgaggggttacctacccctacaaagatgacccctagaagcagaattctcgtgagcataggggagagtttcggtacttcagagaaatttcaaaagatcaaccaaatggtgtgcaacagcgatcgtgtccttaaacgcagtgctgagggcagcaacccccccaaacccttaaaaaaactgcgttttgacatcgagggatctgacgaggcagacggatcaaaacatctgcccggggaatccaagtttcagcaaaagctggccgagatgacctctacaagaacccgaatgcagaaacagaagatgaatgattctatggatacctcgaacaaggaagagaagtag

SEQ ID NO: 26125 - DNA, 2694 bp, synthetic construct
  misc_feature 1..2694: note = Description of Artificial Sequence: Synthetic coding sequence
  source 1..2694: mol_type = other DNA
atgaacatcagcggcagcagctgcggcagccccaacagcgccgacacctcgagtgattttaaggacctatggactaagctgaaagaatgccatgatagggaggtgcaaggccttcaggtaaaagtcaccaaactgaagcaagagaggatcctggatgcccaaaggttggaggaattctttacgaagaaccaacagttacgcgagcagcagaaggtactgcacgaaacgatcaaggtcttggaagaccgtcttcgtgccggcctttgcgatcgatgtgctgtgaccgaggagcacatgcgaaagaaacagcaggagttcgaaaatatcagacagcagaacctgaagctgattactgaactcatgaatgagcggaacacccttcaagaggagaataagaagctgtcagagcagctgcagcagaaaatcgaaaacgaccagcagcaccaagccgccgagctggagtgcgaagaggacgtgatacccgactctcccattacagctttcagtttttcgggggtgaatcgcctccgtcggaaagagaatcctcatgttcgctacattgagcagacgcatacgaaactggagcattctgtgtgcgccaacgagatgcgaaaggttagcaaatccagcactcatccgcaacacaatccgaacgaaaatgagatcctcgtggccgatacttatgatcaatctcagtcacccatggctaaagcacatggcaccagctcctacacaccagataagtcatcttttaacctggctacagttgtggccgaaacactgggcctcggagtgcaagaagagagcgaaacccagggtcctatgtcgcctctgggcgacgaactgtaccactgcttggaaggcaaccacaagaagcaaccgtttgaagagagcacccgaaacacagaggattctttacggttttctgactcgaccagcaagacgccaccacaggaggaacttccgactcgtgtctcatcccccgtatttggcgccacctcgagcattaagtctgggttggacttgaatactagcttgtccccatcactgctgcagcccggaaagaagaagcacctgaagaccctccctttctctaacacctgcatctcacgcctcgagaagacccgctctaaatctgaggactcagcactgttcactcaccattccctaggttcagaggtgaacaagattatcattcagagcagtaacaaacaaatcctcatcaacaagaacatctcagagagcctgggagagcagaatagaaccgaatatggtaaggatagcaacaccgacaagcatttagagccactcaagtctctgggggggaggaccagcaagcggaagaagacagaggaggagtctgagcacgaggtgtcatgcccacaggcatcctttgacaaagagaacgccttcccttttccgatggacaaccagttttctatgaatggcgattgtgtgatggacaagcccttagacctgtctgaccggttttctgcaattcagcggcaggagaagagccaggggagcgaaaccagtaagaacaagtttaggcaggtcaccctttacgaagccctcaagacaatccctaagggcttttcttcgtctcgaaaagcctccgacggcaactgtaccttgcctaaagacagcccaggcgagccctgctcacaagaatgtataattttacagcccttgaacaagtgttcacccgacaacaaaccctctctgcagatcaaagaagaaaacgccgttttcaagatacctttacgaccacgggaatctcttgagaccgagaatgtactagacgacatcaaatctgctggtagccacgaacctataaaaattcaaacccgcagtgaccacggcgggtgtgaactggcttctgtgctgcagctgaacccttgtaggaccggcaaaattaagtcactgcaaaacaatcaggacgtctcctttgagaatatacagtggtccattgatccgggagcagacctaagccagtataaaatggacgtgacagtcattgacacaaaagatgggagccaatcaaaactgggcggcgaaacagtggacatggactgcactctcgtaagcgaaaccgttttactgaagatgaaaaaacaggaacagaaaggagagaaatccagtaacgaggagcgtaagatgaatgacagcttagaggacatgtttgatcgcaccacacatgaggaatatgagtcctgtctcgcagactcctttagccaagccgccgatgaggaggaggaactcagcaccgccaccaagaaactgcatacacacggcgacaaacaggataaagtgaaacaaaaagcatttgttgagccatactttaagggggatgaaagggagacatctctgcaaaattttccacatattgaagtggtgcggaagaaggaggaaaggagaaagctgcttggtcatacgtgtaaagaatgtgaaatttactatgctgacatgccagccgaggagagggagaaaaaacttgcctcttgctctaggcaccgctttagatacatacctcctaacacgccagagaacttttgggaggtaggctttccgagcacgcaaacttgtatggagcggggatacattaaggaagacctggacccttgtcctcgccccaaacggcgccagccatataatgccattttctctcctaagggtaaggaacagaagacctag

SEQ ID NO: 26126 - DNA, 2709 bp, synthetic construct
  misc_feature 1..2709: note = Description of Artificial Sequence: Synthetic coding sequence
  source 1..2709: mol_type = other DNA
atgaacatcagcggcagcagctgcggcagccccaacagcgccgacacgtcctccgacttcaaggacctgtggacaaaactcaaagagtgtcatgatcgagaagtgcaggggttacaggttaaagtcacgaaactgaaacaagaaagaatcttggacgcgcagcggctggaggaattcttcacaaagaaccagcagctgcgcgaacagcagaaggttcttcatgaaacaatcaaggttctggaggatcggttgcgcgccgggctctgcgataggtgcgcggtgacagaggaacacatgcggaaaaaacaacaagaattcgaaaatattcgacaacagaatctcaagcttatcaccgagctgatgaacgaacggaacactcttcaggaggaaaataagaaacttagcgagcaactgcagcagaaaatagaaaatgatcagcagcatcaagcagcagagctggagtgcgaggaagacgtgataccggactcgccgattaccgcattttcttttagcggggtcaatcgacttaggcgaaaagagaacccacacgtcagatatatcgagcaaacccatactaagctagaacactcagtatgcgcaaacgagatgcgaaaggtgagcaaatcatccacccatccgcaacacaacccaaacgaaaacgagatcctggtagctgacacttacgaccaatcacagtctccaatggctaaggcccacgggaccagcagctatacccctgacaagtcatccttcaacttggccaccgtcgtcgccgaaactctaggcctcggcgttcaggaagagagtgagacacaaggccccatgtcacctctgggggatgagctctatcattgcctcgagggaaaccacaaaaagcagccttttgaagagtctacacgaaacacggaggactccctgaggttctccgatagcaccagtaaaactcctccacaggaggaactgccaacaagagtctcttcccccgttttcggagccacttcaagtatcaagtccggactggatctcaatacgtcattgtctccgtcacttctccagccaggtaagaagaagcacctcaaaaccctgccgttctctaatacctgcatctcccggctggagaaaacccgcagcaagagtgaggacagtgccctgttcactcatcacagtctcggttcggaggtcaataagatcataatccagtcctccaataagcagattctgattaataagaatattagcgaaagcctaggcgagcagaatcgcacagagtacggcaaagattccaataccgataagcaccttgaaccgctaaagagtttagggggccgtaccagtaaacggaaaaagaccgaggaagaatccgaacacgaagtgtcttgcccccaggccagctttgacaaggagaacgcctttccgtttccaatggacaaccagttcagtatgaatggagactgcgtgatggataagccgcttgatttgagcgataggttctcagcgattcagaggcaggaaaaaagccagggctctgagacgtccaaaaataaatttagacaggtgacactgtacgaggccttgaaaacaattcctaaggggttttcaagttcacgcaaagccagcgatggtaattgcacacttcctaaagattcgcccggggagccctgttcacaagagtgcatcattctgcaacctttgaacaaatgcagccctgataataaaccgagtctccagatcaaagaggagaacgcagtctttaaaatacccttgcgacctcgagaaagcctcgagactgagaacgtcctggacgacattaagtccgccggaagccacgaaccaattaagatacagactcgatcagatcacgggggctgtgagttggcttccgtgctacagcttaatccctgcaggaccgggaagataaagtctctccaaaataatcaggatgtcagtttcgagaacatacagtggtctattgatcccggcgcggatctgagccagtataagatggacgtgaccgtcatcgacaccaaggacggtagtcagtcgaaactggggggcgaaacagtggatatggactgtacactggttagtgagaccgtgctgctgaaaatgaagaagcaggaacagaagggcgaaaaatcctccatgcttttctacatcgacgaggaaagaaagatgaatgactccttagaggacatgtttgatcgcacaacgcacgaagagtacgaaagttgccttgcggattcgttcagtcaggctgccgacgaggaggaagagctaagcacagcaaccaagaaactccatactcacggggacaagcaggacaaggtaaagcaaaaagcttttgtcgaaccgtactttaagggcgatgagagagaaactagtctacagaactttccccacatcgaagttgtgcgcaagaaggaagaaaggaggaagctgctgggccacacttgtaaggagtgtgagatttactacgccgacatgccagccgaagagagggaaaagaagcttgcttcctgttcccggcataggttcaggtatatcccacccaatacgccagagaacttctgggaggtcgggtttccctcaactcaaacgtgcatggagagaggctatatcaaagaagatcttgatccctgccctcggcccaagcgccgacagccctataatgcgatattctcccctaaggggaaagaacagaaaacttag

SEQ ID NO: 26127 - DNA, 2598 bp, synthetic construct
  misc_feature 1..2598: note = Description of Artificial Sequence: Synthetic coding sequence
  source 1..2598: mol_type = other DNA
atgaacatcagcggcagcagctgcggcagccccaacagcgccgacacgtcttctgactttaaggacctttggactaagctgaaggaatgccacgacagggaagtccaggggctgcaagtaaaggtgacaaagctgaaacaagaaagaattctggacgctcagcggctcgaagaatttttcaccaaaaaccagcaactcagggagcagcagaaggtgcttcatgaaacaattaaggtcctagaggataggctgagagcgggcctctgtgacagatgtgctgttacagaagaacatatgcggaaaaaacagcaggaattcgagaatattcggcagcaaaatttgaagctgataaccgagctcatgaatgaacgtaacacattacaggaggagaataaaaagctgtcagagcagttacaacagaagatcgagaatgaccagcaacaccaggcagcagaattggagtgtgaggaagatgttattccagactctcctattaccgcattttcatttagcggggtaaacagactccggcgtaaggagaacccccacgtccgttatatcgagcagacacacaccaagctcgagcactcagtgtgtgcaaacgagatgagaaaggtctccaagtcctcgacgcacccacaacacaacccaaatgaaaatgagatattggtggctgatacttacgaccagagtcaatctcctatggccaaagcacatggcacctcttcttacaccccagacaaaagctctttcaatctagctaccgtggtagccgaaaccctggggctcggtgtgcaagaggagtcagagacacagggcccaatgtcacccttaggagacgaactgtaccattgcttggaaggcaaccacaagaagcagcctttcgaggagtcaacacggaatactgaggatagtctgaggttttccgatagcacaagtaagacaccaccccaggaagaactgcctacacgggtcagctcacctgtgttcggcgccacctccagcatcaaatctggactcgatctgaacacttctttatcaccatctctcttacagccaggaaagaagaagcatctcaagaccctccccttttctaacacgtgtatctcaagactcgagaagactaggtcgaaaagcgaggattcagccctgttcacacaccactcattgggctctgaggtgaataagattatcatccagtctagcaacaaacagattctcatcaataagaacataagtgagtcactgggcgagcagaaccgcaccgagtatggcaaagacagcaataccgacaagcacctggaacccctgaaaagcctgggcggtcgtacatccaaacgcaagaagaccgaggaggaaagtgagcacgaggtcagttgcccgcaagcgagtttcgataaggagaatgcttttcccttccctatggacaaccagttttctatgaatggcgactgtgtgatggacaaaccattggacctgagcgatcgcttctcagccatccaacgccaggaaaaatcacagggtagcgaaacctctaagaataaatttcggcaagtgacgctttatgaggccctgaaaactattccgaaaggtttctcgtcctctcgcaaggcaagtgacggtaactgcaccctgcctaaggattcgccaggcgagccgtgctcacaggagtgcattatcctccaaccacttaataaatgcagccctgataacaagccatccctgcagattaaggaggagaatgccgtgtttaagatccctcttcggcctagagagtccctggagaccgagaatgtgctagatgacattaagtctgcggggagtcatgaaccaatcaagatccagacccgctctgatcacgggggatgcgaactggcatctgtgctccagctcaacccctgcagaactggaaaaatcaaatctctgcagaacaaccaggacgtttccttcgaaaatatccaatggagtattgaccccggggcagatctctcacagtacaaaatggatgtaaccgtgatcgacaccaaagatggctcccagagcaaactcggcggcgagaccgttgatatggattgcactcttgtctccgaaacagtcctcctcaagatgaagaaacaggagcagaaaggagagaaatccagtaacgaggagagaaagatgaatgactcacttgaagacatgttcgacaggactacccacgaggagtacgaatcctgtctagcggatagtttcagccaggccgctgatgaggaggaggagctgtcaactgccacaaagaagctgcacacgcatggcgacaaacaggacaaggttaaacaaaaagcatttgtcgaaccatactttaaaggcgatgagagcatcatgcagatatgccagcagaagaaagagaagaggaattggttgcctgctcaggacacagatagcgccaccttccaccctacacaccagcggatattcggcaagcttgtattcctgccattacgcctggtgtggaaagaggttatcttgagaaaaatccttatactcgttctggtgcagaaggacgtcagcttaaccacccagtattttctgcagaaggccaggagtcgccggcattag

SEQ ID NO: 26128 - DNA, 2694 bp, synthetic construct
  misc_feature 1..2694: note = Description of Artificial Sequence: Synthetic coding sequence
  source 1..2694: mol_type = other DNA
atgaacatcagcggcagcagctgcggcagccccaacagcgccgacacttcctctgactttaaagacttatggacaaaactaaaggagtgtcatgaccgggaggttcagggcctccaagtgaaagtgaccaagttgaaacaagagagaatcctggacgctcaacggctggaggaatttttcacaaagaatcagcagctccgagaacagcaaaaggtgctgcatgagacgatcaaggtgcttgaggacagactgcgagccgggctatgtgacagatgcgccgtcactgaagagcatatgcgtaagaaacaacaagagttcgagaacattaggcagcagaatctgaagctgattactgagctaatgaacgaaaggaataccctgcaggaggagaataagaagctttcggaacagctgcaacaaaaaatcgaaaacgaccagcagcatcaggcagctgaactggagtgcgaagaagacgttatccccgactccccaattactgccttcagctttagcggtgtcaatcgtttacggaggaaagagaaccctcacgtgaggtatattgagcagacccacaccaagctggaacactccgtgtgcgccaacgagatgcgtaaggttagcaaatctagcacccatccccaacataaccccaatgagaacgagatcctggttgccgatacttacgatcaatcccagagtcctatggccaaagctcacgggaccagttcctacacgcccgacaagagtagttttaatttggcaacagttgtagcagagacgcttgggttaggcgtgcaggaggagtcggagacccaaggtccaatgagccccctcggcgacgaattatatcactgcctggaaggcaaccacaagaaacaacctttcgaagaaagtacaaggaatacggaagatagcctgcggtttagcgattctaccagtaagactcctcctcaggaggagctgcccacacgggtgtcttcccctgtgttcggcgccacctcctctatcaagagcggcctcgacttgaatacaagcttgagcccatcactcttacagccaggaaagaaaaaacatctgaagacattgcctttcagtaacacttgtatcagccgactggaaaagacgcgttctaaatctgaggatagcgctctgttcactcaccactcactggggtccgaggtgaataaaatcatcatacagtcttccaacaaacagatcctgattaacaaaaatatctccgagtccctcggggagcagaacaggactgagtacggcaaggatagcaacactgataaacacttggagccactgaaaagcttaggcggtcggacctctaagaggaagaagacagaggaagagtccgaacacgaggtgtcttgccctcaagcgtcattcgacaaggagaatgcttttccattcccaatggacaatcagttttccatgaatggagattgtgtgatggataaaccactggacctctctgatcgcttcagcgccatacagcggcaggaaaaatctcagggcagcgagactagtaagaacaaatttaggcaggtgactttgtacgaagcattaaagacaatccccaaggggttttcctcaagcagaaaggccagtgacggaaattgtacactcccaaaagacagcccgggcgagccttgcagtcaagagtgcatcatcttgcagcccctcaacaagtgtagtcccgataacaaacccagtttacagataaaagaggagaacgccgtgttcaagattcctctgcgaccgcgtgaaagtttagaaactgagaatgtgctcgacgacattaaatcggctggcagtcacgagcctatcaagatccagacaagatctgaccacggtggttgcgaactggcaagcgtgctacagcttaatccgtgcaggacaggcaagattaaaagcctgcagaataaccaggacgtgtcattcgagaatatccaatggtctatcgaccccggggccgatctaagtcagtacaaaatggatgtgaccgtgattgacaccaaagatgggtcacagtctaagctcggaggagaaaccgtagatatggattgtaccttggtcagcgaaacagtcttactgaagatgaagaagcaggagcagaaaggagagaaatctagcaacgaggagcgcaagatgaacgatagccttgaggacatgttcgacagaacaactcacgaggaatacgaaagttgcctcgcagacagtttcagccaagccgccgatgaagaagaggagctatcaaccgccaccaagaaacttcatacacacggtgacaagcaggataaagtgaagcaaaaagcgttcgtggaaccttatttcaaaggcgacgagagagagacatctctgcagaatttccctcatatcgaggtcgtgcggaagaaggaagagcggaggaaactccttgggcacacctgtaaggaatgcgagatctactacgccgatatgcctgcagaagagagggagaaaaaactagctagttgctcaaggcatagatttcgctacatcccacccaacacaccggagaacttctgggaggtcggctttccctcaacgcagacgtgcatggaaagggggtacattaaagaggatctcgatccttgtccgaggccgaaacgccggcagccttacaatgcaatcttctccccgaaagggaaggagcaaaagacttag

SEQ ID NO: 26129 - DNA, 2604 bp, synthetic construct
  misc_feature 1..2604: note = Description of Artificial Sequence: Synthetic coding sequence
  source 1..2604: mol_type = other DNA
atgaacatcagcggcagcagctgcggcagccccaacagcgccgacacgagctccgatttcaaagatttgtggacgaagctgaaggagtgccacgatagagaggtgcaagggttacaagtgaaagtgaccaaattgaagcaggaacgcatcctcgacgctcaacggctcgaagaattcttcactaaaaatcagcagctcagggagcagcagaaagtactgcacgaaacaattaaggtgctcgaagaccgcttgagagcagggctatgtgaccgctgtgccgtcacagaagaacacatgaggaagaagcagcaagagttcgaaaacattcgccagcagaatctgaagctgattacagaactcatgaacgaacgaaatacactgcaggaggaaaacaagaagctgagtgaacagctgcaacaaaagatcgaaaatgaccagcagcaccaggctgccgaactcgagtgcgaggaagatgttatccctgatagccctatcacagctttctcattttcgggcgttaaccgactgcggcgaaaggagaatcctcacgtgagatacatcgagcagacccatactaagttggaacacagcgtatgcgccaacgaaatgaggaaggtgagcaagtcatcgacccacccgcagcataaccccaatgagaatgagatattggttgctgacacgtacgaccagtcccagagccccatggcaaaggcccacggtacttcttcctatacgcctgacaaaagcagcttcaaccttgctaccgtagtggcggagaccttggggctgggggtgcaggaagaatcagaaacccagggacccatgtccccgctcggcgacgaactctatcattgcttggaaggaaatcacaaaaagcagcccttcgaggaaagcactagaaatactgaagactccctgaggttttccgacagcacctcaaaaacaccaccacaggaggagttgcccacaagggtctccagccccgtctttggggccacaagctccatcaaatctgggctcgatttaaacacctcccttagcccaagtctgttgcaaccagggaaaaagaaacacctgaagactttacccttctcaaacacttgtattagtcggttggagaaaacccggtcaaagtccgaggattctgcactgtttactcaccacagtctcggttccgaggtcaataagatcataattcagtcttctaataagcagatactcattaacaaaaacatcagtgagtcactcggggagcaaaatcggacagagtatggaaaagatagtaatactgacaagcacctcgagcccttgaaatccctgggggggcggacatcaaagcgcaaaaagactgaggaggagtcagagcacgaagttagctgtccgcaagcgagttttgataaagagaatgccttcccatttcctatggataaccagttctccatgaacggcgactgtgtaatggataagcccctggatctgtctgatcgattcagtgccatccagagacaggagaaatcccagggatcagaaacctccaagaataagttccgccaagtgacgctttacgaggcactgaagacaatacctaagggttttagctcctcacggaaagcaagcgatggcaactgtacactccctaaagatagtcctggcgagccgtgcagtcaggagtgcatcatactgcagccccttaacaaatgtagtccagataacaagccctccctacagattaaggaggagaacgccgtcttcaagatccccctccgcccacgggagtcccttgaaactgagaacgtcctagacgatattaagtccgccggatcacacgaaccaatcaaaatccaaacccgttctgatcacggtgggtgtgaactggcctccgtcctgcagcttaacccgtgccgcacagggaagatcaagtcgctacagaataatcaggacgtgagcttcgaaaatattcagtggagcattgatcctggtgcagacctgtcacagtacaagatggatgtcactgtcattgacaccaaggacggaagccagagtaagcttgggggcgaaaccgtggatatggattgtacgctcgtgagtgagactgtgctgctgaaaatgaaaaagcaggaacagaaaggcgagaagagctctaatgaagagcggaagatgaacgatagtctcgaagatatgttcgacagaactactcatgaggaatatgaatcatgcctcgccgattcattttcccaggccgccgacgaagaggaagagttgtcaactgctactaagaagctgcacacgcacggtgacaaacaggataaggtgaagcagaaggctttcgtggaaccatacttcaaaggcgatgagtcaatcatgcagatatgccaacaaaaaaaggaaaagagaaattggttgcctgcacaggacacagactcagcaacatttcatccaactcatcaaaggatattcgggaaacttgtattccttcccctgcggctggtgtggaaggaagtgatactgcgaaagattttgatcctcgtactcgtccaaaaggacgtgagtctaactactcagtacttcctgcagaaagccagatcccgccggcacaggagatag

SEQ ID NO: 26130 - DNA, 3045 bp, synthetic construct
  misc_feature 1..3045: note = Description of Artificial Sequence: Synthetic coding sequence
  source 1..3045: mol_type = other DNA
atgttcgaggacaagccccacgccgagggcgccgccgtggtggccgccgcaggcgaggccttgcaggccctgtgtcaggagctgaacttggatgaaggtagcgctgcggaggccctggatgattttaccgccattaggggaaattactctttggagggagaggttactcactggcttgcttgttccctgtacgtggcctgtagaaagagcataatccccaccgtgggcaaggggataatggaaggtaattgtgtctctttgacacgcatcctccgcagcgcgaagctttccctcatccagtttttctccaaaatgaagaaatggatggatatgtccaatctgcctcaagagtttagagaacggatcgagagacttgagcgaaactttgaggtgtcgacagtgatcttcaagaagtacgagcccatctttctcgacatatttcaaaacccttacgaggagcctcctaagctgcctaggtctcgcaagcaacggcgcattccctgttcagtgaaagatctgttcaatttttgttggacgctgttcgtctacactaagggaaactttcgcatgataggagacgacttggtcaattcatatcacctgctcctatgttgtctggacctcatctttgcgaatgccattatgtgcccgaatcgacaagatctactgaacccttcttttaaaggattgccctccgatttccatacggctgactttaccgctagcgaagagccgccatgcatcattgctgtgctgtgtgagctgcatgatgggcttctcgtcgaggctaaaggtatcaaagagcactattttaagccctatatctctaaactgttcgatcgcaagattctgaaaggcgagtgccttttagacctctcatcttttactgacaacagcaaggcagtcaacaaggagtatgaagaatatgtcctgacggtcggggactttgacgagcgcatctttttgggtgcagacgccgaagaggaaatcggtaccccgaggaaatttaccagagacacgcctcttggcaagttaacagctcaggcgaacgtggaatacaatctgcaacagcactttgaaaagaagagaagttttgcaccctcaactccactaactgggcgccgatatttgcgagaaaaagaagcagtgataaccccggtggcgtctgctactcagtccgtgagcagactgcaaagcatcgttgcagggttaaagaatgcaccatccgatcaactgattaacatttttgagtcctgcgtacgcaacccagtcgagaatattatgaagattctgaagggcatcggagagacgttctgtcaacattatactcagagtactgatgaacagccggggagccacatagacttcgccgtcaacagattaaagctggcggaaatcctatactacaagatcctggaaaccgtgatggtgcaagaaaccagaagactccacggtatggacatgagtgtgctactcgaacaggacatttttcacagatcactgatggcttgctgccttgagatagtcctgttcgcctatagtagtcctcgtaccttcccttggatcatcgaggtgttgaatctgcagcccttttatttctacaaagtcattgaagtggtaatcaggagtgaggaaggacttagccgcgacatggtgaaacacctgaactcaatcgaggaacagatcttagaatcactggcgtggagccatgattccgccttgtgggaagctctgcaggtcagcgccaataaggttccaacttgcgaggaagtcattttccctaacaactttgagacagggaacggcggaaatgtccagggacacctcccattgatgccaatgtctcctctgatgcatcccagggtgaaagaggtccggacagactctggcagtctgagacgggacatgcagccactatcgccaatcagcgtacatgagaggtacagctcgccaaccgctggaagcgccaagaggaggctgttcggggaggatccacctaaagagatgctgatggacaaaatcatcacggagggcacaaagctaaagatcgccccctcaagctcgatcacagcagagaatgtgtctatcctcccaggacaaacacttttgaccatggccacagccccagtaaccggaactacaggacataaggtgaccataccactgcatggggtggcaaatgacgccggtgagataacgctgatccctctgagcatgaataccaatcaggaaagcaaggtaaagagcccagtgtccctgactgcccatagcctcatcggtgcctcccctaaacagactaatctcaccaaggcccaggaggtccattcaacaggcatcaatcggccaaagaggacagggtcgttggcattgttttatagaaaggtataccatttagccagcgttcgactcagagacctctgtctcaagctcgatgtaagtaacgagcttcggaggaagatctggacttgcttcgagttcacactcgttcactgccccgaccttatgaaggacaggcatctggaccagctgctattatgtgcattttatatcatggccaaagtaaccaaagaggagagaacatttcaggagattatgaagtcctaccgtaaccagccacaggcgaattcacatgtttatcgttctgtgttgctgaagagcattccgagggaagtcgtggcatataacaagaacattaatgacgacttcgagatgattgattgcgaccttgaagacgctacaaagaccccagactgtagctcggggccagtgaaggaggagcgtggagacctgattaaattttataacacaatttatgtgggtagggtcaaaagttttgctcttaagtacgacctggccaaccaggatcatatgatggacgccccaccactgtcccctttcccccatatcaaacagcagccaggcagtcccaggcgcatcagtcagcagcacagtatttacatttctccccacaagaatggaagcgggctaacacctaggagcgcgctgctatataaattcaacggaagcccctccaaagttcggtag

SEQ ID NO: 26131 - DNA, 3207 bp, synthetic construct
  misc_feature 1..3207: note = Description of Artificial Sequence: Synthetic coding sequence
  source 1..3207: mol_type = other DNA
atgttcgaggacaagccccacgccgagggcgccgccgtggtggccgctgccggtgaagcactgcaggccctgtgccaggagcttaatcttgacgaggggtccgccgctgaggctctggatgacttcacagcgatccgcgggaactattcgctagagggtgaggtaacacattggctggcctgtagtctgtatgtcgcctgtcgcaagtctataattccgacagtgggcaaaggaatcatggaggggaattgtgtgagtcttacacggatcctccgcagcgccaagttatcgctgattcagttcttctccaagatgaagaagtggatggatatgtctaatttacctcaggagtttcgcgagcgcatcgaacggctagagagaaatttcgaggtatcgacagtgatatttaagaaatatgaacccatattcttggatatttttcagaatccatacgaggagccacctaagctgcctaggtctaggaagcagcgtcgcatcccttgcagtgttaaggatctgtttaacttttgctggaccctgttcgtttacacgaaaggaaactttcgcatgataggcgacgatttggtgaattcgtatcatctacttttatgttgccttgatctaattttcgcgaatgcaattatgtgtcccaatagacaagatctgctcaaccctagtttcaaggggctgccctctgacttccacaccgcagactttaccgcatcagaagagcccccgtgtattatcgctgtgctgtgcgagctccacgatggacttctggtcgaagctaaggggataaaagagcattacttcaagccttatattagcaaactgttcgatcgtaagatcctaaagggtgagtgtctcctggacctgagctccttcaccgataacagcaaggccgtgaataaggagtatgaggaatacgtgctaactgtcggcgactttgatgagaggatctttcttggggcagatgcggaagaggaaatcggaaccccgcgcaaattcactagagatactcccctagggaagctgaccgcccaagccaatgtcgaatacaacctgcagcagcacttcgaaaagaagcgttccttcgccccctcaacacccctgactggtcggcggtatctgcgggaaaaagaggctgtgattacccctgtggcctctgctacccagtcagtgtcgcgtcttcagtccatcgtggctggactgaaaaatgcacctagcgaccagctcattaacatcttcgaatcgtgcgtgagaaatccagtagaaaacatcatgaaaatactaaagggaatcggagagacgttttgccagcactacacgcagtctaccgatgagcagcccggctctcacatcgatttcgctgtgaatagactgaagctggcagaaatcctgtattacaagattttagagaccgtgatggtacaggaaacccggcgtctccacggcatggatatgagcgtgcttctggaacaggacattttccaccggtcgttgatggcttgttgcctggaaatagttctctttgcatactcttcacctcgaactttcccatggattatcgaagtactgaatctgcagcccttttacttttacaaggttattgaagttgtgattcggtctgaggagggtctgtcacgcgacatggtaaagcacctaaactctatcgaagaacagattttggagtctttggcctggtcacacgactcagcgctgtgggaggctctgcaggtgtccgcgaataaagtgcctacatgcgaggaggtgattttccccaataacttcgagactggaaacgggggtaatgtgcagggccacctgcccctcatgcccatgtctcccctgatgcatcctcgcgtgaaagaggtccgcacagacagcggctccctgcggcgggatatgcagcctctgtcaccaatttcggtccacgagcggtattccagccccaccgccgggtccgcaaaaaggcggctgtttggggaggatccccctaaagagatgcttatggacaagatcatcacagaagggacgaaactgaagatcgcgcccagctcctctatcacggccgagaacgtatctatactcccggggcagacgctgctcacgatggcgaccgctcccgtcaccggtaccacaggccacaaagtgactatccctctccacggcgtcgcgaatgacgctggtgaaataacactgatccccctgtctatgaacaccaaccaagagtcaaaggtcaaatccccagtgtctctgaccgctcacagtctgatcggtgctagtccaaagcaaaccaatctgaccaaagcgcaggaggttcactcgaccgggataaaccgccctaagcgtactggttctctggccctgttctacaggaaggtgtaccatttagccagcgttcggttgagggatctctgtctcaagcttgatgtgtccaacgaacttagacggaaaatctggacatgctttgaatttaccttggtccactgccctgacctcatgaaagatagacacctggaccagcttctcttatgcgccttctatatcatggccaaagtgacaaaagaggagagaactttccaggagattatgaagagctacaggaaccagccacaagccaatagtcacgtctatcggagcgttctactgaaaagcataccacgtgaggtcgttgcctataataagaacatcaatgacgacttcgagatgatagattgtgacctcgaggatgctactaaaacaccagactgctctagcggacctgtgaaggaagagcggggtgacctgatcaaattttataacacaatctacgtcggcagagtgaaaagctttgcactcaaatatgacctggccaatcaggatcacatgatggatgccccacccctgtccccgtttccccacatcaagcagcagcctggctccccccgccgcatcagccagcaacacagcatctatatatccccacacaaaaacggttccggcctgacacctcgttccgctcttttatataagtttaatggatccccctctaagagccttaaagatatcaataatatgatcagacagggcgaacaacggactaagaaacgggttatcgctatagactctgacgccgaatctccggcgaaaagagtatgtcaggagaacgatgatgttttgctgaaacgcctgcaggatgttgttagcgaacgtgctaatcactag

SEQ ID NO: 26132 - DNA, 3420 bp, synthetic construct
  misc_feature 1..3420: note = Description of Artificial Sequence: Synthetic coding sequence
  source 1..3420: mol_type = other DNA
atgcccagcggcggcgaccagagccccccccccccccccccccccccagccgccgcagcttctgacgaggaagaggaggatgacggcgaggcagaggacgccgcccctcccgctgagtccccaacgccacagatccagcagcgattcgacgagttgtgcagccgacttaacatggatgaggccgccagggctgaagcttgggactcatatcggtctatgtccgaatcctatacactggaggggaacgatctgcactggctggcatgtgccctatacgtggcatgtcgaaagagcgtccctaccgtgtccaagggcaccgttgagggaaactacgtttccctgacgcgcatcctaaaatgctctgaacagtcgctcattgaattttttaataagatgaaaaaatgggaagacatggccaacttgcctcctcattttcgcgaaagaactgaaaggcttgagagaaatttcactgtctcggctgtgatcttcaagaaatatgagccgatttttcaggatatatttaagtacccacaagaggagcaacctcgccaacagcgcgggaggaaacaaagacgtcaaccctgcacagtgtccgaaatattccatttctgctgggtgcttttcatatatgccaagggtaattttccgatgattagcgacgatttagttaactcctatcatctgttgctgtgtgctttggatctcgtttatggaaatgctttacagtgttcaaatcgaaaggagctagtcaacccgaacttcaaaggcttgtcggaggactttcatgcgaaggacagcaagcccagtagcgacccgccatgcatcattgagaagctgtgttcactccatgacggccttgtgcttgaagccaaggggatcaaggagcacttctggaaaccatatatccgcaaactgtacgagaagaagcttctcaaaggaaaagaggaaaacctgaccgggtttctcgaacctgggaactttggggagtcgtttaaggccatcaataaagcatatgaagagtatgtactgtccgttggtaatctcgatgagcgcattttcttgggcgaagatgcagaagaagagattggcaccctttcaagatgcttaaacgctggaagcggcaccgagacggctgaacgggttcagatgaagaacatccttcagcagcacttcgacaagtcaaaagcgctacgtatcagtacccccttaaccggtgtcagatacattaaagaaaactcaccctgcgtgacacctgtgtccaccgctacccacagtctcagccgactacatactatgctgaccggtctgcggaatgccccctccgagaagttggagcagatcctgcggacctgttctagggacccgacgcaagcgatcgccaatagactcaaagagatgttcgaaatttactcgcagcactttcagccagacgaggacttcagcaactgtgctaaggagatcgcctccaagcattttcgctttgccgagatgctttactacaaagtgttggagtcagtaattgagcaggagcaaaaacgactgggagatatggatctgagcggcatcctggaacaagatgcatttcatcggagcctgctggcctgttgtttagaggtggtgaccttctcctataaaccccccggcaattttccttttattactgagatattcgatgtcccactctaccatttctataaggtcatcgaggttttcattcgtgctgaagatgggctctgcagggaggtggtcaaacacctgaaccaaatagaagaacagattctagatcatttagcttggaagccagagagccctttgtgggaaaaaatccgggataatgaaaaccgcgtacctacatgtgaggaggtgatgcccccgcaaaatttagagcgagccgatgagatctgtattgctggctctccgctgacccccagacgggtcaccgaggttagagccgataccggtggattaggtcggagtataacctctcctaccacgctgtacgaccgctactctagtccacccgcatcgaccacccggagaaggctttttgtcgagaatgactcgccttccgacggcggcacccccggcagaatgcccccacagcctctagtcaatgccgtacccgttcagaacgtgtctggtgagacagtctcggtgaccccagtaccgggccagaccttggttaccatggccaccgctacagtgactgctaacaatggccaaacagtgactattccagtccagggcattgcgaacgaaaatggggggattaccttcttcccagttcaggttaacgttggcggccaggcccaagctgtgactggaagcatccagcccctatccgcccaggcgctggccgggagcctgtcttctcagcaggttacagggaccacactccaagtccctggtcaggtggccattcagcagatctcccctggtgggcagcagcaaaaacagggacagtctgtaaccagttccagtaatagacccagaaagactagctcactgtcccttttctttcggaaagtgtatcacctagctgctgtcagattgcgggacctctgcgcaaagctggacatctccgatgaactaagaaagaagatctggacctgctttgaattcagcattatccagtgcccggaattgatgatggaccgccacctagaccagctgctgatgtgcgccatttacgtgatggccaaggtgacgaaagaagataaaagtttccaaaacatcatgagatgttaccgtacacaaccacaagcacggagccaggtataccgaagcgtcctgattaaaggcaaacgaaagcggcggaattcaggatcctcagacagcagaagccaccagaattcccccaccgaactgaataaggaccgcacctccagggactcttctccggttatgagatcctcctccacactgcccgtcccccaaccctccagtgcaccgccgacacctactagactcactggggctaatagcgatatggaagaggaggagcgcggtgatttgatacagttttataataacatttacataaaacagatcaaaacgttcgcgatgaagtattctcaggcaaacatggacgcccctcccctgtctccctatccttttgtcaggacagggtctccacgacggatacaactctcccagaaccatcccgtgtatatctctcctcataagaacgagacaatgctgagccctcgggaaaagatcttctactatttcagtaactcaccctccaaacgccttcgtgagatcaattcgatgatacgtacaggcgaaactcccacgaagaagcgcggcattctcctagaggacggctccgagtcacccgctaaaagaatttgccccgagaatcacagtgcccttctgaggagactccaggatgtggccaatgacagggggtcacattag

SEQ ID NO: 26133 - DNA, 2550 bp, synthetic construct
  misc_feature 1..2550: note = Description of Artificial Sequence: Synthetic coding sequence
  source 1..2550: mol_type = other DNA
atggagagccggtgcgtggcccaggccggcatgcagtggcacgacctgggcagcctgcagcccctaccgccgaggtttaagaggtttttttgtctctcactcctgagctcctgtgaatacagcaaggcgataaataaagcttatgaggagtatgtgttgagcgttggcaacctggatgagcgaatatttctaggtgaagatgccgaggaggagataggtacactatcgaggtgcctgaatgcaggaagtggcactgagaccgctgagcgagttcagatgaagaacattcttcagcagcactttgacaaaagcaaagctttgcgaatctccacacccctgaccggagtgcggtacatcaaagagaactctccctgcgttacacccgtgagcaccgcaacacattcccttagcaggctgcacactatgctgacagggctcaggaacgctcctagcgagaagttagaacagatcctgcggacttgctcccgcgatcccacgcaggccattgcaaaccgactgaaggaaatgttcgagatttatagccaacacttccagccagacgaggacttttcgaattgtgctaaggagatagcaagcaagcatttccgctttgccgaaatgctgtactacaaggtgttagaatctgtgattgaacaagaacagaagcgcctgggcgacatggatctgtctgggatcctggaacaggacgcctttcatagatccttgctggcatgttgtcttgaggtggtgacgttttcctacaagcctcccgggaatttccctttcatcacagagatatttgacgtccctctgtaccacttctataaagtcatcgaggtgttcatcagggccgaggacggactatgccgcgaagtagtcaaacatctgaaccagatcgaagaacaaatcctcgaccacctggcctggaagcctgaaagcccattgtgggaaaagatccgcgacaatgagaatagggtgcctacttgcgaggaggtcatgcctccacagaacctggagagggccgatgaaatctgtatagccggatctccgctcacgccccgccgggtgactgaggtcagagccgacactggagggctgggccggtcaattactagtccaactaccctgtatgatcgatactcctcgccaccagctagtactacacgcaggcggctgtttgtggagaacgacagcccgtctgatggggggacaccagggagaatgcccccacagccgctggtgaacgcagttcccgtgcagaatgtttccggagagaccgtgagcgtcacaccggtgcccggccaaactctggtgacgatggccaccgcaacggtaaccgccaataacggacagaccgtcacaatcccagtgcagggcatcgctaacgagaatggggggataaccttctttcctgtccaggtcaatgtcgggggtcaggcgcaggccgtgaccggctctatccagccactttctgcccaggctctagcaggtagcctcagttcccaacaggtcactggtaccacactccaggtgcccggccaggtggcgattcagcagatctcccccggcggacagcagcagaagcaggggcagagtgtgaccagttcatctaaccggcccaggaaaaccagctcactttccctcttcttcagaaaggtgtatcatctggccgctgttcgcttaagggatctctgtgctaaactcgatatctcagatgagctacgcaaaaaaatttggacatgcttcgaattctcaataattcagtgtccagagctgatgatggatcgccacctagaccagctactgatgtgtgctatctacgttatggcaaaagtgaccaaagaagacaaatctttccagaatatcatgcggtgttataggacccagccccaggcaagatcacaagtgtaccggtctgtgctgataaaagggaagaggaagaggaggaactcaggctcatccgactctcggagccaccagaatagtcctacggaactcaacaaagacagaacctcccgtgacagttcccctgtgatgcgctcgtcctccacactgcctgtcccgcagccatctagtgcacctccaacccctactagactcacgggcgctaatagtgacatggaggaggaagagcgcggcgacctaatccagttttataacaacatctacataaaacagattaagaccttcgcaatgaagtattcacaggccaacatggacgctcctccgctttcaccttatcctttcgtcaggaccgggagtcccagaaggattcaacttagccaaaaccacccagtctacatctcccctcataagaacgagaccatgttgtcccctagggagaagattttctattacttcagtaatagcccgagtaagcgccttcgcgaaatcaactctatgattcggaccggcgagacccctacaaagaagcggggaatcctgctggaggacggctccgagagccccgccaagcgtatctgtcctgaaaatcactcagctcttctccggcgtctgcaggacgtggctaatgaccgcggttcacattag

SEQ ID NO: 26134 - DNA, 1668 bp, synthetic construct
  misc_feature 1..1668: note = Description of Artificial Sequence: Synthetic coding sequence
  source 1..1668: mol_type = other DNA
atgcagagcctgaccaagggcaacgacctgcactggctggcctgcgctctttatgtggcctgcaggaaatccgtcccaactgtgtctaaaggcacagtagagggaaactacgtgtccctgacaaggatactgaagtgtagtgagcaatcattgatcgaattctttaataagatgaaaaaatgggaggacatggctaatttgccaccacacttccgcgaacggacagagcgactggagaggaatttcacagtttcagccgttatattcaagaaatacgagcccatattccaggatattttcaaatacccccaagaggagcaaccacgccagcaaagaggtcggaagcagagaagacagccgtgtaccgtgagtgagatctttcatttttgctgggtgctgttcatctacgctaaggggaattttcccatgatcagtgatgaccttgtgaatagttatcatctgctgctctgtgcactggatttggtttatggcaatgccctgcagtgttctaataggaaagagctggttaatccaaatttcaagggcttgtctgaggatttccacgctaaagattccaagccatcttctgatcctccatgcatcattgagaaactgtgttccctacacgacggcctggttcttgaagctaaaggtattaaagagcatttttggaagccttacattcgtaagttatacgaaaaaaaactccttaagggtaaggaagagaaccttaccgggttcctcgaacccgggaatttcggcgagtctttcaaagccatcaacaaggcttatgaagaatacgtgctcagcgtgggcaacctcgatgagcggatattcttaggtgaagatgccgaagaggaaatcggaactcttagcaggtgccttaatgcaggctctggaacagagacagccgagcgagtccagatgaagaacatattgcagcagcacttcgataagagtaaagctctgcgcatctccactcctttgacaggcgttcgctatattaaagaaaacagcccttgcgtgaccccagtgtccaccgccacccacagcctcagtcgcttgcacacaatgctgactggcctccgcaacgccccttcggaaaagctggagcagatcctccgaacctgcagccgggatcctacccaggccattgcgaaccggctcaaggagatgtttgaaatctattcccagcactttcagccagatgaggatttttctaactgtgccaaagagatcgcttccaagcatttccggttcgctgagatgctctattataaagtgttagagtcagtgatcgagcaggaacagaagcgcttaggcgatatggatctctcggggatcttggagcaggatgcgtttcacaggtctcttttagcctgctgtttggaagtcgtcactttcagttataaaccaccaggtaatttccccttcatcaccgaaattttcgacgtgccactctaccacttttataaagtcatcgaagtgttcatccgagccgaggatgggctgtgtcgcgaggttgtgaagcatctgaatcaaatcgaggagcagatattagaccacctagcctggaagcctgagagtcccctgtgggaaaagatccgagacaatgagaaccgggtcccgacttgcgaggaagtcatgccacctcagaatctcgagtag

SEQ ID NO: 26135 - DNA, 1557 bp, synthetic construct
  misc_feature 1..1557: note = Description of Artificial Sequence: Synthetic coding sequence
  source 1..1557: mol_type = other DNA
atgatcagcgacgacctggtgaacagctaccacctgctgctgtgcgccctggatctagtctatgggaacgctcttcagtgttctaaccgcaaggaacttgttaacccaaacttcaaagggctgtcagaggatttccacgctaaagactcgaaaccaagcagcgaccctccgtgcatcatcgagaaactgtgcagcctgcacgacggccttgtgctggaggcaaaagggattaaggagcacttctggaagccctatatcagaaagttatacgagaagaagctgctgaaaggaaaggaggaaaatctgactggctttctggagccgggcaactttggggagagttttaaggctatcaataaggcttacgaagaatacgtactgtctgtggggaacctcgacgagcgcatatttcttggagaggatgctgaggaggaaattgggaccttgagtcgctgcctgaatgccggaagtggtaccgagacagcggagagagtccagatgaagaatattctacaacagcacttcgacaaatccaaggccctgcgaatctctacccccctgaccggggtgagatatatcaaggagaactctccctgcgttacacccgtaagtacggctacccacagtctgagtcggctccatacaatgttgaccggcctgcgaaacgcgccaagtgaaaagttggagcaaattctgcggacatgctctagggaccctacccaggctattgcgaatcgccttaaggaaatgttcgagatctacagccagcacttccagcccgacgaggacttctctaattgtgccaaagaaatcgcctcaaaacacttcaggtttgccgagatgctctattacaaagtgctggagtccgtcatcgagcaagaacagaagcgcctgggcgatatggatcttagcggcattctcgagcaggatgccttccacaggagcctgctggcgtgttgtctggaagtcgtgactttctcatacaaacctcccgggaatttcccatttatcactgagatttttgacgtgccgttgtatcatttctataaggtgatagaagtctttattcgcgccgaggacggcctctgtcgggaggtggtaaagcacctcaatcagatcgaggagcagatacttgaccacctagcttggaagcccgagtcacccctctgggagaagattcgcgataacgaaaatagggttccaacatgcgaggaggtcatgccacctcaaaatttggaacgcgccgatgagatttgtatcgccgggtctccaagaagaatacaactgagccagaaccacccagtgtatatctctccacacaagaatgagacaatgctgtcaccccgtgagaagattttttactacttcagcaattctccgtctaagagactccgggaaattaactctatgatccgtaccggcgaaacaccaactaagaaaaggggaatcttgctggaagacggcagtgaaagtcccgctaagaggatctgccccgagaaccacagcgcactcctacggagattgcaggacgtcgctaacgacagaggttcacactag

SEQ ID NO: 26136 - DNA, 1347 bp, synthetic construct
  misc_feature 1..1347: note = Description of Artificial Sequence: Synthetic coding sequence
  source 1..1347: mol_type = other DNA
atgttcgactgcatggacgtgctgagcgtgagccccggccagatcttggacttttatacagctagcccttctagctgtatgctacaagagaaagccctgaaagcatgcttcagcggactcacccaaacagagtggcagcacagacacactgctcagtccatagagacccagtcaaccagctctgaagaactggtcccaagtcccccctcccccttgcccccaccaagagtttacaagccttgctttgtctgtcaggacaaaagctcgggctaccactacggtgtgagcgcctgtgagggatgcaaaggattcttccggaggtcaatccagaaaaacatgatttacacttgtcatcgcgacaagaattgcgtgataaataaggttacccgtaaccggtgtcagtattgtcgactccagaagtgttttgaagtcggtatgtctaaagaatcagtcagaaatgatcgtaataaaaaaaaaaaggagacaagcaagcaagagtgcaccgagagctatgagatgacagccgagctcgacgatctcactgaaaagattcgaaaagcgcaccaggagacattcccttcgctgtgtcaactcggaaaatacaccactaattcctcagccgaccatcgggtgcgactggatctcggattatgggataagtttagcgaactagcgacaaaatgcatcattaaaatcgttgagtttgcgaagcgcctaccaggctttacagggcttacaatcgctgaccagattaccctactgaaggccgcgtgtctggacattttgatcctgcgcatttgtactaggtatacaccggagcaggacacaatgactttcagcgacggtttgacacttaaccggacacagatgcacaacgccgggttcggccccctaacggacctggtctttacctttgctaaccagctgctgccactcgaaatggatgacaccgagaccggactcctgtccgccatctgtctcatctgcggagataggcaggatttggaagaacctacaaaagtggataaactccaggaacctctactggaagcattgaagatttacatcagaaaaagacggcccagtaaaccacatatgttccccaaaatcctgatgaagatcactgatctccggagcatcagcgcaaaaggcgccgaacgcgtcattacacttaagatggagatcccagggtccatgcccccactaatacaggagatgctggaaaatagcgaaggccatgaacctctaacgccttcctccagcgggaatacagctgagcatagcccctcaattagcccctcgtctgtcgagaattccggcgtctcccagtcccccctcgtccagtag

SEQ ID NO: 26137 - DNA, 1368 bp, synthetic construct
  misc_feature 1..1368: note = Description of Artificial Sequence: Synthetic coding sequence
  source 1..1368: mol_type = other DNA
atgaccaccagcggccacgcctgccccgtgcccgccgtgaacggccacatgacccactaccctgctacaccctatccactcctatttccacctgtaatcggcggtctctctctgcctccccttcacgggcttcacggccacccacctcccagcggatgctctacacctagccctgcaaccatcgagactcagtctacatcctccgaggagctcgtcccgtctccaccatcgccccttccccctcccagggtgtataaaccttgctttgtgtgtcaggataagtcctccggctaccactacggagtgtcagcctgcgagggttgcaagggtttctttaggcggagcatacagaaaaacatgatttatacttgccaccgggataagaactgcgtgatcaacaaagtgacacgcaaccgctgtcaatactgtaggctgcaaaagtgctttgaggtgggcatgtcaaaagagtcagtgaggaacgacaggaataagaaaaaaaaggagacttctaagcaggaatgcactgagtcttatgagatgaccgcagagctagacgacttaaccgaaaagataagaaaagcacatcaggagactttcccgagcctctgccagctgggcaagtatactactaacagctccgcagatcatagagtccgtttagatctgggcctgtgggataaattttccgaactggctacgaagtgcatcattaaaatcgttgagttcgctaaaagactgcccggctttaccggtctgaccatcgcggatcagatcactctcctgaaggccgcgtgcctggacatactgatactccgtatttgcacccgctatacgcccgaacaggatacaatgacgtttagtgacggtttgaccctaaaccggacacagatgcataacgcaggatttggccccttaaccgaccttgtgttcacgtttgctaatcagctgcttcctctcgaaatggacgataccgaaacagggctgctctccgcaatctgtctgatttgtggggacagacaagatctggaagagccgaccaaagttgacaagctgcaggagcctttgttggaggcgctaaagatctacatacgcaaaaggcggccctccaaacctcacatgttccctaagatcttgatgaagatcaccgatttaaggtcaatcagcgctaaaggtgcagagagagtgatcacccttaagatggaaatccctggatcaatgcctcccctgatccaagaaatgctggagaatagtgaaggccacgagccactaaccccgagctcgtctggcaacacagccgagcatagtccctctatcagccctagttcggttgagaattcgggtgtatctcagtcccccctggtgcagtag

SEQ ID NO: 26138 - DNA, 1011 bp, synthetic construct
  misc_feature 1..1011: note = Description of Artificial Sequence: Synthetic coding sequence
  source 1..1011: mol_type = other DNA
atgatctacacctgccaccgggacaagaactgcgtgatcaacaaggtgacccgaaatcggtgccaatactgtcgcctccaaaagtgtttcgaggttggcatgtctaaggaaagcgttcggaatgaccgcaacaaaaaaaagaaagagacatccaaacaggagtgtaccgagtcctatgaaatgaccgcggaattggacgatctgaccgagaaaatccgcaaggcacatcaggagactttcccttccctgtgtcagttgggcaaatacacaacgaacagtagtgctgatcatcgagtgcgtctggacctcggcctctgggacaagttttccgagctggcaacaaaatgcataataaagatcgtcgaattcgccaaacgtctgcccgggttcactggcctcacaattgcagatcaaattactctgctcaaggctgcgtgtttggacatcctgatccttagaatttgtacgaggtacaccccagaacaggataccatgacgttctccgatggacttacgctgaaccgcactcaaatgcataatgccggcttcggccccctgaccgacttggtgttcacattcgccaaccagctgttaccgttggaaatggatgacaccgagaccgggttactaagtgcaatttgtcttatatgcggagaccgccaggatctggaagagccaactaaggtcgataagctgcaggagcctctcctggaggcattgaagatctatattcgcaagcggcggccaagtaagccccacatgttccctaagatattgatgaagattaccgacctgaggagcattagcgccaagggggccgagcgggtgatcaccctgaaaatggaaataccaggatctatgccccccttaatacaggaaatgctggagaattccgaaggacacgagccacttactccgtctagctctggcaacaccgcagagcactcccccagcatttccccctctagcgtggaaaatagtggcgtgagtcagtcaccattggtgcagtag

SEQ ID NO: 26139 - DNA, 1011 bp, synthetic construct
  misc_feature 1..1011: note = Description of Artificial Sequence: Synthetic coding sequence
  source 1..1011: mol_type = other DNA
atgatctacacctgccaccgggacaagaactgcgtgatcaacaaggtaacaagaaacaggtgccagtattgtcgcctccaaaaatgcttcgaggttggcatgtccaaagagtccgtcagaaacgatcgaaacaaaaaaaaaaaagaaaccagcaaacaggaatgcaccgaaagctacgagatgacggccgaattggatgatctgactgaaaagattagaaaagcccatcaggagacctttccgtctctgtgtcagttaggtaagtacaccacaaactccagtgctgatcaccgcgtgcgcctggaccttggattatgggacaaattttcagagctggcaactaagtgtattatcaagatcgttgaattcgccaagagactacccggattcactggactcactatcgccgaccagattaccctgctgaaagctgcttgtctcgacattctgattctgagaatctgcactcggtatacaccagaacaagacactatgacattctcggacgggctgacattgaatagaactcaaatgcacaatgctggctttggccccctgactgacctggtgtttacgtttgccaaccagctcctgccactggaaatggacgacacagagactggtctcttgtccgccatatgcctaatttgtggtgatcgtcaggacctggaagaacctacaaaggtagataagctccaagaacctctcctggaagctttaaaaatctacatcagaaaaagacgtccgagcaaaccacatatgtttccaaaaatactaatgaaaatcaccgatctgcgatccatttccgcaaagggcgccgaaagggtcataacattaaagatggagatcccgggctccatgccgcccttgattcaggagatgctcgaaaatagtgagggccatgagccactcaccccctcatcctcagggaataccgccgaacatagcccaagcatttcaccttcctctgtggagaatagtggcgtctcgcagtctccgctggtgcagtag

SEQ ID NO: 26140 - DNA, 1326 bp, synthetic construct
  misc_feature 1..1326: note = Description of Artificial Sequence: Synthetic coding sequence
  source 1..1326: mol_type = other DNA
atgaccaccagcggccacgcctgccccgtgcccgccgtgaacggccatatgacgcactaccccgcgactccatatccactgctatttccacccgtgattggagggttatcactgcctcctctgcacgggctgcacggccacccaccgccaagcgggtgttctaccccatcgcctgccacaattgaaactcagagtacttcctccgaagagctcgtgccctccccacctagtccgttgcccccccctcgagtgtacaaaccatgttttgtgtgtcaggacaaaagttctggataccactacggagtaagcgcatgtgaagggtgtaaaggattttttcgaaggtccatccagaaaaacatgatatacacctgccaccgtgacaaaaattgtgtcattaacaaggtaacgcggaatcgatgtcagtattgtcggctgcagaagtgcttcgaggtgggaatgtccaaagagagcgtccgcaacgacagaaacaaaaagaagaaagagaccagtaaacaggaatgtaccgagtcttacgagatgaccgccgagctggacgacctgaccgagaagatccgcaaggctcaccaagagacctttccctcactgtgccagcttggaaagtatacaacgaatagctcagcagaccacagggtaaggcttgatctaggcctgtgggacaagttttcagagctagccaccaagtgtattattaagattgtggagttcgccaaaagacttcctggcttcacgggtctgacaatcgccgaccaaattaccctcctaaaggctgcatgtctcgacattttgatccttaggatctgtacacggtacacccccgagcaggatacaatgaccttctctgatgggctgacactgaacagaacacagatgcataacgccggctttggacctctaaccgacctggtctttacattcgccaaccagctccttccactggaaatggatgataccgaaacaggcctgctgtctgctatctgtctgatctgcggcgataggcaggacttggaagagcccacgaaagtcgacaaactgcaggagccgttactggaagcgctgaagatttatatcagaaaacggcgtccaagcaagccgcatatgtttcctaaaattctgatgaagatcaccgaccttagatccatatcagcaaagggggccgagcgcgtcatcactttgaagatggaaattcctgaggggcatgaaccactgaccccaagctcatctggcaacaccgccgagcacagcccttcaatttccccatcttcggtggagaacagcggagtttcacaatctcccctggtgcagtag

SEQ ID NO: 26141 - DNA, 462 bp, synthetic construct
  misc_feature 1..462: note = Description of Artificial Sequence: Synthetic coding sequence
  source 1..462: mol_type = other DNA
atggacccccccgccggcttcgtgcgggccggcaaccccgccgtggcagccccccaaagcccattgagtccggaaggagctcacttcagagcggcgcatcaccctagaagcaccggctcccgttgccccggaagtctccagccgtcgcgacctctggtcgccaactggctgcagtcactgcccgaaatgccagtggacttcactggctactggaaaatgctggtgaacgaaaacttcgaagagtatctgcgggctttggatgtgaacgttgcactgcgcaagattgcaaatctgctgaagccagataaggaaatcgtacaggatggcgaccatatgattattcggacattgagtacattccgcaattacatcatggacttccaagttggcaaagaatttgaagaagatctcactggaattgacgatcggaagtgtatgtccgagactggcttctcttcctag

SEQ ID NO: 26142 - DNA, 405 bp, synthetic construct
  misc_feature 1..405: note = Description of Artificial Sequence: Synthetic coding sequence
  source 1..405: mol_type = other DNA
atgacccgggaccagaacggcacctgggagatggagagcaacgagaattttgaaggctacatgaaggccctagacattgatttcgcgacgcgcaagattgcagtgagactgacccaaactaaggtgatcgaccaggacggagacaattttaaaaccaagaccacttctacattccgaaattatgatgtggactttactgtcggagttgaatttgacgagtataccaagtcactggataatcgccacgtcaaggccctggtaacatgggagggagacgtcctagtgtgtgtgcaaaaaggggagaaagaaaatcgtggttggaaacagtggatcgaaggcgataagttgtacctagaattaacatgtggcgaccaagtatgtagacaagtcttcaagaaaaaatag

SEQ ID NO: 26143 - DNA, 474 bp, synthetic construct
  misc_feature 1..474: note = Description of Artificial Sequence: Synthetic coding sequence
  source 1..474: mol_type = other DNA
atggacccccccgccggcttcgtgcgggccggcaaccccgccgtggcagcaccccagagccctctatcccccgaaggtgctcactttagggccgcccaccatccaaggtcaactggatctagatgccccggatctcttcaaccatctaggccccttgttgcaaattggctccagagcctccctgaaatgcccgtggatttcaccggttattggaaaatgctagtaaatgagaatttcgaagaatatctcagggcacttgatgtgaatgtcgctctgcgcaagatagccaacctgctgaaacccgacaaggaaatcgtacaagacggtgatcatatgatcatacggactctgtccacattccggaactatattatggacttccaggttggcaaggagtttgaggaagatctgacggggattgatgaccgcaaatgtatggctggagtgcagtctagggatctttcgtctctctag

SEQ ID NO: 26144 - DNA, 3756 bp, synthetic construct
  misc_feature 1..3756: note = Description of Artificial Sequence: Synthetic coding sequence
  source 1..3756: mol_type = other DNA
atgcggcggggcggctggcggaagcgggccgagaacgacggctgggaaacgtggggcggttatatggccgctaaagtgcagaaactggaagaacaattcaggagtgacgcggccatgcaaaaagacggcacaagcagtactatatttagcggagtagctatatacgttaacggatataccgaccctagtgcggaggaactgagaaagctgatgatgctccacggagggcaataccacgtgtactattctagatctaagaccacacacattatcgccactaatctgccaaacgcgaagatcaaagaactgaagggggaaaaagttattcggcccgagtggatcgtcgagagcattaaagccggcagactgttgtcctacatcccttaccagctgtatactaaacagtctagcgtccagaaggggctttccttcaacccagtgtgcaggccagaagatccactgccgggcccaagtaacatcgctaagcagctgaacaacagggtgaatcacattgtgaagaagatcgaaaccgagaatgaggtcaaggtaaacggaatgaatagctggaacgaggaggatgagaataacgacttttcctttgtagacctggaacagacctcacccggacgaaagcagaatggcatcccgcatcccaggggctctaccgccatattcaatggccacaccccctcaagtaacggggccctgaagacacaggactgccttgtgccgatggtgaactcagtcgcatctagattgtctccagctttcagtcaggaagaagataaagcagagaaaagctcaaccgatttcagggattgcacgttgcaacagctccagcaaagtacccgtaatacggatgcactccggaatcctcaccgcacgaatagcttctcactgagtcctctgcattctaataccaagatcaatggtgcccatcattccacagttcagggcccgtccagcaccaaatcaacatcctctgtgtcaaccttcagtaaggctgctcctagcgtcccctccaagccttctgactgtaattttatctcaaatttctattcacactcaaggctccaccacattagcatgtggaagtgcgagctgaccgaatttgtaaatacattacagaggcagagcaatgggattttccccggtcgtgagaaactcaaaaaaatgaaaactggaaggtctgctctggtcgtgaccgatactggagatatgagtgtgttgaacagcccaagacatcagtcatgcattatgcatgtggacatggattgctttttcgttagcgtgggcatccgcaacaggcccgacctcaaagggaaaccggttgctgtcaccagcaacagaggaacgggccgtgcacccctgcgccccggtgccaatcctcagcttgagtggcaatattaccagaacaaaatcctaaagggcaaggcagctgacatcccagacagttccctctgggaaaaccctgacagtgcccaagcaaatggtatagactccgtgctgtcacgagccgagattgcctcctgcagctatgaggcccgacagcttggcattaaaaacggtatgttctttggtcacgccaagcagctgtgccccaacctgcaagctgtgccttacgatttccacgcctacaaagaagtggctcagaccctctacgagaccctggcctcttacactcataatatcgaggctgtctcatgtgatgaagcgctggtagatatcacagaaatcctggcagagaccaagctgacccctgatgagttcgcgaacgctgtacgtatggagattaaagatcagaccaagtgcgccgcctccgtcggcatcgggtccaatattctccttgctagaatggccacccgcaaggctaaacctgatggacagtaccatctcaaaccagaggaggtggacgacttcatccgaggtcaactcgtcacaaacctgccgggagtgggccacagcatggagagcaaacttgcttcccttggcataaagacgtgtggcgatctccaatacatgacgatggctaagctgcaaaaggaattcggtccgaagaccggccaaatgctctatcgtttttgcagaggtctggacgataggccagtccgcaccgagaaggagcgaaaaagtgtgtctgccgaaattaattatggcattcggttcacccagcccaaagaggcagaggcctttctcctgagcttaagcgaggagattcagcggagactggaagctaccggaatgaaggggaagcgccttacactgaaaattatggtgcgaaagcctggtgcccccgtggagacggctaagtttggcgggcacgggatctgtgataatatcgcccggaccgtgacgttggatcaggccacagataacgctaaaattatcggcaaggccatgctaaatatgtttcatacgatgaagctgaatatttcagacatgcgaggagtgggcatccacgtaaatcaactcgtgccaactaaccttaatccgtctacttgtccctctcgaccctccgttcaatcaagccacttcccgagtggatcttattccgtccgggacgtctttcaggtgcagaaggccaaaaaatccacggaggaggagcacaaggaggttttccgggccgcggtcgatcttgaaatctcttccgcaagccgcacatgtacatttctccccccgttccccgctcatctgcccacttcacccgacacaaataaggcagagagctccggcaagtggaacggcctccatactccggtctccgtgcagtctcggctcaatctttctattgaagtacccagccccagccagttagaccagagcgtgctagaagcactgcctcctgacctgcgagagcaggtggagcaggtgtgcgctgtgcagcaggccgagagtcatggcgacaaaaagaaagaacccgtcaacggatgcaatacgggaattctacctcagcctgttggaaccgtactccttcaaattcccgagccacaggaaagcaactcagatgccggcattaacctgatcgctctgcccgctttcagccaggttgatccagaggttttcgctgcacttccagccgaactacagagagagctgaaggctgcttacgaccagaggcaaagacagggagagaactcgacccaccagcagagcgccagcgccagtgtccccaagaatccccttcttcacctgaaggcagctgtcaaggaaaaaaagcgcaacaaaaaaaagaagaccatcggcagtccaaaacgtatccaatctccactcaataataagcttctgaactcccctgccaagaccctccccggcgcttgtgggtccccacagaaactgatcgacggctttcttaagcatgaggggccccccgccgaaaaacccttggaagagctgagcgctagtaccagcggtgtacctggcctttccagcctccaatctgatccagcaggttgtgtgcggccgcccgcacctaacttggccggagccgtggagttcaacgatgtgaagaccttgttgcgcgaatggataaccacaatctcagaccccatggaagaagacattctgcaggtggtcaagtattgtaccgatttaattgaagagaaggacctggaaaagctagaccttgtcatcaaatacatgaagcgcctcatgcagcagtcagtggaatctgtgtggaacatggccttcgattttattctggacaatgttcaagttgtgctccaacagacttatggttccactctcaaagttacctag

SEQ ID NO: 26145 - DNA, 3753 bp, synthetic construct
  misc_feature 1..3753: note = Description of Artificial Sequence: Synthetic coding sequence
  source 1..3753: mol_type = other DNA
atgcggcggggcggctggcggaagcgggccgagaacgacggctgggaaacttggggtggatatatggccgcgaaagtgcaaaagctggaggagcaattccgaagtgacgctgcaatgcagaaggatggcacatcatcaacaattttttcaggtgttgccatctatgtcaacggctatacagaccccagcgctgaagaactgagaaaactcatgatgctacacggcgggcagtatcacgtgtattatagccggtcgaagaccacacatattatagccacaaacctgccgaacgctaagattaaagaactgaaaggcgagaaagtgatccgtccagagtggattgtcgagtccataaaggcgggccggctgctgtcctacattccatatcagctatacactaaacagtctagcgtccagaagggcctgagctttaatcccgtatgccggccagaggaccctttgcccgggccctccaatatcgcgaagcaactgaacaaccgggtgaatcacatcgtgaaaaaaatcgaaaccgaaaacgaggtgaaagttaacggcatgaattcttggaacgaagaggacgaaaacaacgatttcagtttcgttgacctcgagcagacatctcctggcagaaagcaaaatggcattccacatccgcggggctccaccgcaatctttaatgggcataccccgagtagcaatggggctcttaagactcaggactgcttggtgccaatggtgaattctgtggcttcaaggctctctccagcattctctcaggaagaggacaaggctgagaagtcatcaacagactttcgggattgtaccctccaacagctgcaacagtctacgcgcaacaccgatgcattaagaaacccgcaccgcactaactctttcagcctgagtccccttcatagcaacaccaagatcaatggtgctcatcactcaactgtgcagggaccctcttctactaagagcaccagctctgtgtccaccttttccaaggccgcgccatcagtgccctcaaagccttcagattgcaattttatcagcaacttctattcccactctcgtctccaccatatttctatgtggaaatgcgagctcacagaatttgtgaatacattacagcggcagtccaatggcatctttccgggtcgagaaaaactaaagaaaatgaaaacaggacgctccgccctggttgttaccgatactggagacatgagtgtcttaaatagcccacgacatcaatcctgcatcatgcacgtggacatggattgtttcttcgtttctgtcgggatcaggaatagacccgatctgaagggcaaaccagtggcagtgacatctaacagggggactggtcgtgcgcccctgcggcccggggccaatcctcagctggagtggcagtactatcagaataaaattctcaaagggaaggccgatatcccggattcttctctgtgggagaatccggactcagcacaagccaacggaattgattcagttcttagtcgagctgagattgctagctgcagctacgaggctaggcagctcggaataaaaaacggaatgttcttcggccacgccaaacaactgtgtccaaatcttcaagcagttccctatgattttcatgcctataaggaagttgctcagacactctatgagacactcgcatcttatacacacaacatcgaagcggtgtcttgcgacgaagcactggtggacattactgagatcctcgctgagaccaagctgacacccgacgaattcgctaacgccgtccgtatggaaattaaggatcagactaaatgcgccgctagcgtggggatcggttcaaacattctcctggcacgaatggccacaagaaaagcaaagccagacggacaatatcatctgaagcctgaggaagtggacgatttcatacgcggccagttggtgaccaatctgccaggagtggggcactccatggaatcaaaactcgctagcttgggaataaagacatgcggtgatctccaatatatgacgatggcaaagctgcaaaaggaattcggacctaaaaccggccaaatgctttaccggttttgcagaggtcttgatgaccgccccgtgcggaccgagaaggagaggaaaagcgtcagtgccgaaattaactacgggattaggttcacacaaccgaaggaggctgaggcattcctgctttcactcagcgaggaaatacaacggcgactagaggccacgggcatgaaaggcaaacgcctgaccctgaagattatggtaagaaaaccaggagcccccgtcgagacagcaaagtttggaggccacggtatctgcgataacatcgctcgtactgtgacgctggatcaagcaactgataatgccaaaattatcgggaaggccatgctcaatatgtttcataccatgaagctgaacattagtgacatgcgaggcgtgggcattcatgtcaaccagttggtcccaactaaccttaatccttccacttgtccaagccgccccagcgtgcagtctagtcacttccccagcgggtcatactcagtgagagacgtgttccaagtgcagaaggccaagaaatctaccgaggaagagcacaaggaggtttttagggctgcagtggacctggagatcagctccgcctctagaacatgcactttcctgccacctttccccgcacacctgcccacttccccagacactaacaaggccgagagctcagggaagtggaatgggctgcacacccctgtctcagtccagtcacgactcaacctgtcgattgaggtaccatccccctcccagctcgaccaaagcgttttggaggccctaccccccgaccttcgggagcaggtcgaacaggtgtgtgctgttcagcaagctgagagccatggtgataaaaaaaaggaaccagtgaacggctgcaacactggaatcttaccgcagcctgtgggaactgttctgctgcagatccctgaaccccaagaaagcaactctgatgccggtataaatctgattgccctgcccgccttctcccaagtggatcccgaggtttttgccgccttacccgccgagcttcaaagagagttgaaggccgcctacgatcaaagacagaggcaaggagaaaattctacgcaccagcagagcgcaagcgcttcagtgccaaagaatcccctgctgcatttaaaggccgcagtcaaggagaagaaaaggaacaagaagaagaagaccatcggctctcctaagcgcatccagagccccctaaacaataagcttctcaactcccctgccaagactctccctggagcatgcgggtccccacagaaactcatcgacggttttctcaagcatgagggacctcccgccgagaagccattggaggagctgtcagcatccacaagtggggtgccggggctgtccagtctgcagtcagatccagctgggtgtgtgcggccccccgcgcctaaccttgcaggagcggtcgaattcaatgatgtgaaaactctgttgagggagtggatcaccacgatcagtgatcccatggaagaagacatcttacaagtggttaagtactgtactgatttgatcgaagagaaggacctagagaagctcgatctcgtgatcaaatatatgaagagactgatgcagcagtccgtcgaaagcgtgtggaacatggcttttgactttatcctcgataacgttcaggttgtgctgcagcagacttacggctcgacactcaaggtaacctag

SEQ ID NO: 26146 - DNA, 2916 bp, synthetic construct
  misc_feature 1..2916: note = Description of Artificial Sequence: Synthetic coding sequence
  source 1..2916: mol_type = other DNA
atggccaccgtgcgggccagcctgcggggcgccctgctgctgctgcttgccgtggcgggagttgccgaggtggctggcggtcttgcgcctggctccgcaggtgctctgtgctgtaatcacagtaaagacaatcaaatgtgcagggatgtttgcgagcagatcttttcttccaagtctgagtcacgactgaagcacctgctgcagcgggcccccgactattgccctgagaccatggtggaaatttggaattgcatgaattcctcacttccgggtgtgttcaaaaagtctgacgggtgggtgggcctgggatgctgtgagctggccatcgccctggagtgtcgccaagcgtgtaagcaggcttcttccaagaatgatatctccaaggtgtgcagaaaggagtatgaaaacgccctcttttcatgcatctctcggaacgagatggggagtgtgtgttgctcttacgcaggccaccataccaactgccgcgagtattgccaggccatcttccgcactgacagtagccccggccccagccagatcaaagctgttgaaaactattgtgcctcaatcagcccacagttgatccattgcgtcaataactacactcagagctaccccatgcggaacccaactgactcattgtattgctgcgatcgcgccgaagaccacgcatgtcagaacgcatgcaagcgaattttaatgtcaaaaaaaacagaaatggagattgttgacgggttgatcgaggggtgcaaaacccagccacttccgcaggatcctctctggcagtgcttcctggaaagcagtcaaagtgtgcacccaggagttactgtccatcctcctccaagcacaggcctcgacggagctaaactgcactgctgctcaaaggcaaatacctccacctgtcgggaactgtgcactaagctgtattcgatgagctgggggaatacgcaaagttggcaggaatttgatcgcttctgtgagtacaatcccgtcgaagttagtatgctcacctgtctggctgatgtacgtgagccgtgccagcttggttgccgcaatctgacctactgtacaaactttaataatcgccctacagaattgttccgatcatgtaacgcccagagcgatcagggagccatgaacgacatgaagttgtgggagaagggaagtattaaaatgccttttatcaatatcccagtgctggatatcaagaagtgccaacctgaaatgtggaaggccatcgcctgctcgctgcagatcaaaccttgtcacagcaaatccaggggcagcataatttgtaagtccgactgcgtcgagatcttaaagaagtgtggagatcaaaataagttccccgaggatcatacagccgagtctatttgtgaactgttatccccaactgatgatctgaagaactgcattcccttagatacctacctgcggcctagcacactgggcaatatcgtcgaagaggtgactcacccttgcaacccaaacccatgtcccgccaacgagctgtgcgaggttaatcgtaaaggatgccccagtggagacccttgcttaccatacttctgtgttcagggctgcaaactcggggaggcgtcagacttcatcgtcagacagggaacactgattcaggtaccttcatcggcgggagaagtcgggtgctataagatctgcagctgcggtcaaagcggcctgctggagaactgtatggagatgcactgtattgatttacagaaatcgtgtattgtcggggggaagaggaagtctcacggaacaagctttagtatcgattgcaatgtatgttcttgttttgctgggaatctggtatgtagtacccgattgtgtctttccgagcactctagtgaagatgaccggaggacatttaccggcctgccctgcaattgcgccgatcagttcgtgcccgtgtgtggtcagaacggcaggacatacccctcggcctgcattgcccggtgtgtgggactacaggatcaccagttcgagtttggctcctgcatgagcaaagatccgtgcaaccccaatccgtgtcaaaagaatcagaggtgtatccccaagcctcaggtgtgtctgacaacattcgataagttcggatgttcacaatatgaatgtgtacctcggcagctagcctgtgatcaggtgcaggaccccgtctgcgatacagaccacatggaacacaataatttgtgcaccctatatcagaggggtaagtctctgtcgtacaaaggaccgtgccagccattttgcagggccactgagccagtgtgcggtcataatggagaaacatacagctctgtgtgcgcagcctattccgatagagtcgccgttgactactacggagactgccaagccgtaggtgttctcagcgagcacagttccgtggctgagtgcgccagtgttaaatgcccatccctcctggcagccgggtgcaagccgatcatcccccctggcgcctgttgtccactttgcgctgggatgctgagggtgctcttcgacaaagagaagttagacaccatcgcaaaagtgaccaacaaaaaacctattaccgtactggagatccttcagaagatccggatgcatgtatctgtcccccagtgtgatgtatttggctacttctcgatcgaatccgagatcgtaatcctcataattcccgtggaccactatccaaaggctctccagatcgaagcttgtaataaggaggctgagaagattgagtcattgatcaatagcgatagccccacccttgcctcccacgtgcccttaagcgcattaataatcagccaggtgcaggtgtcgtcctctgtgccctccgcaggggtaagggccaggccttcctgccacagcctgctgctgcctcttagcttgggtctagcgctgcatttactgtggacatacaattag

SEQ ID NO: 26147 - DNA, 735 bp, synthetic construct
  misc_feature 1..735: note = Description of Artificial Sequence: Synthetic coding sequence
  source 1..735: mol_type = other DNA
atgaaggagcggcgggccagccagaagctgagcagcaagagcatcatggaccccaaccaaaacgtaaagtgcaaaatagtggtcgtcggtgactcacagtgcggcaaaactgccttactacacgtgttcgccaaagactgtttccctgaaaattatgtaccaacggtgtttgagaactataccgctagttttgagattgatacccaacgcattgagctgagcttgtgggatacctccgggagtccatactacgataacgtgcgccctctgtcctatccggactctgacgccgtgctgatctgcttcgacatctccagaccagaaacactggactcagtgttaaagaaatggaaaggtgaaatacaggagttttgcccaaacacaaaaatgctacttgtggggtgtaagagcgacctccgaaccgacgtctccactctcgtggagctgtcaaatcatcggcaaacgcccgtctcctatgatcagggcgctaatatggcaaagcagatcggcgctgcaacctacattgaatgttcagcattgcagtccgagaattctgttagagacattttccatgtagccacactggcctgtgtcaataagacaaacaagaatgtgaagagaaacaagagtcagcgagccaccaagcgaatatcacatatgccgtcaagacccgagctgtcggctgtcgctactgacctcagaaaggacaaggctaagtcctgcactgtcatgtag

SEQ ID NO: 26148 - DNA, 735 bp, synthetic construct
  misc_feature 1..735: note = Description of Artificial Sequence: Synthetic coding sequence
  source 1..735: mol_type = other DNA
atgaaggagcggcgggccagccagaagctgagcagcaagagcatcatggatcctaaccagaatgtaaaatgcaaaatcgttgtggtgggcgatagtcaatgcggaaagaccgcactgttgcacgtattcgccaaagactgttttcctgaaaactacgtgccaacagtttttgagaattatactgccagcttcgagatcgacactcagcgcatcgagctttctctgtgggacaccagcggcagtccttattatgacaatgtgcggccattgtcctaccccgacagtgacgccgtgttaatctgtttcgacattagccgtccagaaaccctagacagcgtgctaaaaaaatggaaaggcgagattcaggagttctgtccaaacactaaaatgttgttggtcggctgcaaaagtgatctgcgaaccgacgtgtccaccctggttgaactgtcaaaccaccggcaaactccagtgtcatatgaccagggggctaacatggcaaaacagattggtgccgccacatatattgaatgctctgcgctgcagtccgaaaactctgttagggatatcttccacgtagctaccttggcctgcgtgaacaaaacaaataagaatgtaaaacgcaataagagtcaacgagcaactaagaggatctctcacatgccctcccggcccgaacttagcgctgtggccacagatctgaggaaggataaagctaagtcttgcaccgtcatgtag

SEQ ID NO: 26149 - DNA, 348 bp, synthetic construct
  misc_feature 1..348: note = Description of Artificial Sequence: Synthetic coding sequence
  source 1..348: mol_type = other DNA
atgctgctggtgggctgcaagagcgacctgcggaccgacgtgagcacactggtggaactgagcaaccataggcaaacacctgtaagttacgatcagggggccaacatggcaaaacagattggagctgcaacttatatcgagtgctccgccttacaatccgaaaactcggtgcgggacatttttcacgtcgctactctggcctgtgtgaataaaaccaataagaacgtgaaacggaacaaaagccagcgcgctacgaaacgcatcagtcacatgccgtccaggcctgagctgtcagcagtggcgactgacctcaggaaagataaagctaagagttgtaccgtgatgtag

SEQ ID NO: 26150 - DNA, 351 bp, synthetic construct
  misc_feature 1..351: note = Description of Artificial Sequence: Synthetic coding sequence
  source 1..351: mol_type = other DNA
atgaaggagcggcgggccagccagaagctgagcagcaagagcatcatggaccctaaccaaaacgttaagtgtaagatcgtcgtggttggcgacagccaatgcggaaagactgcactcttgcacgtgttcgccaaggactgcttccccgaaaattacgtgcccactgtgtttgaaaactacaccgcaagcttcgaaatagacacccaaaggatcgagctcagcctatgggataccagtggcagcccttattatgacaacgttcgtccactgagttaccctgacagcgatgccgtcttgatctgcttcgacattagcaggcctgagaccttagatagcgtgctgaagaagtag

SEQ ID NO: 26151 - DNA, 351 bp, synthetic construct
  misc_feature 1..351: note = Description of Artificial Sequence: Synthetic coding sequence
  source 1..351: mol_type = other DNA
atgaaggagcggcgggccagccagaagctgagcagcaagagcatcatggatcccaatcagaatgtgaaatgcaaaattgtggtcgtgggtgacagccagtgtgggaagacagccctcttgcatgtttttgctaaggactgcttccccgaaaactacgtgcctaccgtttttgaaaactataccgccagcttcgagatcgatactcagaggattgagttgagcctgtgggatacttcagggtccccttactatgataatgtgaggcccctttcataccctgattcagatgccgttcttatctgttttgacatcagccgaccagaaactctggacagcgtgctaaagaagtag

SEQ ID NO: 26152 - DNA, 615 bp, synthetic construct
  misc_feature 1..615: note = Description of Artificial Sequence: Synthetic coding sequence
  source 1..615: mol_type = other DNA
atggccgagcaggagcccaccgccgagcagctggcccagatcgccgcagagaatgaggaagatgagcatagcgtaaactataagccccctgcccagaaatcaattcaggaaattcaagagttagataaggatgatgagtcactgcgaaagtacaaagaagcactgcttggaagagtcgccgtctcggctgatcctaacgtgcccaacgtcgtagtgaccgggcttactttggtgtgttcctccgcgccaggcccattggaactcgatctgaccggcgatctcgagtccttcaaaaagcagtctttcgtcctgaaggagggagtggagtatagaattaagatctcctttcgcgtgaacagagagatcgtgagtggtatgaagtacatacagcacacctaccgaaagggcgtaaaaatcgataaaacagactacatggtggggtcttacggacctcgggccgaggagtacgaattcctcaccccagttgaggaagctcccaaaggaatgctagcccgcggtagctattcaattaaatcgaggttcacagatgacgataagacagatcacttatcttgggagtggaacctgaccattaagaaggactggaaggattag

SEQ ID NO: 26153 - DNA, 537 bp, synthetic construct
  misc_feature 1..537: note = Description of Artificial Sequence: Synthetic coding sequence
  source 1..537: mol_type = other DNA
atggccgagcaggagcccaccgccgagcagctggcccagatcgccgcagagaacgaggaggacgagcacagcgtgaattacaaaccccctgcacagaaatctattcaggagattcaggaattggacaaagatgacgagagtctaagaaagtacaaggaggccttactaggcagagtggctgtcagcgccgatcccaacgtgccgaatgttgtggtgacagggttgaccctggtatgcagtagtgcccccgggcccctcgaattagacctaaccggggacctggaaagtttcaaaaagcagagctttgtcctaaaggagggggtggagtacaggattaaaatttcattcagggtcaatagggagatcgtcagtgggatgaaatacatccagcatacgtacaggaagggtgtgaagatcgacaaaacagattacatggtgggttcctactctatcaaatcaagattcacagatgatgacaaaacagaccacctttcctgggagtggaacctaaccatcaagaaagactggaaggattag

SEQ ID NO: 26154 - DNA, 615 bp, synthetic construct
  misc_feature 1..615: note = Description of Artificial Sequence: Synthetic coding sequence
  source 1..615: mol_type = other DNA
atggccgagcaggagcccaccgccgagcagctggcccagatcgccgctgagaatgaggaagacgaacattctgtgaactacaagccccctgcacagaagtccattcaagaaatccaggagttggacaaggacgatgagtccctcagaaaatataaggaggccctgttgggtagagtagctgtgagtgccgacccaaacgtgccaaacgtggtcgtaacgggcctgaccctggtctgctcctctgcccccggccctttggagcttgatttgactggggatctggagagcttcaaaaaacagtcttttgtactgaaggagggcgtggaatacagaattaagatcagcttcagggtgaaccgcgagatcgtgagtggcatgaaatacattcagcacacttatcggaaaggtgtgaaaattgacaaaaccgattacatggttggatcctatggccctagagcggaggagtacgaatttctgactcccgtcgaggaggcccccaaggggatgttagcccgcgggagctactccataaaaagccggttcacggacgacgacaaaaccgaccatctaagttgggagtggaatctgacaattaagaaggactggaaagactag

SEQ ID NO: 26155 - DNA, 3576 bp, synthetic construct
  misc_feature 1..3576: note = Description of Artificial Sequence: Synthetic coding sequence
  source 1..3576: mol_type = other DNA
atggaggccatgagcccccagcaggagaccctgggcggccagcccgggaggagcagctcactcacaggggtttcgcggctggcagggggctcttgcactaagaaaaaaatgaagacattggcagagcgcaggcgcagcgccccctcactgattctggataaagcgcttcagaagagaccaactacaagagatagcccgtctgcatccgttgacacatgtacatttctgtcatctcttgtttgttctaacaggacccttttgatcgacggccgtgccgaactcaaacggggactgcagcgccaggagaggcatctgttcttattcaacgatctgtttgtcgtcgccaagattaaatacaacaataactttaaaatcaagaataaaatcaagctcaccgacatgtggacagcttcctgcgtggatgaggtaggcgagggcaacacaaatgccatgaagtcctttgtcctggggtggcccactgtaaacttcgtcgccacgttctcgagtcctgaacaaaaggataaatggctctctctcctgcagagatatattaatctggagaaggaaaaggactacccaaagtcaatccctctgaagattttcgctaaggacatcgggaattgcgcttattcaaagacaattactgtaatgaactctgatacagctaacgaagtaatcaacatgagtcttccaatgctcggaattactggctccgagcgggactatcaactctgggtaaactcaggcaaagaggaagctccataccccctgattgggcatgaatacccttacgggatcaagatgagccacctgcgggattccgctctgctgacacccggcagcaaagactccacaactccttttaacctgcaagaaccctttctcatggaacagctgccaagagaaatgcagtgccagtttattttgaaaccgagtcgcctcgccgctgcgcagcagctgagcgacagcggccacaaaaccttcaagcgaaggaggtcaattattaattgggcattttggcgcggaagcagcactcatctggacaacctacccagctccccaacctctcccatgcctggccagttgttcgggatttcactcccaaacatttgtgagaacgacaatctgcctaaacctgttctcgacatgctcttcttcctaaaccagaaagggccactgacgaagggaatctttcgtcaaagcgccaatgtgaaatcatgcagggagctgaaggaaaaactaaattcaggagtggaggtgcacctagactgcgagagcatttttgtcattgcatctgttctgaaggactttttgcgtaacattcctggatccattttcagcagcgacctctacgatcactgggtctctgtgatggaccaaggcaacgacgaggagaaaattaacaccgtgcagaggcttctggatcaacttccccgggcaaacgtggtgctgttaagatacctctttggagtgctgcataatatcgagcaacactcatcatcaaaccagatgaccgctttcaacttggccgtgtgtgtcgccccttccattctgtggccacctgccagtagtagcccagagcttgagaatgaatttaccaagaaagtctctctccttatccagtttctcatcgagaactgtctcaggattttcggggaggaaattacatctttgtttcgggaagttagtgtgcggtgcgacaccagggaaaatgcgtcagatatcagctgcttccagttgaacgatagctcgtatgactccctggagaacgaactgaatgaagatgtcgatgccccgtgtagcgacctcgtgaagaagctgggccagggcagtcgctcaatggattccgttctgactctttccgactatgacctggaccaacctgaggtagaaggcctcctgaccttgtctgatttcgatctggcccacagtaaagatgaagacgtgcaaatgaagagacccctagagagcaagcctgtaaacatcttggtgtatacaaagattcctctgcgggatcacgccagagcgcccagcgccatgtgtacgccctcttatctcagtacagctgcagccaatgccgccaaaagtctccgacggcacagacggtgcagtgagccttctatagactaccttgactccaagctgtcatatcttagggaattttaccagaaaaagctgagaaaaagctcgtgtgatgcaattttgtcccagaaagacgaggactacctgaagcaaaaccagcctctacaagaggaaggcaaaacctgtttcaagcagagcctcgtgacgggaacagacgtgtccaagaagaacgccacgactcagaacactaaaaaaaagtcattgtcagggagtgagggcaatcacgtgaaattattccccaaatctaaaccggtcgccatctctgtggccagttatagccccatgtcgtcacaggaccattctaaaaaccagccatttgatgtgaacacatcaggctactctcctcctcataccgcagacgcccttaaaggcccacgtactcatcgtcgatgctctgagcccaacatcgaggatcaaaacaggaagctcacctacttgagaggaatttactcgaaaaagcagcacaaaactagttgcgaggctggcctcctccatggggaggaggactaccttaaacgacataaatcccttcaaatggaaggtcagaaactgatcaaccagagcctcgttatgggtatcgaagtgggcaaaagtagtgccaccaaccaaaataccgagaaagtactgccccccagactgaacctgtgtcctcgaacaagctacagttcactgtcttctccgggaacctcgccctcgggctcatccgtgtctagccaagatagcgccttttcccaaatctccgagcacagtgtttttacacccactgaaacaagctctccaatcgactgcaccttccaggcgcaacgcaagcgcgaggatctgtcgcccgatttttctaacgcctcacacgtcagtggaatgcctggtccaagcagcgggcaggcctgttccagacctgcctacaccaagaaggacacaatggagtggcacagccaaatgcacagcgtgaccttgcacccctctacttggctccgtaacggagtggcctctttaaaaaattggtctctcaagaagaaagccaaggcggctagacctgaagaggaaaagatagcatcaccaaagggacccctggaacctcccccacatgcgagtggcgtgccagaggctaactcactccaggaggaacagaaggatctgccattgcgtgctgctgaggggttatccccggttcagagcgcgcagaggtgctcgtcatctccattccaggattccgagagacattgttcaagccccttctcccttgtggagagccgtctgaagctgtgtatgaagtcccatgaggagattgagccaggatcccagtcgagctctgggagtttaccttgggagagggcaagcgcttcgtcctggaccctggaggatgcgactagccccgattccgggccaactgtcgtatgtgatatcgaagacagatatcttacgaaagatatctag

SEQ ID NO: 26156 - DNA, 3498 bp, synthetic construct
  misc_feature 1..3498: note = Description of Artificial Sequence: Synthetic coding sequence
  source 1..3498: mol_type = other DNA
atgaccttctggatcatcatcaacaagaagatgaagaccctggccgaaagaagacgcagcgctccgtctttgatcctcgataaagcgctccagaagcgtccaactactcgggattccccaagcgcctcggtcgacacatgcacgttcctgagtagtttggtgtgctccaaccggactctgctgatcgacggcagagcagaactgaaacgaggtctccagcggcaggagcgccacttgttcttgttcaatgacctctttgtggtggccaaaatcaagtataataacaactttaaaatcaagaacaaaataaagctgacagacatgtggactgcctcctgcgtcgacgaggtaggcgaaggtaacacaaacgcgatgaaaagttttgtgctgggatggcccacagtgaacttcgttgccacattctcctcgcccgaacaaaaggacaaatggctctcactgctgcagcgttacataaatctcgaaaaggaaaaggattatcccaagtccattccattgaagattttcgctaaggatatcggcaactgcgcctacagtaagacgataactgtaatgaattccgacacggccaatgaagtgataaatatgagcttaccaatgctgggcataaccggcagtgaacgggactaccaactgtgggtaaatagtgggaaagaggaagccccataccccttgatcggccatgaatacccctatggaataaagatgtcgcatctgcgcgactcagctttgcttacccccggctctaaggactccaccacaccatttaacctgcaggagccctttctcatggaacagctgccgcgggaaatgcagtgccagttcatactgaagccgtcccggcttgcggcagctcagcagctgtccgactctggacacaaaacatttaagcggcgccgcagcatcattaactgggccttctggcgaggcagtagcacgcacctagataacctgccctctagtcccacttcacctatgcctgggcagctgtttggtatcagcctccccaacatatgtgaaaacgataacctgcctaagccagtgctggatatgctctttttcctgaatcagaaaggtccattaactaaggggatcttcagacagtctgccaacgtcaagtcctgtcgcgagttaaaggaaaagctgaactcaggtgtcgaggtgcacttggactgcgagtcaattttcgtcatcgcaagcgtactgaaagactttctacgcaacataccaggaagtattttttcctccgacctgtacgaccattgggtaagcgtgatggaccaaggaaacgacgaagagaagattaatactgttcagcgactgctggaccagctgccgagggccaatgttgtgctgttgaggtacctttttggcgtgctgcataatattgagcagcactcttcctccaatcagatgactgcatttaatctagccgtgtgtgttgccccttcaatcttgtggccaccggcaagctcgtctcccgagctcgagaacgaatttaccaaaaaggtgtctctcctcatccagtttctcattgagaattgcctgagaatctttggggaggaaatcactagtttgttcagagaagtcagcgtgaggtgcgacacgagagaaaatgcaagcgacataagctgcttccagctgaatgatagttcttatgactccttggaaaacgagctgaacgaggatgtggacgccccatgctcggaccttgtgaagaagctcggacaggggtccaggagcatggacagcgtgctgacactgagcgactatgatctggatcagcccgaagtggagggtctcctaactctgagtgacttcgacttagcacacagcaaagatgaggacgtccagatgaaacggcccctcgaatctaagcctgtaaacatcctggtctataccaaaattcctctgcgagatcacgccagagctccatcagcaatgtgtactccatcatatctctcaaccgctgcagcaaacgcggccaaatcactgagaaggcatagacgttgctctgagccttccattgattacctggactccaagctgagttacctgcgagagttttatcaaaagaaactgcggaagtcaagctgtgatgccatcctgtcacagaaggacgaagactacttaaaacagaaccagcccctgcaggaggagggcaagacctgtttcaagcagagcctggttaccggcactgacgtgtctaagaagaatgcaactactcagaacaccaaaaaaaagtctctaagtggctctgaggggaatcatgtgaagctattccctaagtccaagcccgtcgctatcagtgtcgcttcctacagtcctatgtcctcacaagatcacagcaagaatcagcccttcgacgtaaacacatctgggtatagtcctcctcacactgccgacgccctcaagggcccaagaactcatcggcgctgcagcgagcctaatattgaagaccagaatcggaagttaacctacctgcgagggatctactctaaaaaacagcacaaaacaagttgcgaggctggactgctccatggtgaggaggattatttaaagagacataaaagcctgcaaatggaaggccaaaaattaattaatcagtccctggttatgggaatagaagtgggaaagagtagcgctactaaccagaacacagagaaagtgttaccccccaggttgaacctgtgtcctcgaactagctactcaagcctgtccagccccgggacaagcccaagcgggtcctccgtctcttcgcaggactccgccttctcccagatatcagaacattccgtttttacaccaactgagacatccagccctatagattgtacctttcaagcacagcgcaaaagggaggatctaagccccgattttagcaacgcttcacacgtgtcgggcatgccagggccctcttccggacaggcatgttcacgccctgcctataccaaaaaagatacaatggaatggcatagtcagatgcatagcgtcacgttgcacccaagtacctggctgagaaatggcgtggcttctttgaagaattggtcgttaaagaagaaagcaaaagctgccaggccggaggaggagaaaattgcttctcccaagggccccttggaacctcccccccatgcctcaggcgtaccggaagctaacagcctacaagaggagcagaaagatttacccctcagagcagccgagggcctaagccctgttcagtccgcacagagatgtagctcttcccctttccaggactcagagagacattgctcctcaccattcagcctggtggagtcaaggctcaagctgtgcatgaagagtcatgaagagatcgaaccgggctctcagagttcaagtggctcactcccatgggaaagagcttctgcctcatcatggactctggaggacgccaccagcccggatagcggacctactgttgtctgcgacattgaagatcgttatcttactaaggatatctag

SEQ ID NO: 26157 - DNA, 3507 bp, synthetic construct
  misc_feature 1..3507: note = Description of Artificial Sequence: Synthetic coding sequence
  source 1..3507: mol_type = other DNA
atgagcgcccgggagcggcagcccgccctgaagaagaagatgaagactctcgctgagcgaagaagaagcgctcctagtctgattctggataaggccctgcaaaagagacctaccacccgcgatagcccctcggccagcgtagatacctgcacattcttgagctctctcgtctgctccaacagaacgctgctgattgacgggagagctgagctgaaacgaggactgcaaagacaggagcgtcacctgttcttatttaacgacctcttcgtggtggccaagatcaagtataataataactttaagatcaaaaacaaaatcaagctgacggatatgtggaccgcctcttgtgtggatgaggtgggcgaaggcaacaccaatgccatgaagtcctttgtgctcggctggccgacagtaaatttcgtggctacgttttctagcccagaacagaaagacaaatggctgagccttttgcagagatatattaacctggaaaaagagaaggattaccccaagtcaataccgctgaagatcttcgccaaggatataggcaactgcgcatacagcaaaaccatcaccgtaatgaactcagacacagctaacgaagtcattaacatgagtctaccaatgttaggcattaccggatccgaaagagactatcagctgtgggtgaactcgggaaaggaagaagctccttaccctttgataggccacgaatacccctacggtattaaaatgagtcaccttcgcgatagcgctctattaacacctggcagtaaagactctaccacaccttttaatcttcaagaaccatttttgatggagcaactgcccagggagatgcagtgccaatttatcctcaaaccgagtcgactggccgcggcacagcaactgagtgattcgggacacaaaacttttaagcgtaggcgttccattattaactgggccttctggcgaggaagcagtactcatttagacaatctaccttcctcaccaacatctcccatgcctggtcagctcttcgggatcagcttgccaaatatctgcgagaacgataacctgcccaaacctgttctcgacatgctgttttttcttaatcagaaaggtccactgaccaagggcatttttcgacagtcagcaaatgtcaagtcttgcagggaacttaaggagaagctgaactcgggcgtcgaagtgcacttggattgcgaatctatttttgtcattgcaagcgtgctgaaagacttcctgcgaaatatccccggaagcatcttttcctccgacttgtatgaccattgggtgtctgtaatggatcaggggaatgacgaggagaaaatcaatactgtgcagcggctgctggatcagctgccacgagcaaatgtggtcttattaagatatctcttcggcgtgctccacaacatcgagcaacatagcagcagcaatcaaatgactgcttttaacctggcagtttgtgtggccccctcgatcctgtggcctcccgcaagttccagtccagaacttgaaaacgagttcacaaaaaaagtcagtctcctcatccagttcctaattgagaactgtcttaggatattcggggaggaaattacttcactctttcgcgaagtgtctgttcgatgtgatacgcgcgaaaacgcctctgatattagctgcttccagctaaatgacagctcctatgatagcctggagaacgagctgaacgaagacgtggacgccccctgctccgaccttgtgaaaaaactcggacagggctccagaagcatggactctgtccttaccctgagcgactatgacctcgaccaacctgaggtggaggggttgctcacgctgagcgatttcgatttggcgcactccaaagatgaagacgtccagatgaaacggcctttggagtctaaaccagtgaatattctggtgtacaccaagatccctcttagggatcacgcccgggcgccttccgctatgtgcaccccatcgtatttatctactgccgccgcaaacgcagccaaatccctccgccggcacaggagatgcagcgagccatctattgattacctggactctaagctcagctatctgcgtgaattttaccaaaagaaactcaggaagtcctcctgtgatgccatcctatcccagaaggacgaggattatctcaaacagaaccagcctctgcaggaggaaggcaaaacatgttttaaacagagcctggtaaccgggaccgacgtgagcaagaaaaacgctactacacagaataccaaaaagaagagcctctcaggatctgaaggaaatcatgtcaaactgtttcctaagtctaaaccagttgccatctcggttgcgtcttactctcctatgtcgtcccaggatcattcgaaaaatcagccatttgacgtgaataccagtggctacagccccccccatacagccgatgcactaaagggccctaggacacaccgcagatgctccgagcccaacatcgaggatcagaaccgtaaactgacatatctgagggggatctatagtaaaaaacagcacaagaccagctgcgaggctggactgctccatggggaggaggattatctcaaacgtcacaagtccctccagatggagggtcaaaagctgatcaatcaatctctcgtaatggggattgaggtgggcaaatcctccgccacaaaccagaatactgagaaggttctccctccgagactgaatctgtgccctcgcacttcttatagctcattgtcctcaccagggacgtcacctagtggaagttctgtctccagccaggacagcgcattttcccagatctccgaacattcagtcttcactcctactgagacttcctcccccatagattgcacctttcaggcccagcgtaagagagaggatctgtcccccgacttttcaaacgctagccacgtctcaggcatgccgggccccagctctggccaggcctgctcccgaccggcgtacacaaagaaagacaccatggagtggcactcacagatgcactcagtgacattgcatcctagcacctggctgcggaatggtgtagcctctctcaaaaactggtcgttaaaaaaaaaggctaaggccgcccgccctgaggaagaaaaaattgcgagccccaagggacccctcgagcccccaccacatgcctccggagtgcctgaggccaacagcctccaagaagaacagaaggaccttcctctccgtgccgcagagggcctgtcccccgtgcagagcgctcagagatgttctagcagtccctttcaggactccgaaagacactgctcaagtccctttagtctggtcgagagtcgcctgaagctctgtatgaagtcgcatgaagagatcgaacccgggtcccagtcctcgtccggctctctgccctgggagagggcatctgcatcatcatggacactggaagacgccacatccccagatagtggcccaactgtggtttgcgatattgaggacaggtatcttacaaaggacatttag

SEQ ID NO: 26158 - DNA, 3468 bp, synthetic construct
  misc_feature 1..3468: note = Description of Artificial Sequence: Synthetic coding sequence
  source 1..3468: mol_type = other DNA
atgaagaccctggccgagcggcggcggagcgcccccagcctgatcctggacaaagccctgcagaaacgtcccacgacaagagacagcccttccgcatctgttgacacctgtacgtttctgagtagcctcgtttgtagcaataggaccctccttatagacgggagagccgagctgaaacggggcctgcagaggcaggaaagacacctgtttttgttcaatgacctgttcgtggtagcgaagattaagtataataataacttcaagattaagaacaagattaaattgacagacatgtggactgccagctgtgtagacgaagttggcgagggaaatacaaacgccatgaaatccttcgttctcggttggccaacggtgaattttgtggccaccttcagctcgcccgaacagaaggacaaatggctgtctttgctgcagcgctacatcaatctggagaaagaaaaagattaccccaaaagtatccctctgaagatctttgccaaagacattgggaactgtgcctacagcaaaaccattacagtgatgaacagtgacacagccaatgaggtcataaacatgagtctgccaatgcttgggattacaggctcagaacgcgactaccagctgtgggtgaacagtggtaaggaggaggccccatacccactgatcggccacgaatatccctacggtatcaagatgagccatctccgtgattccgccctacttacaccggggtctaaagattctacgacaccttttaacctgcaagaaccctttctgatggagcaactgcctcgcgaaatgcagtgccagtttatccttaaaccgagtcgcctcgccgcagcccagcagctttccgatagtgggcacaagacttttaagcgtcgccggtcaattatcaactgggccttctggagaggctcatccacacacctggacaacctgcctagcagtcctacctccccgatgcccggccagcttttcggcatttctctgcccaatatttgtgaaaatgataacctccctaaaccagtcctggacatgctgttctttttaaatcagaagggtccactgactaagggcatctttagacagtctgccaacgtgaagagctgtcgcgagctcaaggagaaactgaactctggggtggaggtgcacctcgactgcgagagcatttttgtgatcgccagtgtgctgaaagatttcttgcggaacatccccggttctatcttttctagcgatctatacgaccactgggtgagcgtgatggaccaaggcaacgatgaagagaagatcaatacagtgcaacgcctgcttgaccagttgcccagggctaacgtggtgcttctgagatacctgtttggagttctgcataatatcgagcagcactcatcctccaaccaaatgacagccttcaatctggcagtctgcgtcgctccgtccatcctgtggccaccggcatccagtagccctgagttagagaatgagttcaccaagaaggtgagtctgctgattcaattcctgattgagaattgtctgcgtattttcggcgaagagataacttcgctgttcagggaagtgtccgttcgctgcgatacccgcgaaaatgccagtgatatatcatgcttccagctgaatgactcctcatacgatagtttagaaaatgaattaaacgaggatgttgatgctccatgttccgatctagtcaagaagctggggcaaggtagcaggtcgatggattcagtgctgaccttaagtgattatgatctggatcagccagaagtggaagggttattgacactgagtgattttgaccttgcacacagcaaagatgaggacgtccagatgaaaagaccactggaatccaagcccgttaatattttggtgtacacgaagatacctctccgtgatcatgccagggcccctagtgcaatgtgcactccctcatatctgtcaacagctgcagctaacgcagcgaagagtttgcgaaggcacagaagatgtagtgagccaagcatagattaccttgattctaaattgtcatacctccgggagttttaccagaaaaagctgcgtaaatctagttgtgatgccattctgtcccaaaaggatgaagattatctgaagcaaaatcaacctctgcaagaagaaggcaagacatgttttaaacagtctctggtcactggtacagacgtgagcaagaagaatgctacaacgcagaacacaaaaaaaaaatctctctctggtagcgagggcaaccacgttaagttgttcccaaagagcaagcccgtggccatctccgtcgcatcttactcgcccatgagctcacaagatcattcaaaaaaccaaccattcgacgtaaatacctccggatatagcccaccacataccgccgatgcgttgaaaggcccacggacccaccgacgatgttccgagccaaatattgaagatcagaacaggaaattgacttaccttcggggcatatacagtaaaaaacaacacaagactagttgtgaggctggcctgctgcatggggaggaggattacctcaaacgccacaaaagtctgcaaatggaggggcagaagcttatcaaccagtcccttgttatgggaatcgaagtcggtaaaagttccgccacaaaccagaacaccgagaaagtgcttcccccccgtctgaatctctgtcccaggactagttactcttctctgtcctcccccgggacgtccccctcaggctcttcagtgtctagtcaggactcggcattcagtcaaattagcgaacactccgtgtttacccccaccgaaacaagctcaccaattgactgcacttttcaggctcagcggaagagagaggacctatccccagatttctctaacgccagtcatgtgtctggaatgcctggtcctagtagtggacaggcttgttctagacctgcctatacaaaaaaagacaccatggagtggcactcacaaatgcactccgttacccttcatccaagcacttggctgaggaacggtgtggcttcgttaaagaactggagcctgaagaagaaggcaaaggccgccaggcctgaagaagagaagatcgcttcgcccaagggcccgttggagcccccgccccacgcctctggtgttcctgaggcaaacagcttacaggaagagcaaaaggacctgccattgagggccgccgagggcttgtcccccgtgcagtcagcccagagatgtagttcctccccttttcaggactctgagagacactgttcttctccattctccctggtggaatcaaggctaaaactttgcatgaaatcacatgaggaaatcgagcccggttcgcagagctcatctgggtccctaccttgggaaagggccagcgccagctcttggaccctggaagacgctacttcacccgattccggcccaaccgtcgtatgtgatatcgaggaccgctatctgaccaaggatatctag

SEQ ID NO: 26159 - DNA, 3468 bp, synthetic construct
  misc_feature 1..3468: note = Description of Artificial Sequence: Synthetic coding sequence
  source 1..3468: mol_type = other DNA
atgaagaccctggccgagcggcggcggagcgcccccagcctgatcctcgacaaggctctgcagaagcggccgacaactagagactctccgtcggcctctgtagatacttgtaccttcctgtcttctctcgtgtgtagtaacaggactttgctgattgacggccgggccgaattgaagcgcgggttgcagcggcaggagagacatttatttctgtttaacgatctgtttgttgtggccaagattaagtacaacaacaactttaagataaagaacaaaatcaaactgaccgatatgtggaccgctagctgtgtggatgaggtgggggaaggcaatactaatgccatgaagtcattcgttctcggatggcccacggtgaactttgttgcgactttctcctcacccgaacaaaaggataagtggctgtccctgttacagaggtatatcaatctggagaaggaaaaagactaccctaaatcaatacccctgaaaatttttgccaaagacatcggcaattgtgcctattcaaaaacaattacggtcatgaacagtgacactgccaatgaagtgattaatatgtctctgcccatgctgggaatcactggatctgagcgcgactaccagttatgggtcaattctgggaaagaagaagccccctatccccttattggccacgagtatccatacggaataaagatgtcacatctgcgcgatagtgcactactcactccgggatccaaagacagtaccactccattcaatctgcaggagccatttttgatggagcagctcccgcgggagatgcagtgtcagtttattcttaagccctcccggcttgcagcggcccaacagctgtcggattcaggacacaaaacattcaagagacgacgaagcatcatcaactgggccttctggcgaggaagcagcacacacctggacaacctccccagcagtcccacttcaccaatgcctgggcagctgtttggtatatcattacccaatatctgtgagaacgacaatttacccaagcccgtgctagacatgttgttcttcctcaaccagaagggcccgctcaccaaggggatttttcggcagagcgctaacgtcaagagctgcagggaacttaaggagaagctcaatagcggagtggaagtccacctcgactgtgagagtatattcgtgattgcctcagttctaaaggattttcttagaaatatacccgggagcatctttagttccgatttatacgaccactgggtctcagtgatggatcagggaaatgatgaggaaaaaatcaacactgttcaacggctgttggatcagctcccacgtgccaatgtagttttgctgcggtacctgttcggcgtgttacacaatattgagcagcatagttcttcaaaccagatgactgctttcaatttagctgtgtgcgtcgccccatccattctgtggccccccgccagcagttcgcctgagttggagaacgagtttaccaaaaaggtgagcttgctgattcagtttcttattgagaattgcctcaggatatttggggaggagatcacctcgttattccgcgaagtctccgtgcggtgtgatacaagagaaaatgcatcagatatatcctgttttcaacttaacgattccagctacgacagtcttgaaaatgaactaaacgaagacgttgacgccccttgcagtgacctggttaaaaaactgggacaggggtcccggtcaatggacagcgtgttgaccctctctgattacgacctggatcagcccgaggtggagggactgctcacactcagcgacttcgacctggcccactcgaaagacgaggacgttcagatgaagcggcctctcgaaagcaaacccgtgaacatcctggtttatactaagatccctctccgggaccacgctcgggcaccctccgcaatgtgtacaccttcttacttatctactgcagcggctaatgcagcgaagtcactacgccgccacagacgatgctcagagccctcaatcgactacctggattctaagctaagctacctgcgggagttctaccagaagaagctgcggaaatcgagctgtgacgccatattatcccaaaaggatgaggactacttaaaacaaaatcaacccctacaagaggaggggaaaacgtgctttaaacagagcctggtgactggcaccgatgtgtctaaaaagaacgcgactacacagaacaccaaaaagaaatccctctcgggatcagaggggaatcacgtgaagctatttccgaagtctaagcccgttgccatctcagtggcttcctattcaccaatgtctagtcaagaccactcaaaaaatcagccattcgacgtgaacaccagcgggtatagccctccccacaccgctgacgcattaaagggcccccgcacccacaggaggtgcagcgagcctaacatcgaggatcagaacaggaaacttacgtatttgcggggcatttacagtaagaagcagcataagacgtcttgcgaagcggggcttctgcatggtgaggaagattacttaaagcggcataagagtctccaaatggaagggcagaagctcattaatcagagcctcgtgatgggcatcgaggtaggtaaatcatctgccaccaatcagaacaccgagaaggttctgccccctagactgaatctgtgcccccgaactagttattcttctctttcgtcccctggtactagtccgtccggctcatccgtttcatcccaggactccgcattctcccagatttctgagcatagcgttttcacccccaccgaaactagtagtccaatagattgcacattccaggcccagaggaaaagggaggacctgagcccagatttctctaacgccagccacgtctccggtatgccaggtcctagcagcggacaagcctgctctaggcctgcatatacaaagaaagacacaatggaatggcattctcaaatgcacagtgtcaccctccacccgtccacttggcttcgcaatggggtggctagcctgaagaattggagcttgaaaaaaaaagcaaaggcggcacgccctgaagaagaaaaaatagcttccccaaagggaccactggagcctccaccgcatgcatcaggggtgccagaagccaatagtctccaagaggaacaaaaagatctgccactgcgggctgccgagggattgagccccgtccagtccgcccagaggtgctcgtcaagtcctttccaagatagtgagcgtcactgttcgtctcccttttcactggttgagtccaggctgaaactgtgcatgaagtcccatgaggaaatcgaacctgggagccagagttcttccggctctctaccctgggagcgggctagtgcatcatcttggacattggaagacgcgactagccctgattccggacccactgtggtttgcgatatcgaggatagatacctcacaaaggatatatag

SEQ ID NO: 26160 - DNA, 2196 bp, synthetic construct
  misc_feature 1..2196: note = Description of Artificial Sequence: Synthetic coding sequence
  source 1..2196: mol_type = other DNA
atggaccagggcaacgacgaggagaagatcaacaccgtgcagcggctgcttgaccagctgcctcgagctaacgtagtgcttcttagatacctgttcggcgtcctccacaatatagaacagcacagctcgagcaatcaaatgacagcctttaacctggcagtctgcgtcgctccaagcatcctgtggccccctgccagctcgagcccagaactagagaatgagttcaccaagaaagtgtcactcttgatacagttcttgatcgagaattgccttcgcattttcggcgaggaaatcacgtctttatttagggaagtatcagtgcgctgcgataccagagagaatgctagtgatatttcctgtttccagctgaatgactcttcgtatgacagtttggagaacgagctgaatgaggacgtagacgctccgtgttctgacctcgtcaagaagttgggccaagggtccagaagtatggatagcgtactgaccttgtcagattacgatctagatcagcccgaagtcgagggcctcctgaccctgtccgatttcgaccttgcccatagtaaggacgaggacgtgcagatgaaacggcccctcgaatcaaagccagtgaatatcctcgtttataccaagataccactgcgtgaccacgcgagagccccatcagcaatgtgtactccttcttatctgagcactgcggctgccaatgctgctaagtccctcaggcgtcacaggcgatgttccgagcctagtatcgactacttggatagcaagctctcatatctgcgggagttctaccagaagaaactgcgcaagtcctcgtgtgacgccattctgtcccagaaagacgaggactacctgaagcagaatcagcccctgcaggaagaaggaaagacttgctttaagcagtccctggtcaccgggaccgacgtgtctaagaagaatgctaccacccagaatactaaaaaaaagtccctatctgggagtgaggggaaccacgtgaagctgttccctaaatctaagcctgtggcgataagcgtggcttcctactctcctatgtcgtcgcaggaccattcgaaaaatcagccatttgacgttaacacttccggttacagcccaccccacaccgccgatgcccttaaggggccccgtacccatcggcgatgctctgaacccaacatagaagatcagaatcgcaaactgacttatcttagaggaatttactctaagaaacagcataagacatcctgtgaggctgggctcctgcacggagaggaggactatctgaaacgtcataagagtcttcagatggagggtcagaaactgataaaccaatctctagtcatgggaatcgaagtggggaagtcttccgccaccaaccaaaacaccgaaaaagtgttgcctccccggctgaatctgtgccctcggaccagttactcaagcctgtcttcccctggcacttcgccctcaggcagcagcgtcagttctcaggatagcgccttttcccagatctccgagcactctgtcttcacaccaaccgagacttctagtcccatcgattgcacttttcaggctcaacgcaagagagaggacctgtctcccgacttcagtaacgcctcacacgtctcaggcatgccaggtccttcttcggggcaggcttgcagtcggcctgcctacactaaaaaggataccatggagtggcacagccagatgcattccgtgaccctacacccaagtacctggttgcgtaacggcgtggcatctcttaaaaattggtctttgaaaaagaaagctaaggctgcccggcctgaggaggaaaagattgccagcccaaaggggcccctcgagccgcctccacacgcctctggcgttccagaagctaacagtctgcaggaggagcagaaagatctgccactgagagctgcagaaggattatcccccgtgcagtctgcgcagagatgttcttccagtcccttccaggattcagagcggcactgttcatctccttttagcctggtggaatcccgcttgaaactgtgtatgaagtcacatgaggagatcgaaccaggaagtcagtctagttctggcagtctgccctgggaaagggcctccgcttcctcttggacgctcgaggatgccacaagccctgacagcggaccgacagtggtatgcgatatagaggaccggaactgttgctag

SEQ ID NO: 26161 - DNA, 3498 bp, synthetic construct
  misc_feature 1..3498: note = Description of Artificial Sequence: Synthetic coding sequence
  source 1..3498: mol_type = other DNA
atgaccttctggatcatcatcaacaagaagatgaagaccctggccgaacgaaggaggtctgccccctcactgatcttggacaaggccttacagaaacgccccaccacccgcgacagcccttctgcctccgttgatacgtgcacgtttctcagcagcctagtgtgttcgaacaggaccctgctcattgatggccgcgcggagctgaaacgagggctgcagcgtcaggaacgtcatctttttctgtttaacgatttgttcgtcgtcgcaaaaataaaatataacaacaattttaaaataaaaaacaaaatcaagcttacagacatgtggaccgcttcatgcgtggatgaagtcggggagggaaacaccaatgctatgaagagcttcgtcctcggctggcccacagttaacttcgttgctacgtttagctccccagaacagaaagataagtggctttctctgctacagagatacatcaatctggagaaggagaaagactaccccaagtcaatcccactgaagatctttgctaaagacatcgggaattgtgcctactccaaaacaattacagtcatgaactcagataccgcaaatgaggtcataaatatgagcctgcctatgttgggaataactggatccgagagggactaccagctctgggtcaactccgggaaggaagaagctccataccctctcattggccatgagtacccctatggaataaaaatgagtcacctgcgggattcagcactgctcactccgggatctaaagattcaaccacgccatttaatctccaagagccttttctaatggaacagttacctagggagatgcagtgccaattcatcctgaagccctctcggctggcagcggcccagcagttgtctgacagcggccataagacatttaagcgtcgacgttccatcatcaactgggccttttggcgcggatcttcaacacatctggataacttgccctcatctcccactagccctatgcctggacaacttttcgggatctcacttcccaatatttgcgagaacgacaaccttcccaagccagtcctggacatgctgttttttcttaaccagaagggtcccctgactaaggggatttttagacagtcagccaacgtgaagtcctgccgggaactcaaggaaaaactgaactcaggggtggaggtccatctggactgtgagtccatctttgtgatagcttcggtcctgaaggacttcctgcgaaatatcccaggtagcatcttttcaagtgacttgtacgaccactgggtcagcgtcatggaccagggcaacgacgaggagaagattaacaccgtgcagcgcctcctggaccagctgcccagggccaacgtagtcctgctccgatacctgtttggtgttctccataatatcgagcagcactcttcctccaaccagatgacggcttttaatcttgctgtctgcgtcgctccatcaattttgtggccacctgcttcctcctcaccggaattggagaacgagtttaccaagaaggtgagcttgttgatacaattcctgatagagaattgtctgcggatatttggcgaggaaataacatctctcttccgagaggtatctgtccggtgtgacacgcgtgagaacgcatctgatatatcctgcttccagctcaacgattcctcatacgatagtctagagaacgagctgaatgaggatgtagatgctccgtgctctgatctggtcaagaagctggggcagggttctaggtctatggatagcgtcctaaccctctccgactatgatctggatcagcctgaggtggaaggactactaactctcagcgattttgacctcgcccactccaaggatgaggatgttcagatgaagcgcccattagagagtaaacctgtcaacattttagtgtatactaagataccactccgggatcatgccagagctccttcagctatgtgcactccgagttacttgtccacagccgctgccaatgctgctaaaagtctgcgtagacatcgacgatgctctgaacctagtatagactacctcgactctaagttgtcctaccttagagaattctatcaaaaaaaacttagaaagtcgagctgtgatgccatactgtcacagaaggacgaagactacttgaaacaaaaccagccgcttcaagaagaggggaagacctgtttcaaacagtcactcgtgactggcacggacgtgtccaagaaaaatgcaaccacacaaaacaccaagaaaaaatctctgtctgggagcgaaggcaatcatgtaaagctgtttcctaaatccaagcccgttgcgatcagcgtggcctcttattctcccatgtctagtcaagatcattctaaaaatcagccctttgacgtgaatacgtccggctactcaccccctcacacggccgacgcacttaagggtccaagaacccacaggaggtgcagtgagcccaatattgaagaccaaaacagaaagctgacctacctacgcggaatctactctaaaaaacaacataaaacatcttgtgaggccggactcttgcatggagaggaggactatttgaagaggcacaaatctctgcagatggaaggacagaaacttatcaaccaatccctcgttatgggtatcgaggtagggaagtcttctgcaacaaatcaaaatactgaaaaggttctgccacccagactgaacctctgcccacgcacttcatactcaagtctttcgtcacctggcacctccccctctggaagttctgtttcttctcaagactcagctttcagccagatttctgaacattcggtttttacacccaccgaaaccagttccccaatagactgtacatttcaggcccagaggaaacgcgaagacttatccccagacttctcaaatgcttcccatgtgagcggaatgcccggcccttcatctggccaggcttgtagccgaccggcatatactaagaaggacaccatggaatggcactcccagatgcacagcgttactctgcacccatctacctggctgaggaatggcgtggccagccttaaaaactggtccctaaagaagaaggccaaggccgcgaggcctgaggaggagaagatagcgagtcctaaagggcccctcgagcctcctccacatgccagcggggtgcctgaggccaactccctacaggaggaacagaaagacctgcctctccgcgcagcagaggggctgtcacccgtgcagtctgcacagcgatgtagcagctctcctttccaggattcagagcggcactgttcttcaccatttagcctagtcgagtcacggctcaagctgtgtatgaagtctcatgaagagatagagccaggctcgcagtcttctagtggatcacttccatgggaaagggccagcgccagctcctggaccctggaggacgccacctcgcctgattccgggccgaccgtagtgtgcgatatcgaggaccgttaccttaccaaagatatctag

SEQ ID NO: 26162 - DNA, 4542 bp, synthetic construct
  misc_feature 1..4542: note = Description of Artificial Sequence: Synthetic coding sequence
  source 1..4542: mol_type = other DNA
atgatgatggcccggaagcaggacgtgcggatccccacctacaacatttcggtcgttggtctctccgggacagagaaagagaagggccagtgtggaatcggaaaatcctgcctgtgcaataggtttgttcgcccttctgctgatgaatttcatctggatcatactagtgtactttccaccagtgatttcggcggtcgagtcgtgaacaacgaccactttctttattggggtgaagtgtctagatctctggaggattgcgtggagtgcaaaatgcacatcgtggagcagaccgaatttatcgacgatcagacttttcagccccaccgcagtacagccctgcaaccttacatcaagagagccgccgctaccaagctggcttccgccgagaagctcatgtacttttgtacagaccagctcggcctcgagcaggacttcgagcagaaacagatgcccgatggcaaactacttgtcgacggcttcctgctaggcattgacgtgtcccggggaatgaatcgaaattttgatgatcaacttaagtttgtatcaaacctgtataaccagctcgcaaaaaccaagaagccgattgtcgtcgtgctgacgaagtgcgatgaaggtgtagaacgatatatcagggacgcacataccttcgccctgtccaaaaaaaatttgcaggtggtcgagacttctgctcgatcgaacgtcaatgtcgacctggctttttctaccctggtacagttaatagacaagagccgcggaaagactaagattattccatatttcgaagccctcaaacagcagtcccagcagatcgcaactgcaaaggacaagtatgaatggcttgtgagcagaatcgttaagaaccataatgagaattggttatctgtttccagaaaaatgcaagcatctcccgagtaccaggattatgtgtacctcgaggggacgcagaaggccaaaaagctatttcttcaacatatacatcgactaaaacacgaacatatcgaacggcgaagaaaactttacttggcagccttaccactggcctttgaagcattaattccaaacctggatgaaatcgaccatcttagctgtattaaggctaagaaactgttggagaccaagccagaattcctgaagtggttcgtagtgctggaagagacaccatgggatgctacatcacacattgataacatggaaaatgaacgtattccgttcgatctgatggacacagtacccgcagaacagctctacgaagcccacttagagaaactccgcaacgaacgaaagcgcgtggagatgcggcgggcctttaaggagaatctggagacatccccatttattacacctggaaaaccctgggaagaagcgcggtcatttataatgaatgaagatttttaccaatggctcgaggagtccgtatacatggatatttacggcaagcatcagaagcaaattatcgacaaagctaaggaggaatttcaggagctcctgctcgagtactcagaactgttctatgagctggaactggacgctaaaccctcaaaagaaaagatgggggtgattcaggatgtcctcggcgaagagcagagattcaaagctcttcagaagttgcaggcagaaagagacgcgctgattcttaagcatatccacttcgtctatcaccccacaaaggagacgtgcccctcctgccctgcttgcgtggacgccaagattgaacatcttatctccagtcggttcattaggccaagtgaccgaaatcagaagaatagtctctccgacccgaacattgacagaattaatctcgttatcttgggtaaagacggtctcgctcgggagctggctaatgaaatacgcgccctatgtactaatgatgataagtatgtcatagatggtaagatgtacgagctgagcttgcgacccatcgaaggcaacgtgcgactcccagtgaattcctttcagactcccacctttcagccacacggttgtctctgtctctataattctaaagagtcactgagttacgtcgtggaatctattgagaagagccgtgagtcaactcttggtaggcgggacaatcatctggtccacctgcctctcaccttaattctcgttaataagaggggtgacacctctggtgagactctgcacagtctgattcagcaagggcaacagatcgctagcaagctgcagtgcgttttccttgaccctgcctctgcaggcattgggtacggcagaaatattaacgagaaacagatttctcaggtgctcaagggcctactcgattctaaacgcaacttgaacttggtgtcctctactgcaagtatcaaggatttagctgatgttgatctgcgtatcgtgatgtgtctcatgtgtggggaccccttttcggctgacgatattctgtttccagtcttgcagagccagacttgcaagtcttctcactgcggcagcaacaacagcgtgttacttgagttgcctatcggacttcacaagaaaagaattgagctgtcagtcttgtcataccattcttcattttctattcgcaagagcagacttgtgcacggctacatcgttttttactcggctaagaggaaagcttcgctagcgatgcttagggcctttctctgcgaagtccaggatatcatcccaattcaactggtcgcactgacagacggcgcagtggacgttcttgacaacgatctgtctcgagagcaactcacggaaggcgaagaaatcgctcaagaaattgatggtcgctttaccagcatcccgtgctcccagccgcaacataaactggaaatttttcaccctttttttaaggatgtggtagagaagaaaaacatcatcgaggctacacatatgtacgataatgccgcagaagcctgctcaaccacggaggaggtgttcaattccccacgtgcagggagcccactgtgtaactcaaacttgcaggacagcgaggaggatatcgagccttcttatagtctattcagggaggacacgtcactaccatccctttcaaaagatcacagtaaactgagtatggagctggaaggcaatgacggcttatcttttatcatgagtaattttgaatctaagctaaacaacaaagtgccaccccccgtgaagcctaagcctccagttcactttgagattaccaaaggtgaccttagctatctggatcagggacatcgagatgggcagcgaaagtcggtgtcctctagcccctggcttccacaagatggcttcgatccgtccgactatgcggaacccatggatgctgtggttaaaccccgaaacgaggaagagaacatttatagtgtgcctcatgacagcacccagggaaaaatcataacaatccggaacatcaacaaggcccagtcgaacgggagtggaaatggaagcgactccgaaatggatacaagttccttagagcggggacgcaaggtaagtatcgtgtcgaaaccagtgctctaccgaactcggtgcacaaggttgggccggtttgcttcttaccggacgtccttttctgtggggagcgatgacgagcttgggcctatacgaaaaaaggaggaagaccaagcatcccagggttacaagggtgataatgccgttattccctatgaaacagacgaggaccccaggagacgaaacattctgaggtcactgagacgaaatactaagaaacctaaacccaagcctcgcccatctattacaaaggctacgtgggagagcaactacttcggcgtgccgctaactaccgtagtaacgccagaaaagccaatcccaatctttatcgagcggtgtatcgagtatattgaagctacgggactttctaccgagggtatctatagagtgagtggaaataagagcgaaatggagagtctccagaggcagtttgaccaggatcacaaccttgacttagcggaaaaggacttcaccgttaatacggtcgccggagccatgaagtccttcttctctgagttaccagaccctcttgtgccctacaacatgcaaattgacctagttgaggctcataaaattaatgacagggaacagaagctgcacgctctgaaagaagttctgaagaagttccccaaggagaatcatgaggtattcaagtatgtgattagccacttgaataaagtcagtcataacaacaaggtgaacctgatgacttccgaaaatctctccatctgtttttggcccaccctaatgagaccggacttctctactatggacgcccttacggccacacgcacttaccagaccataatcgagctgttcattcagcagtgccctttcttcttctacaaccgccctataaccgagcctcccggagcaagaccaagctcacctagcgcagtcgcttccaccgtaccttttctgacatccacccctgtgacctcccaaccttctccccctcaatcgccgccacctacaccacagagcccgatgcagccactgctgccaagccctctccacccccatcgcccaactcctcaaccctcgaggaacatcccctggcagacaaaagagcactag

SEQ ID NO: 26163 - DNA, 4500 bp, synthetic construct
  misc_feature 1..4500: note = Description of Artificial Sequence: Synthetic coding sequence
  source 1..4500: mol_type = other DNA
atgatgatggcccggaagcaggacgtgcggatccccacctacaacatcagtgtggtcggactatctggcacggagaaggaaaaagggcaatgtggaatcggcaaaagttgtctctgcaacaggttcgtgcggccgtctgcagatgaattccaccttgaccacacttccgtattatccacaagtgatttcgggggtcgcgtggttaacaacgaccatttcctttactggggggaggtgtctagatctttagaggactgcgtcgaatgtaaaatgcacattgtcgagcagaccgagttcattgatgaccaaacgtttcagccccatagatctactgccctgcagccctatattaagcgggcagcagcaacgaaactggcgtctgccgagaaactcatgtacttttgtaccgaccagctgggcctcgaacaagacttcgaacagaaacagatgcccgacggcaagctgctggtagatgggttcctgcttggcattgacgtgagccgcggcatgaacaggaattttgatgatcagctaaaattcgtctccaacctgtacaaccagcttgctaaaactaaaaagccgattgtggtcgtgctcactaagtgcgatgaaggtgtggaaagatatataagagatgcccatacatttgcgctgagcaagaaaaatctgcaagtcgtcgaaacctccgctcgctccaatgttaatgtggatttagccttctctaccctcgtgcagcttatagacaaatccaggggaaaaactaaaattatcccttatttcgaggccctcaagcagcaatcacaacagattgctaccgctaaagacaagtatgaatggctggtttcaagaatagttaagaaccacaatgaaaattggctcagtgtgtcgcgcaagatgcaggcttcccctgaatatcaggattatgtctacttggaaggcacccagaaagcaaaaaaactgttcctgcaacatatccaccgcctgaaacacgaacacattgaacggcgcagaaaattgtacttggcagccctgcctctggcattcgaggctcttatcccaaacctggatgagatcgatcatctatcctgcattaaagcaaagaagcttttggaaacgaaacctgagtttctcaagtggtttgtggttcttgaggagaccccttgggatgctacctctcacattgacaatatggaaaatgagcgcataccattcgacctgatggacaccgtccctgccgaacaactgtatgaggcccacctggaaaagctgagaaacgagcggaaacgggtcgaaatgcggagggcttttaaggagaatctggagacttcaccctttattacccccggcaagccctgggaagaagcgagatcttttatcatgaacgaagatttctaccagtggttggaggaatccgtttatatggacatctacggcaagcaccaaaagcagatcattgataaggcgaaagaggaattccaagaattgttgttagagtattctgaactcttctacgaactggaactggatgcaaagcccagcaaagagaagatgggagttattcaggacgtgctgggggaagaacaacgatttaaagctcttcaaaagctgcaggctgagcgagatgctctaatcctgaagcacatccattttgtgtaccaccccacgaaagagacctgtcctagttgtcctgcttgcgtggatgccaagatcgaacacctgatttcttctcgttttatccgcccctctgaccggaatcagaagaactccctgtcggaccccaatatcgaccgtataaacttagtgattttgggcaaagatggactggcccgagagctagccaatgaaattcgcgctctgtgcaccaacgacgacaagtatgtgattgacggtaaaatgtacgagctctcattaagacccattgaagggaatgtgagactgccagtgaactcctttcagaccccaacctttcaacctcacggctgtttatgtttgtacaactctaaagaaagtctgagttacgtcgtggaatccatcgagaaatccagggaatccaccctcggccgaagagacaatcacctggtccacctgcctcttaccctcattctcgtgaacaagagaggggatacctctggtgagacccttcattctctcatacagcagggccaacagatcgccagcaaactgcaatgcgtcttcctggatcctgcgtctgcaggcatcggttatggccggaatatcaatgaaaagcagatatcgcaggtcctaaaaggcttgctggactccaagcgaaatctcaatctggtctccagtacagctagcattaaagatctcgccgacgtcgatctacgcattgtcatgtgcctgatgtgtggagaccccttctcagctgatgacatcctatttcctgttctccagagccagacctgtaagtcttctcactgtggatccaataactccgtcttacttgaactccctatagggctccacaagaaaagaatcgagttatccgtactttcttatcattcttctttttctattaggaaatcccgtcttgttcatgggtatatagtcttctattcagcaaagcggaaagcatctcttgcaatgctgagagctttcttgtgtgaggtccaggatatcataccaattcagctagtcgcccttaccgatggagccgtcgacgtcctggacaatgatctcagtcgcgagcagttgaccgagggtgaggaaatcgcccaggagattgatggaaggtttacaagcatcccttgcagccagccacaacataagctagaaatattccaccctttctttaaagatgtggtagaaaagaagaatatcattgaagccacacatatgtatgataatgctgcagaagcttgttccacaactgaggaagtgttcaactctcctcgagctgggagtcccctgtgtaacagcaacttgcaggactccgaggaggacattgaacctagctattctctatttagggaggacacatccctgccctcactgagcaaggaccactccaagctctctatggaacttgagggtaatgatgggctgtcgtttatcatgtcaaattttgagtctaagttgaataacaaggtcccgccgcccgtcaaaccaaagccacccgtccacttcgagataaccaagggtgacttatcttatttggatcagggacaccgagatggccagagaaagagtgtatcttctagtccttggttaccacaagatgggtttgatcctagcgactatgctgagcccatggacgccgtggtgaaacctcgcaacgaggaggagaatatttatagcgtgccccatgactctacccagggaaaaatcatcactattcgtaatatcaataaggcccaaagtaatggcagcggtaacgggagcgacagtgagatggatacgagttcactcgagaggggacggaaggtcagtatcgtgtctaagcctgtcctttacagaacccggtgtacccggctgggacggtttgcaagttaccgtacaagcttctcagtaggtagtgacgatgagctcgggccaatcaggaaaaaggaggaagaccaagcctctcaagggtacaagggagataatgcagtgatcccttatgagacagatgaagacccacggcgaaggaacattctgcgatctcttcgccgtaataccaaaaagcccaagcctaaaccacgcccatcaatcacaaaagctacatgggaatcaaactacttcggtgttcctctgacaacagtggtgacaccagagaagccaatccctatctttattgagagatgtatagagtacattgaagctaccgggctgagcactgaggggatctacagagtatctggcaataagagcgagatggagtcactgcagaggcagtttgatcaggaccacaacctggacttggccgaaaaggacttcaccgttaataccgtcgccggagctatgaagtccttttttagcgaactacccgatcccctggtaccatacaatatgcagatcgaccttgttgaagcccacaagatcaacgatagagaacagaaactccatgcactgaaagaagtgctgaagaagtttcctaaagagaaccacgaagtgtttaagtatgtaatatcccacctcaataaggtgtcacataataataaagtcaacctcatgacgagcgaaaacctcagtatttgtttctggcctaccctgatgcgacctgatttcagtacaatggatgctctgactgctacaaggacctatcaaactattattgagttatttatccagcagtgcccattttttttctacaaccgacctatcaccgagcctccgggggcccggccatccagccccagcgccgtcgcatcgactgtcccgtttctcacttctactcccgttacaagtcagccctctcccccacagagtccgcctcccacccctcagtcccccatgcaacccctcctgcctagtcaactgcaggccgagcataccctgtag

SEQ ID NO: 26164 - DNA, 2250 bp, synthetic construct
  misc_feature 1..2250: note = Description of Artificial Sequence: Synthetic coding sequence
  source 1..2250: mol_type = other DNA
atgatgatggcccggaagcaggacgtgcggatccccacctacaacatcagcgtggtgggactgagtgggaccgagaaggagaagggtcagtgtggcatcgggaaaagctgcctgtgcaacagattcgtgaggccttcggccgatgagtttcatctcgatcacacctcagtcctcagtacctccgattttggtgggagagtggtcaataacgatcatttcctctattggggcgaggtctctcgctccttggaggactgtgtggagtgtaagatgcatatagtcgagcagacggaattcatcgacgatcagaccttccaaccccataggagcaccgcacttcagccttatatcaagagagccgcggcaacaaagctcgcctcggccgagaagctgatgtatttctgtacggaccaactaggactggagcaagacttcgaacaaaagcaaatgcctgacgggaagctgctcgtcgacggattcctactcggcattgacgtctctcggggaatgaaccgaaacttcgatgaccagctcaaatttgtgtctaacttgtacaatcaattagccaaaaccaagaaaccaatcgttgttgtgctgaccaagtgtgatgagggcgtggagcggtacatcagggacgcccacacatttgccctgagcaagaagaacctccaggttgtagagacctccgccaggtctaacgtgaacgttgacctggcttttagcactttagtgcagctaatcgataagagccggggcaagaccaagataatcccttacttcgaagctctgaaacagcaaagccagcagatagcgacggccaaggataaatatgagtggttggtcagcagaatcgtaaaaaaccataatgaaaactggctgagcgtgagccgcaaaatgcaggccagtcccgagtaccaagattacgtctatcttgaaggaactcaaaaagcaaaaaagctgtttctgcaacacattcacagattgaagcacgagcatattgaaaggagacgaaagctctatttagctgctttgccgttggcctttgaggctctgattccgaacctggacgagatcgatcacctatcgtgcatcaaggcgaagaagttactggagactaagccagagtttctaaagtggttcgtggttctcgaagagaccccgtgggacgcaacgtcccatattgacaacatggaaaatgagcgtattcccttcgaccttatggacactgtgccagctgagcagctatatgaggcccacttggaaaaattgaggaatgaacggaaaagagtggagatgcggcgagcatttaaagaaaacctggagaccagccctttcatcactccgggaaagccatgggaggaagcacgcagttttatcatgaacgaggatttctatcagtggcttgaggaatcagtgtatatggacatctatggtaaacaccagaagcagattatcgacaaagcgaaagaggaattccaggaactgctgcttgaatattcagagctattctacgaacttgaacttgatgctaaaccgagtaaagagaaaatgggcgtaatccaggatgtgctgggggaagaacagcgctttaaggctctgcagaagctccaagcagaacgtgatgctttgatcctcaagcacatacacttcgtttatcaccccacaaaggagacctgcccttcatgtcctgcctgcgtagatgcaaagatagagcacctaatctcatcaagattcataagaccctcagaccgcaaccaaaagaattcgctgtcagatccgaatatcgatcgcattaaccttgtgatcttgggcaaggatggcctcgccagagagctggcgaacgagattcgggctctctgtaccaacgatgacaaatacgtcatcgacgggaagatgtatgagctcagcttgcgtccaatcgaagggaatgttaggctgcctgtgaattcattccagacacccacttttcagccccacggatgcctctgcctgtataatagtaaggaaagtctgtcttatgttgtggaatccatcgaaaaatcccgagagtctacattgggaaggagggataaccatctcgtgcatctgccactgacactcatactggtgaataaacgcggcgacacttctggcgagactctccactccttgattcagcaggggcagcagatcgccagtaagctgcagtgtgtcttcctggatccagcctcagcgggcgcagccgacttgtcctggctggggcccatctag

SEQ ID NO: 26165 - DNA, 978 bp, synthetic construct
  misc_feature 1..978: note = Description of Artificial Sequence: Synthetic coding sequence
  source 1..978: mol_type = other DNA
atggacatgtggaccgccctgctgatcctgcaggccctgctgctgcccagcctggccgacggcgccacccctgctctgaggtttgtggccgttggcgactgggggggagtgccaaacgctccctttcataccgcacgggaaatggccaacgccaaggagatcgcgcgtaccgtacaaattttaggtgctgactttattctctcattgggggataacttttattttaccggggtacaagacatcaacgataaacggtttcaggagacattcgaagacgtcttcagcgatcgcagtcttaggaaggtgccttggtacgtactggcagggaaccacgatcatctaggtaacgttagcgcacagattgcctacagtaaaataagcaagagatggaattttccaagtcctttctacagactgcattttaaaatcccacagaccaacgttagcgtggcaatctttatgcttgataccgttacactctgtggcaatagcgatgatttcctttcacagcagcctgaacgtccccgcgacgttaagttagcgaggacccaactttcatggctgaagaagcagttggccgctgcccgcgaggactacgtgttagtggccgggcattatcccgtatggtccattgctgaacatggcccaacccactgcctagtcaaacagctgcggccattgctggcaacctatggagtcactgcctatctttgtggccatgaccataacctccaataccttcaggatgaaaatggcgtgggatacgtgctgtctggcgccgggaatttcatggacccaagcaaacggcaccagcggaaggtgccaaatgggtaccttcgattccactacggaactgaggacagcctcggtggtttcgcctacgttgagatctcatcaaaggagatgacggtcacctacatagaagcgagcggaaagtctttgtttaaaactcgactcccaaggagagcacgtccctag

SEQ ID NO: 26166 - DNA, 2349 bp, synthetic construct
  misc_feature 1..2349: note = Description of Artificial Sequence: Synthetic coding sequence
  source 1..2349: mol_type = other DNA
atgaacagcgccgagcagaccgtgacctggctgatcaccctgggcgtgctggaatctccaaagaagaccatatctgatcccgagggcttcctacaggccagtttgaaagatggagtggtgctatgtcgactcctcgagcgtctgcttcccggcacaatcgaaaaggtttatccggaaccacggtccgaatcagaatgcttgtccaatattagggagtttcttcggggctgtggcgcctcattaaggcttgagactttcgacgcaaacgacctgtaccagggacaaaatttcaataaagttttgtcaagcctcgtaacactcaacaaggttaccgctgatatcggcctggggagcgacagtgtgtgcgcccgcccctccagtcaccgcatcaagtctttcgactcactcgggagtcagagcctgcacacaagaaccagtaagctcttccaggggcagtacagaagcctcgatatgacggacaatagtaataatcaattagttgtcagggcaaaattcaatttccagcagaccaacgaggatgaactgtccttctccaagggcgacgttattcacgtgacacgggtagaagaaggggggtggtgggaaggaaccctgaatggacgcactggttggttcccatctaactatgtgcgagaggtcaaggcgtccgagaagcctgtgagtcctaagagcggaactttgaagtcgcccccgaaaggattcgatacaacggccatcaacaaaagttattataacgtggtgcttcagaacattctggaaaccgagaatgagtactccaaggagttgcagacggttttatcaacctatctgcgacctctccagacctccgagaaattgagcagcgccaacatcagctatttaatggggaacctagaggaaatctgctcgtttcagcaaatgcttgttcagagcttagaggagtgtacaaagctgccggaggcacagcaacgcgtcggggggtgtttcctcaatttgatgccacagatgaagaccctctatctaacatattgcgccaaccacccatccgcggtgaacgtgctcactgaacatagcgaagaactcggcgaatttatggaaacaaagggcgcaagtagccctggaatcctcgtcctgacaactgggttaagcaaacctttcatgagactagataagtaccccacccttctaaaagagctcgaacgccacatggaagactatcatactgaccgccaggacattcaaaagtcgatggctgcattcaaaaacttgtctgctcagtgtcaggaggtaagaaagcgcaaggagcttgagctccagatcttaactgaagccattagaaattgggaaggagatgacataaagactctggggaacgtcacttacatgagccaggtcttgatccagtgtgccgggtctgaagaaaaaaacgaaaggtatctgcttctcttcccaaacgtgctactcatgctcagtgccagtccacgaatgagcggctttatctatcagggcaagctgcccactacgggcatgacaataaccaaactagaggactcagagaaccacagaaatgcctttgagattagtggctctatgattgagcgcattttggtcagctgcaacaaccagcaagatctgcaagaatgggtggaacacctgcagaagcagacaaaggtgactagcgtgggaaatcctaccataaaacctcactctgttcctagtcacaccctgccctcacaccccgtgactcccagctccaagcacgcagactctaagcctgctcctcttacacccgcctaccatacgctgcctcatccttcccaccatggtacaccccatacgacgattaattggggtccactggagccaccgaagactcccaagccttggagcctcagttgtctaaggcctgccccccccctcagacctagcgctgcattatgctacaaggaagatctttccaaaagtccaaagactatgaagaaattgttgccaaagcgcaagcctgaacgcaaacccagcgatgaagagttcgctagccggaagagcacagcagctcttgaggaagacgctcagatcctgaaggtgatagaggcctattgcacatcagctaaaactcggcagaccctaaacagtacttggcaggggacagacttgatgcataaccacgtgctggcagatgacgaccagcctagtctggacagtctaggacgtcgcagttcgctttccagactcgagccttcagaccttagcgaggattcagattatgactccatttggacggcacactcttacaggatggggagcacatccagaaagagctgttgttcctatataagtcatcagaactag

SEQ ID NO: 26167 - DNA, 2196 bp, synthetic construct
  misc_feature 1..2196: note = Description of Artificial Sequence: Synthetic coding sequence
  source 1..2196: mol_type = other DNA
atgaacagcgccgagcagaccgtgacctggctgatcaccctgggcgtcctggaatctcccaaaaagacaatcagcgatcccgagggttttctccaagcatcactcaaagatggagtcgttctttgtcgcttactcgaacggctccttcctgggactattgagaaggtgtacccagagcccaggtctgaaagcgagtgtttgagcaatatccgtgagttccttaggggctgcggcgctagcctgagactggaagacatgaccgataattcaaacaatcagcttgtggttcgggctaaattcaatttccaacagacgaatgaagacgagctgagtttttccaagggagatgtgattcacgttaccagggtggaagaaggcggatggtgggaaggaacactcaatggacgtacgggatggttcccatctaactatgtgcgcgaagtcaaagcctccgagaagcctgtcagcccgaagtcaggcaccttaaaatcaccacccaagggattcgacaccacagctatcaataaaagttactataatgtagtactccagaatattctggagaccgagaacgagtacagtaaggagctgcaaacggtgctgagtacttacctccgaccccttcagaccagcgaaaaactgagctcagcaaacattagttacttgatgggaaacctggaggagatatgtagttttcagcaaatgctcgtccagtcattggaggagtgcacaaagcttcccgaagctcagcagcgggtgggcggttgcttcttgaatttgatgccacagatgaaaaccctgtacctgacatattgcgcaaaccacccctctgcagtaaatgtcctgacggagcactcagaggaattgggagaattcatggaaaccaagggggcgtcctcccccggcatcctggtcctgacaaccggcctgtctaagcctttcatgcgtctggacaaatatcctaccctgttgaaagaactggagcgtcacatggaagactatcatactgaccggcaggatatccagaagagcatggctgcttttaagaatctgtctgcccagtgccaggaggtccggaaaaggaaagaactggaactccagatacttacagaagctatccggaattgggaaggcgatgacatcaaaaccctgggaaacgtcacatatatgagccaagttctgatacagtgcgccggcagcgaggaaaaaaatgagagatacctgctgttgttccccaacgtcttgctgatgttgagcgcgtccccacggatgtccggattcatttatcagggaaaattaccaaccaccggcatgactatcaccaagttggaggactccgaaaatcaccgcaacgcatttgagatttcagggagcatgatcgagagaatcctcgtgtcttgcaacaatcaacaagatctacaggagtgggttgagcacctacagaaacagactaaagtgacttcagtggggaacccaactatcaagccacattccgttccatctcacactctgccatctcatcctgtgacgccatcctcgaaacacgccgactcgaaaccggccccattgacacccgcctaccatactctcccacatccgtcacaccacggcaccccccacactacaatcaattggggtcctcttgagccgcctaagacaccgaagccatggagcttgagttgcttgcgtcccgcacccccactcagaccatcggcggcactctgttacaaggaggacctctccaagagccccaagacaatgaaaaaactcctcccaaagagaaagcccgagcgcaaaccttccgatgaggagtttgccagtcggaagtcaacagccgcactcgaggaggatgctcagattctcaaggttatcgaagcttattgcactagtgccaagactcgccagacgttgaacagcagcagtcgcaaagagtccgccccccaggtgctcttaccagaggaagaaaagattatagttgaagagactaagtcaaatggccagacagtaatcgaggagaaaagtttggttgatacggtttacgctcttaaagacgaggtacaggaactacggcaagataacaagaagatgaagaaatccctcgaggaggagcaaagggcacgcaaggacctggagaagctggtccggaaggtactgaagaatatgaatgatcctgcttgggatgagaccaacctgtag

SEQ ID NO: 26168 - DNA, 1878 bp, synthetic construct
  misc_feature 1..1878: note = Description of Artificial Sequence: Synthetic coding sequence
  source 1..1878: mol_type = other DNA
atgaccgacaacagcaacaaccagctggtggtgcgggccaagttcaacttccagcaaaccaacgaagatgaactgtccttctctaagggcgatgtgatccacgttacgcgggtggaggaaggtggctggtgggagggaacactgaacggcaggacaggatggttcccttctaattatgttagagaggtgaaagcaagcgaaaagccagtaagtcccaaatccgggactttaaagagtccacctaaggggtttgacacaaccgcaatcaataaatcgtactataacgtggtattacagaatattctggaaacagaaaatgaatacagtaaagagctgcaaaccgtcctgtctacatacctcagacctcttcaaacatccgagaaactgagctcggcaaacatcagctacttgatggggaatctggaagagatttgtagtttccaacagatgttggtacaaagcctggaggagtgtacaaagctgcccgaggcacagcagagagttggcggatgcttcctgaacctcatgcctcagatgaaaaccttgtaccttacgtattgtgctaaccacccatcagccgtcaacgtgcttacggaacatagcgaggagctgggggaattcatggagactaaaggcgcatcctccccgggaattctggtgctgacgacaggcttgagcaagcctttcatgcgcctagataagtaccccaccctactcaaggagctggagcgccacatggaagactaccacacagatcgccaggacattcaaaagagcatggcagccttcaagaatcttagcgcgcagtgtcaggaagtcaggaaacgcaaggagcttgaactgcagattcttaccgaggccatccgtaactgggaaggggacgacatcaagactcttgggaacgtcacttacatgtcccaggtcctcattcagtgcgccggaagtgaagaaaagaacgagcgttatcttctgctgttccccaacgtacttttgatgctgagtgcctctccccgcatgagcggttttatttaccaaggcaagctcccaacaacgggcatgaccataacaaaactcgaggattccgaaaatcatcggaatgccttcgagatctcaggctcgatgatcgagcgcattcttgtgtcttgcaacaatcaacaggacctgcaggaatgggtggagcatttgcaaaagcagacaaaagtgacatctgtggggaacccgactatcaagcctcattctgttccatcacatactctgcccagtcaccctgttacccccagttctaaacatgcagattctaagcctgctcccttaacaccagcctaccacactcttccccacccttcccaccacggcacgccgcataccacgatcaactggggacctctggagccgcctaaaactcctaagccttggagtctgagctgtttgaggccagcgcctcccctacgacctagcgcggcactttgctacaaggaagacttgtctaagtctcctaaaactatgaagaaactgctgcctaaaaggaaaccggagcggaaaccaagtgatgaggagttcgccagtagaaagtccactgccgctttagaggaggacgcgcagatccttaaagtgattgaggcctactgtaccagcgcaaagacaagacagaccttgaattccacttggcaaggtaccgacctcatgcacaatcacgttctggctgacgatgatcagccaagcctagattcattaggacgcagaagctcgctgtcccgcctggagccatccgatctgagcgaggattcagattacgattccatctggactgctcattcatacagaatgggctcgacttctagaaagagttgctgctcttacatatcccaccagaactag

SEQ ID NO: 26169 - DNA, 1941 bp, synthetic construct
  misc_feature 1..1941: note = Description of Artificial Sequence: Synthetic coding sequence
  source 1..1941: mol_type = other DNA
atgaccgacaacagcaacaaccagctggtggtgcgggccaagttcaactttcagcaaaccaatgaagatgagctgtcattcagcaaaggggatgtgatccacgtgaccagagtggaggagggcggatggtgggaaggaaccctgaacggtcggactggttggtttccctccaattacgtgcgcgaggtaaaggcttcggagaagcctgtgtcaccaaagagtggtactctcaagagtccaccaaaggggtttgacacgaccgctatcaataaatcttattataatgtggtacttcaaaatatcctggagaccgagaacgagtactccaaagagcttcaaacagtgctatcgacgtatctcaggcccttgcagaccagtgagaaactgtcttccgctaacatctcatatttaatgggtaatcttgaagaaatctgttcctttcagcaaatgttagtgcagtcactagaagaatgcaccaaacttcctgaggcccagcaaagggtgggtggttgttttcttaacttgatgcctcagatgaaaaccctatatctgacctactgcgcaaatcacccgtccgctgtcaacgtgcttactgaacacagcgaggagctgggcgagtttatggaaaccaaaggcgcttcatctccagggattctggttttaactaccggtctgtccaagccttttatgcggcttgataaataccctacgctactaaaggagctggaaagacatatggaggactatcacaccgaccgacaggatatccagaagagcatggccgcttttaagaatctgtctgcacaatgtcaagaagttcgcaagcgtaaggagctcgagcttcagatcttgaccgaggccattcgcaactgggaaggtgatgacatcaaaaccctgggcaatgttacctacatgtcacaggttctgatccagtgcgcagggagtgaagagaaaaatgagaggtatctgctactcttccctaacgttctgctaatgctctctgcctcgcctagaatgtctggcttcatttatcaggggaaactccccacaactgggatgactatcacaaaactggaagactccgagaaccaccggaacgcttttgagattagtgggagtatgattgagcgcatcctcgtgtcctgcaataatcagcaggacttgcaggagtgggtcgagcatttgcagaaacagaccaaagtgacgagtgtaggtaatcccactatcaaacctcacagcgtcccaagccatacgctccctagccatcccgttacaccttctagcaagcatgcagatagtaaaccagcacccctaacacccgcgtaccatactctaccccacccgtcgcaccacggaactccccacaccaccatcaactggggccccttggaaccacccaagacccctaagccttggtctttgtcctgcctacgccccgccccgcctctgcgcccttctgctgccctgtgttacaaggaggacctcagtaaaagccccaagaccatgaagaaactgcttccaaaaaggaaaccagaacggaaaccctcggacgaggagttcgcctcccgcaaatccactgccgctctggaagaagacgctcagattttgaaagtaatagaggcatattgtacttccgcaaagacacgacaaaccctcaactcctcttcacgaaaagagtcagctcctcaggtgcttctcccagaagaggagaaaattatcgtagaggaaaccaagtctaacgggcaaaccgtaatcgaggaaaaatccttggttgataccgtttacgcactcaaggacgaggtgcaggaattgaggcaggataacaagaagatgaaaaagtctctcgaggaggagcagcgggccagaaaggacctcgagaagcttgttcgcaaggtactcaaaaatatgaacgatcccgcgtgggatgagactaatctgtag

SEQ ID NO: 26170 - DNA, 2166 bp, synthetic construct
  misc_feature 1..2166: note = Description of Artificial Sequence: Synthetic coding sequence
  source 1..2166: mol_type = other DNA
atgaagaccttcgacgccaacgacctgtaccagggccagaacttcaacaaggtactttcttccctggtgaccctgaataaagttaccgccgatatagggctgggcagcgattccgtgtgtgcgcggcctagcagtcatcgtatcaagagtttcgacagcctcggatcccaaagcttgcacactcgcacatccaaactgttccaaggccagtataggagtctggacatgactgacaactctaacaatcaactcgtggtgagggcgaaatttaactttcagcagacaaacgaggatgagctctcttttagcaagggcgacgtcattcacgtgactcgagtggaggagggagggtggtgggagggaaccctgaatgggagaaccggctggtttccgtccaactatgtcagggaggttaaagcttcagaaaagcctgtgagccctaagagcggcacgctgaaatctcctcccaagggatttgacactaccgcaattaataaatcctactacaatgtcgttcttcagaatatcctggagactgaaaatgagtattccaaggagctccagaccgtgctcagcacatacctgaggcctttacagacttctgagaaactgtcctccgccaatatatcctacctgatgggaaatttagaagagatctgcagctttcagcagatgctagtccagagcctggaagaatgcactaagctgccagaggcgcaacagcgagtggggggttgcttcctgaacctgatgccacaaatgaagacgttgtatctgacttattgcgcaaaccacccctcagctgtcaacgtgctaacagaacactccgaagagctcggggaatttatggagactaagggtgcctcctccccagggatcttggtgctaacaaccggtctgagcaaaccctttatgagactcgataagtaccctaccctgttgaaggaactggaacgccacatggaggactatcatacagacagacaggacatccaaaaatcaatggctgcctttaaaaatctcagtgcgcaatgtcaagaagtgcgtaagcgtaaggagctggagttgcagattcttacagaggccattcgaaattgggaaggcgatgacattaagaccctggggaatgtgacgtatatgagtcaggtactcattcagtgcgccgggtcagaggaaaagaatgagaggtatcttctcctgtttcccaacgtcctccttatgctgtctgcaagcccccggatgtcgggttttatttatcaaggcaaattacccactacagggatgaccattaccaagctggaggattctgaaaaccaccggaatgcctttgaaatctctgggagcatgattgaaaggatcctagttagttgcaataaccagcaggacttgcaggaatgggtggagcacctacagaaacagacaaaagtgacatctgtggggaatcctactataaaacctcattccgttccctcccatactttaccttcacacccggtcacacctagctcaaagcacgcagattccaagcccgccccgctcacacctgcttaccacactttgccgcacccttcccaccacggaaccccacatacaacgattaattgggggcccctggaacctcccaagactccaaaaccctggtcactgagttgtctgcggccagcacctcctctccgtccgagcgccgcactgtgttacaaggaagacttatcaaaatcccctaagaccatgaagaagttgcttccaaaaagaaaacctgagcgcaaaccaagtgatgaagagtttgcatctcgtaagtccacagccgccttggaggaagatgcccagatactcaaggtgattgaggcatactgcacgtctgcaaagaccaggcaaaccctgaatagcagctccagaaaggaatctgctccacaggttctgttgccggaagaggaaaagataatagtcgaagagaccaagagcaacggtcagaccgtgatcgaggaaaaatcattggtggacacagtctatgccctgaaggacgaggttcaggagctgcgccaggataacaagaagatgaaaaaaagtcttgaggaggaacagcgcgcaagaaaggacctggagaaactcgtgaggaaagtgttaaagaacatgaatgatccggcttgggacgagaccaatctgtag

SEQ ID NO: 26171 - DNA, 2262 bp, synthetic construct
  misc_feature 1..2262: note = Description of Artificial Sequence: Synthetic coding sequence
  source 1..2262: mol_type = other DNA
atgaacagcgccgagcagaccgtgacctggctgatcaccctgggcgtcttggaaagccccaagaagactattagtgatccggaggggtttttgcaggcttccctaaaagatggagtcgttctctgccggctattggagcggctgttgccaggcacaatcgaaaaaactttcgatgcaaatgatctctatcagggccagaattttaacaaagtcctcagtagccttgtgacactgaacaaagttactgcagacatcggtttggggtcggactccgtgtgcgctcgcccttcaagccacagaattaaaagcttcgattcgctgggtagtcagagcttgcatactagaacatcaaaattgtttcaggggcagtacagaagccttgatatgacagacaatagcaataaccagctcgtcgtcagagcgaagtttaattttcagcagacgaatgaagacgagctgagctttagcaagggagatgttatccacgtgacccgcgtcgaggaaggcggctggtgggaagggactctcaacggcaggaccggatggttccctagcaactatgtcagagaggtgaaagcatcagagaaacccgtctcacctaaaagtggtaccctcaaatcccccccgaaagggttcgatactaccgctatcaataagtcttattataacgtggtccttcagaacattctggagacggagaatgagtattctaaggagttgcagacagtgttgtcaacctacctgaggccattgcagaccagtgaaaaactgtcttctgcaaacatatcgtatctgatgggaaacttggaagagatttgtagctttcagcaaatgctggttcagagtttggaggagtgcactaaacttccagaagcacagcaacgcgtgggaggatgttttctgaatctgatgccacagatgaagactctgtacctgacatactgtgcaaaccatccatcagcggttaatgtgctcaccgaacactctgaagagctgggagaattcatggagactaagggagcttcttcccccggaattttggtgctgactactggcctttctaaaccattcatgcgcttggataagtacccgacactgctgaaagaacttgaaaggcacatggaggactaccataccgatagacaggacatccagaaatcaatggctgcatttaagaacctttcagcccagtgtcaggaggtccggaaaagaaaggaactcgagctgcagatactgacagaagccattcgcaactgggaaggggacgacatcaaaaccttggggaacgtcacatacatgtctcaagtgctcatccagtgtgccggcagtgaggagaaaaatgagcgctatctgctgctgtttcctaatgtcctgctgatgctgtcagctagcccgaggatgagcggctttatataccagggaaagctgcccactacaggtatgacgataacaaagttagaagatagtgagaatcataggaacgcctttgaaatctctggtagcatgatcgaacgcattctagtatcatgcaataaccagcaggacctacaggagtgggtcgagcatctacagaaacagaccaaagtaacctctgtggggaatcccaccattaagccccattccgtgccttctcacacactgccaagtcacccagtgactccttcctctaaacatgccgacagcaagcccgcgcccctgacccccgcttatcatactcttcctcacccctcccaccacggaaccccccacacaacgattaactgggggcccctcgaaccacctaagacgcccaagccttggagtctctcatgcctgaggccagcgcccccactgcgaccaagtgctgcactgtgctataaggaggacctcagcaaaagccccaaaactatgaaaaagcttctgcccaaaagaaaacccgaacgaaaaccaagtgacgaagagttcgcgtcccgcaagagcaccgccgcactggaggaagatgcccagatcctgaaagtcatagaggcgtattgtacgtcggctaagacacggcaaacactgaacagcacttggcagggaaccgacctgatgcacaaccacgtcctggccgacgacgaccaacccagtttggactccctgggacgtcggtcttcattgagtcgcttggagccttccgatctgagtgaagattccgactatgactccatttggacggcccactcatacagaatggggtcaacatcaaggaagtcttgctgttcctacataagtcaccagaactag

SEQ ID NO: 26172 - DNA, 2412 bp, synthetic construct
  misc_feature 1..2412: note = Description of Artificial Sequence: Synthetic coding sequence
  source 1..2412: mol_type = other DNA
atgaacagcgccgagcagaccgtgacctggctgatcaccctgggcgtccttgagtctccaaaaaaaactatcagcgatccagaggggttccttcaggcgagtttaaaggatggcgtcgtactgtgtcgtctgctcgaacggctgctgccaggcaccatagagaaggtctatcctgagccccgcagtgaaagtgagtgtttaagcaacatcagggagttcctgaggggctgcggggcgtccctacgtctggaactcttatttccgccatcacagccaccacagcacctggtgacgaccatactgctcagtgctagtacttttgatgcaaacgacctttatcagggacagaacttcaataaagtgctgtccagccttgttacactcaataaagttactgccgacatcggcctcggcagtgatagcgtgtgtgctaggccaagtagccataggatcaaaagtttcgattcattggggtcccagtctctgcacactaggacctccaagctgttccaggggcaatatagatcacttgacatgaccgataactctaataatcagctggttgttagagctaaattcaatttccagcagacaaatgaagatgagctgagcttctctaaaggggacgttattcatgttactagggtggaggaagggggctggtgggagggtacccttaatggccgcactggctggtttccgtcaaattacgtcagagaggtaaaggcctccgagaagccagtgagtcccaaaagcgggactctaaagagtccccccaagggcttcgataccacggctatcaacaagtcctactacaacgtcgtacttcagaatatcctggagaccgagaatgaatatagcaaagagctgcagacagtcctgagcacctatctcaggcctctgcagacatcagaaaagttaagttccgccaatatctcctatctgatgggaaacctcgaagagatctgctccttccagcagatgctggtgcaatcactggaggagtgtacaaagctgccagaggcgcagcagagagtgggtgggtgcttcttgaacctcatgccgcagatgaagactctctatctaacctattgcgccaatcatccatccgctgtgaacgtgctgactgagcactctgaagagctgggcgagtttatggagacaaaaggggcttcctcaccaggcattctcgtgctgaccactgggctgagcaagccttttatgcgcctggataagtacccaacactgctgaaggaattggagcgccacatggaagactatcacactgacagacaggatatccagaagagcatggcggcattcaagaatttgagtgcccagtgccaggaggtccgaaagcgcaaagaattggaactccagatcctgacggaagcaatccgcaattgggaaggggacgacatcaagacactgggcaatgtgacgtatatgagtcaggtgcttatccagtgcgcgggatctgaagagaagaatgagagatatctccttctgtttcccaacgtcttattgatgctcagcgcatcaccgcgaatgtcaggcttcatttaccaagggaagcttcccaccactggaatgacgattaccaagcttgaagattctgagaaccatcgtaacgcctttgaaatttccggaagcatgattgagaggatcttagtctcatgcaataaccaacaggatctccaggaatgggtcgaacatttacagaaacagacgaaagtgacgagtgtgggcaaccccaccatcaaaccccactcagtgcctagccatacactgccaagccacccagtcactccatcatcgaagcacgctgactccaaacctgcacccttaactcctgcctaccacaccctgccacacccgtcgcatcatggaacacctcacacaacaatcaactggggcccgcttgaaccgcccaaaacccctaaaccatggtcactcagctgtttaagacctgcccctcccctccggcccagcgctgctttatgttataaggaggacctgtctaagagccctaaaaccatgaaaaagttgttgccaaagagaaagcccgaacggaaaccctccgacgaggaattcgcctcacgaaaaagtacagcagcgttggaagaggacgctcagattctcaaggtgattgaagcttattgcacgtccgcaaagaccagacaaacactaaacagtacatggcaggggaccgatcttatgcacaatcacgttcttgctgacgatgaccagccaagcctggattctctcggacgacgctcaagtttatcccggttggaaccaagtgatctgtccgaggattcagattatgacagcatatggaccgcacattcatacagaatgggctcaacatcacgaaagtcctgctgttcctacatttcacatcagaactag

SEQ ID NO: 26173 - DNA, 1941 bp, synthetic construct
  misc_feature 1..1941: note = Description of Artificial Sequence: Synthetic coding sequence
  source 1..1941: mol_type = other DNA
atgaccgacaacagcaacaaccagctggtggtgcgggccaagttcaattttcagcaaaccaacgaagatgaactgagtttctccaaaggtgacgtgattcacgtaacacgagtggaagagggcgggtggtgggaggggaccctgaatggcaggactggctggttcccctcgaactatgtgagggaagtcaaggcttcagagaagcccgtgagccctaaatcaggcaccttaaaaagcccgcccaagggctttgacaccaccgccattaacaaatcatattacaacgtcgtcctccagaacattctggagaccgaaaatgagtactcgaaagagttgcagaccgtgctgtctacatatctgagacctctgcagacgagtgagaaattatccagcgcaaatatcagctacctgatgggcaatttggaagaaatctgctcattccagcagatgctggttcagtctttggaggagtgcacaaagctccctgaagcacagcagcgcgtcggaggatgctttctgaatctgatgcctcaaatgaagactctctacctcacttactgcgcgaaccacccaagtgcagttaacgtgctgaccgagcattccgaggagctcggtgagttcatggagacaaaaggggcctcctccccaggaatccttgtgttaactacaggactgagtaaaccgttcatgcggctagacaagtatccaactctgctgaaggagctggaaagacacatggaggattatcatacagaccgacaggatattcagaagtcaatggctgcttttaaaaatctctccgctcagtgccaggaggtacggaagcgcaaagaactggagcttcaaatattaacagaagccatccgcaattgggaaggtgacgatattaagactctggggaacgtgacttacatgtcccaggtgttgatccaatgtgccggctctgaggagaaaaacgaacgatatttgctgctgttccctaatgtcctgttgatgttgagtgcctctccgcgtatgtccgggttcatctaccagggcaagttgccaacaacagggatgacgatcacaaagcttgaagacagcgagaaccacaggaacgcttttgaaatctccggatccatgatagagcggatactggtgagttgcaacaaccagcaagatctccaggagtgggtggaacatctgcagaaacagaccaaggtgacatctgtggggaatcccacaattaagccccattctgttccaagccatacactcccgagccaccccgtaacgcctagcagcaaacatgcagatagcaagcctgcacctctgactcccgcctaccacaccttgccccacccatctcatcacggcacaccacatacaacaataaattggggcccgctggaacctcccaaaacacccaagccttggagtctttcatgtcttaggcccgccccgcccctcagacccagtgccgccctgtgttataaggaggacctctctaagagccctaagaccatgaaaaagctgctgcctaaaaggaagccagaaaggaaaccctcagacgaggagttcgccagcaggaaaagtacagccgccctggaggaggacgcccagatcttgaaagtgattgaagcttactgtaccagtgctaagactaggcagactttgaactccagcagccggaaagaaagtgccccccaggtgctgcttcccgaggaggagaaaattattgtggaagaaacaaagagcaacggacagaccgttattgaggagaagtcactcgtcgatacagtttacgccctgaaggacgaggtccaggagcttcgacaggacaataagaaaatgaagaagtcactggaggaggaacagcgcgcgagaaaggacctggagaaacttgttcggaaggtgctaaagaatatgaatgatccagcttgggatgaaacaaatctgtag

SEQ ID NO: 26174 - DNA, 201 bp, synthetic construct
  misc_feature 1..201: note = Description of Artificial Sequence: Synthetic coding sequence
  source 1..201: mol_type = other DNA
atgaccgacaacagcaacaaccagctggtggtgcgggccaagttcaactttcagcagacaaatgaggacgagttaagtttttccaaaggtgacgttattcacgtaacccgggttgaggagggaggctggtgggaaggcacactgaatgggaggacaggatggtttcccagcaactatgtgcgtgaagtgaaagctagttag

SEQ ID NO: 26175 - DNA, 1344 bp, synthetic construct
  misc_feature 1..1344: note = Description of Artificial Sequence: Synthetic coding sequence
  source 1..1344: mol_type = other DNA
atgaccgacaacagcaacaaccagctggtggtgcgggccaagttcaattttcagcagaccaatgaggacgaactgtctttcagtaaaggtgatgttattcacgtgacgagggtcgaggagggaggctggtgggaagggacactgaatggacgcaccggttggtttccctctaattacgtaagggaagtcaaagcatccgagaaaccagtcagtcctaagagcggtacactgaaatcacctccaaaaggattcgataccaccgccattaataagtcttactataatgtcgtcctccagaatatcctggagacggagaatgagtattcaaaagaactccaaacagtgttgtcaacctaccttagacctctccagacctcagaaaagctgagctcagccaacattagctatctgatgggcaacctggaggagatctgcagcttccagcagatgctagtgcaaagcctggaggagtgtacaaaattgcccgaagctcagcaacgcgttggcggctgctttctaaatcttatgccccaaatgaaaaccttatatcttacgtactgcgccaatcacccctcagccgttaacgttctgaccgagcatagcgaggaattgggggagtttatggagactaagggcgcctctagtccaggaatcctggtgctaaccacaggtctgagtaagccctttatgcgcctggataagtatccgactttgctgaaagagctggagcggcacatggaggactaccacaccgacagacaggacatccagaagtcaatggccgcttttaaaaatttaagcgcccagtgtcaggaagtgaggaaacgcaaggagcttgagctgcagatcttgactgaggcaattcgtaactgggaaggcgatgatattaagaccttaggaaacgtcacttacatgagtcaagtccttatccagtgtgcaggaagcgaggaaaaaaatgagaggtacctgctgctgtttccgaacgtattgctaatgctgagtgcctcacctcgtatgtctggttttatttaccagggaaagctgcccacaactggaatgacaatcacgaagctggaggatagcgagaatcacagaaatgcctttgagatcagcgggtcaatgattgagcgtatcttagtgtcatgtaacaaccagcaggatctgcaagagtgggtggagcacctgcagaaacagaccaaagtgactagcgtggggaatccaacaatcaagcctcacagcgtcccttctcacacgcttcctagccaccctgtgacacccagctctaaacacgccgatagtaagcccgccccactgaccccggcttaccacactctccctcattag

SEQ ID NO: 26176 - DNA, 186 bp, synthetic construct
  misc_feature 1..186: note = Description of Artificial Sequence: Synthetic coding sequence
  source 1..186: mol_type = other DNA
atgaccgacaacagcaacaaccagctggtggtgcgggccaagttcaatttccagcagacgaatgaggacgagctgtcatttagtaaaggggatgtgattcacgtgacccgagttgaggaaggcggatggtgggagggtacattaaacggtaggaccgggtggtttcctagcaactacgttcggtag

SEQ ID NO: 26177 - DNA, 120 bp, synthetic construct
  misc_feature 1..120: note = Description of Artificial Sequence: Synthetic coding sequence
  source 1..120: mol_type = other DNA
atgaccgacaacagcaacaaccagctggtggtgcgggccaagttcaactttcagcagactaacgaggacgaattgtccttttctaaaggggacgtcatacatgtcacccgggtagaatag

SEQ ID NO: 26178 - DNA, 546 bp, synthetic construct
  misc_feature 1..546: note = Description of Artificial Sequence: Synthetic coding sequence
  source 1..546: mol_type = other DNA
atgtgcttcccccggagcagcgtgaccaccgacgaccaccagctggatggtataaaaagcactagggcaccagccccaggttgttgttgctgtccaagtgaaacactgagaagtggggaggtggcccggtcaagtgccgagagccggagactgctgtttaaaccagacgccaccgatgaaaatccagttcctcacgtgctctgtcagagtcccttttgcagcgagtgcccacatgggacacaggactatcacactgacagacaagatatccagaagtcaatggctgcctttaagaatctgtccgcccagtgccaggaggttcggaagagaaaagaactcgagctacagatcctgaccgaggcaatcagaaattgggaaggggacgatattaaaacacttggaaatgttacttatatgagccaggtcctcatacagtgtgcggggtcagaggagaagaacgagaggtatttgctgctgtttcctaacgtgctactcatgttgtcggcaagtccacgcatgtctggcttcatctatcagggcgcttag

SEQ ID NO: 26179 - DNA, 2070 bp, synthetic construct
  misc_feature 1..2070: note = Description of Artificial Sequence: Synthetic coding sequence
  source 1..2070: mol_type = other DNA
atcccccccagcaagcccctgcggggcagcagcctgtggggctgctggtcaaggcctaagactatctccgatcccgaaggatttttgcaggcttctttgaaggacggagttgtactgtgtcgcctgcttgagagattgctgcctggcacaatcgagaaagtctatccggaacctagatccgagagcgaatgtttgtcaaatattagagaatttcttagaggatgcggtgctagtctgcgcctagaaacattcgacgctaacgacttatatcagggccagaatttcaataaagtgttgtcgagtttggtgactctcaacaaggtcaccgcggatatcgggctgggaagtgactccgtatgcgcacggccctcgagccaccgaatcaaatctttcgactctctggggagccaaagcctgcatactaggacatcgaaattgttccagggacagtacaggtcattggacatgactgacaacagcaacaaccaactggtagttcgggcaaagtttaactttcagcagaccaatgaagacgaactttccttttctaagggtgatgttattcatgtaacaagggtggaggaaggaggctggtgggaaggcaccctaaatggtcgaacaggttggttcccctctaattacgtcagggaggtgaaggcatcggagaagccagtgagtcccaagtctggcacgctgaaatccccacctaaaggcttcgacacaaccgccatcaacaaatcttattataacgtcgttctgcaaaatattctagaaaccgagaacgagtactccaaggagcttcagaccgtgctgagcacctatcttcgtcctctgcagaccagcgaaaaactctcatccgcaaacatcagttacttaatgggtaacctggaagagatctgtagctttcagcaaatgctcgtgcagtcactggaggagtgtaccaaactacccgaggcccagcagcgggtaggcgggtgtttcctcaacctgatgccacaaatgaagacactctatctgacatactgtgcgaaccacccttctgccgtgaatgtactcacagagcatagtgaggagctgggcgaattcatggaaactaagggcgcaagttctcctggaatcctggtactaacaactggcttaagcaagccgtttatgcgtctcgacaagtacccaaccctgctcaaggagctggagaggcatatggaagattatcatacagatcgccaggatatacagaagtccatggcggccttcaaaaacctcagcgcgcagtgtcaagaggttcggaagcggaaagagttagagctgcagatccttactgaggctattcgaaactgggagggtgatgacataaaaaccctcggtaatgtaacttacatgtcccaggtcttgatccagtgcgctggctccgaggaaaagaacgaacgctatctgctgctctttcctaacgttctgctcatgttgtctgcgtcacccaggatgtccggtttcatttaccaagggaagttgcctaccaccggaatgacaattacgaaactcgaagattctgaaaatcatcgaaacgcctttgaaatctcaggatctatgatagagcgcatcctggtgagctgtaacaaccagcaggacctgcaggagtgggtggaacatctgcagaaacagaccaaagtgacatcagtgggcaaccctactatcaagccccattctgtaccttcacacaccctgccgtctcaccccgtaacaccctcttcaaaacacgccgactcaaaacccgccccgctgactcccgcctaccacacactcccccatccatctcaccacggaacaccccacacaactatcaattggggccctctagaaccccccaagacccccaaaccttggagtctgtcttgccttagaccggccccacccctgcggccatcggcggccctttgttataaagaggacttgagtaaatcaccaaaaaccatgaaaaagctgctgccaaagagaaagccggagcggaaacccatgagatcttctaggccaggcaaggcccagctgctttggaagaagatgttgaggttttag

SEQ ID NO: 26180 - DNA, 4065 bp, synthetic construct
  misc_feature 1..4065: note = Description of Artificial Sequence: Synthetic coding sequence
  source 1..4065: mol_type = other DNA
atgagcaccggcgacagcttcgagacccggttcgagaagatggacaacctgttacgagatccgaagagtgaggtcaactcagactgtttgttagatgggctagatgcgctggtgtacgatcttgactttcctgctctgaggaagaataagaatatagataacttcttgagtaggtataaggatactattaataagatccgggatctgagaatgaaagcagaggattacgaggtggtgaaggttatcgggcgcggcgcctttggggaagtgcagctggtcaggcacaagagtacgcggaaggtctacgctatgaagctcctcagtaagtttgagatgattaagcgtagtgactccgcctttttttgggaagaaagagacattatggcttttgctaactccccatgggtcgtgcagctattttatgccttccaggacgaccgctacctgtacatggtgatggaatatatgccaggcggagacctggttaacctaatgtctaactatgacgtgccagagaagtgggcaaggttttacacagctgaagtagtcttggcgttggacgctatacactccatgggcttcatccatagagacgttaagccagataatatgctgttggacaagtcaggtcatcttaagctagctgatttcgggacatgcatgaaaatgaataaggagggcatggtaaggtgcgatactgccgttggaacgccagactacatatctcccgaagtgctgaagtcccagggtggagatggatactacggccgagaatgtgattggtggtccgttggcgtttttctctatgagatgttggtgggagacacaccattctacgctgactctctggtgggtacatatagtaaaatcatgaaccataaaaacagcctgacctttccagacgacaacgacatttccaaggaggcgaagaacctgatctgtgcttttctcacagacagagaggtgagactcggtcgtaatggcgttgaggagattaagcgccacctttttttcaagaacgatcaatgggcctgggaaacgcttagggacaccgtggcccctgtggttcctgatttgagtagtgacattgatacctctaacttcgacgacctggaagaagacaagggggaggaagaaacgttccctattccgaaggccttcgttggaaaccagctgccatttgtgggcttcacatactactcaaatcgccggtacctgtcatctgcgaaccccaatgataaccgtacctcaagcaatgccgacaagtccctgcaggaaagcctacagaagactatctacaagctggaagaacagctccacaacgaaatgcaactgaaagatgaaatggagcagaagtgtcggaccagcaatatcaagctggacaagattatgaaggagctggacgaggaaggtaaccaacggcgaaatctcgagagcacagtgtcacaaattgaaaaagaaaaaatgctgctgcagcacagaattaacgagtatcagcgcaaagccgaacaggagaatgagaagcggaggaacgtggaaaacgaggtgtcaactctgaaggaccagctagaagatctgaaaaaagtgagccagaactctcaattagctaacgaaaagctaagtcagctgcagaagcagctggaggaagccaatgaccttctacgaactgagagcgatacagctgtgcgactgcggaagtcgcatactgaaatgtctaaatccatttctcagctagagtcactaaatcgtgagttgcaggagaggaaccggattttggaaaactctaagtcccagacggataaggactattaccaactccaggccattctcgaggcggagagacgcgataggggacatgatagcgagatgatcggagacttgcaggctcgcattaccagtctacaggaagaggtgaaacacctgaaacacaacctggaaaaggtcgaaggcgagcgcaaggaggcccaagacatgctgaaccattccgagaaagagaagaacaatctggagatcgacttgaattacaaactgaagagcctgcagcagcgactggaacaggaggtgaatgagcacaaggtgaccaaggcccgattaaccgacaagcaccagtctattgaagaagctaagtccgtcgccatgtgtgagatggagaagaaattaaaggaggagagagaggcaagggagaaggctgaaaacagggttgtgcaaattgagaagcaatgtagcatgctggatgtggaccttaaacaatcacagcagaaactcgaacacctgaccggaaataaagagcgtatggaggacgaagtgaaaaatttgacattacagctggaacaagagtctaacaagcgactcctacttcaaaacgaactgaagacacaggcctttgaggccgacaacctcaagggtctcgaaaagcaaatgaagcaggaaattaacacacttctagaagccaagcgcctgctggagttcgagctggctcagctcacaaagcagtaccggggaaacgaggggcagatgagagaattacaggatcagttagaggctgagcaatatttcagtaccttatataaaactcaagtgaaagagctaaaggaagagatcgaggaaaaaaatcgggagaatctcaaaaagattcaggagctgcagaatgagaaagaaactttagcaacccaattggacctggcggagactaaagccgagtctgaacagctggcacggggactgctagaggagcaatacttcgaactgacacaggaatctaagaaggccgcctctagaaatcgtcaagaaatcaccgataaagaccacacagtgtcaaggctggaagaagccaactccatgttaacaaaggacatcgagatactgcgccgagagaacgaagagctcacagaaaaaatgaaaaaggcagaagaggaatataagcttgagaaggaagaagaaatttccaatctcaaggcggccttcgagaaaaatattaacactgagagaaccctgaaaacccaagcagtgaacaaactggccgaaatcatgaacaggaaagatttcaagatcgaccggaagaaagctaacacacaggacctccgcaaaaaggagaaagagaatcgtaagctgcagcttgaactgaaccaggagcgcgaaaagttcaatcaaatggtcgtgaaacaccaaaaggaattgaatgacatgcaggctcagctagttgaggaatgtgcacacagaaatgagttgcaaatgcagttggcaagcaaggaatccgacatcgagcaacttcgtgccaaactgcttgacctatcagactccaccagtgtggccagcttcccatccgcagatgaaacagacggcaatcttcctgaatctcgcattgagggctggttgtccgtgcccaacagaggaaatatcaaacgctacggttggaaaaagcagtacgtagtggtcagcagcaagaaaatcctcttttacaatgatgaacaggataaggagcaatctaacccttctatggtcttagacatcgataagctgtttcacgtacggccagttacgcagggggatgtctaccgggccgaaacagaagagattccaaagatctttcagatcttatacgctaatgaaggggagtgccggaaggatgttgaaatggagcctgtccagcaggcggaaaagaccaactttcagaatcacaaagggcatgagtttatccctacactctaccacttccccgctaactgcgatgcatgtgcaaagcctctatggcatgttttcaaaccgccacctgccctggagtgtcgccgctgccacgttaagtgccaccgggaccacctggataagaaagaggatctgatttgcccttgtaaggtatcctacgatgtgacatctgctagagacatgctgctactggcgtgctctcaggatgagcagaagaagtgggtcacacatctggtaaaaaaaattccaaaaaaccccccctctggttttgtgcgagccagcccccggactctttccacccgctctaccgccaaccagtccttcaggaaagtcgttaaaaacacaagtggcaagacctcatag

SEQ ID NO: 26181 - DNA, 471 bp, synthetic construct
  misc_feature 1..471: note = Description of Artificial Sequence: Synthetic coding sequence
  source 1..471: mol_type = other DNA
atggcccccgcccgggccggcttctgccccctgctgctgctgctgcttctcggactgtgggtagctgaaatccctgtgagcgctaaacccaaagggatgacgtcaagccagtggttcaagatccagcacatgcaacctagtcctcaggcctgtaactcagcaatgaagaacattaataagcatacgaagcgatgcaaggatctgaacacatttcttcatgaacctttctcctcagtagctgccacttgccaaacccccaaaatcgcatgtaagaatggggataagaactgtcaccagtctcacggtgccgtctccctcaccatgtgcaagctcacctcaggcaagcaccccaactgtcgctataaggagaaacggcaaaataaatcttacgtggtagcttgcaaacctccacagaagaaggattcacagcaattccatctcgtgcccgtacacctggaccgtgtactgtag

SEQ ID NO: 26182 - DNA, 471 bp, synthetic construct
  misc_feature 1..471: note = Description of Artificial Sequence: Synthetic coding sequence
  source 1..471: mol_type = other DNA
atggcccccgcccgggccggcttctgccccctgctgctgctgctgctcctgggactatgggtggcagagatcccagtgtcagccaaacctaagggcatgacatcgtcccagtggttcaaaattcaacacatgcaaccctctccgcaggcatgtaacagcgctatgaaaaacatcaataaacacacaaagaggtgcaaggacctgaacacatttctgcacgagcccttttcctcagtggcggctacttgtcaaacccccaaaattgcgtgtaagaatggggacaaaaattgccatcagagtcacggggccgtctccctcacaatgtgtaaactcacgagcggaaaacaccctaactgcagatataaggagaaacgccagaacaaatcatatgttgtggcttgcaagcccccccagaagaaagattcccagcagtttcatctggtccctgtccacctggacagagttttgtag

SEQ ID NO: 26183 - DNA, 831 bp, synthetic construct
  misc_feature 1..831: note = Description of Artificial Sequence: Synthetic coding sequence
  source 1..831: mol_type = other DNA
atgctgcagcaggacagcaacgacgacaccgaggacgtgagcctgttcgacgccgaggaagagactactaaccggccccgcaaggccaaaattcgacaccctgtggcctcttttttccacctcttcttcagggtgtccgccataatcgtgtgtctgttgtgtgagcttctttcaagcagctttatcacatgcatggtaactatcattctgctgttatcttgcgacttctgggcagtaaaaaacgttaccggcagactgatggtaggtctcaggtggtggaatcacattgacgaggatgggaaatctcactgggtctttgagagccggaaggaaagcagtcaggaaaataagactgtctccgaagccgaaagcaggatattctggctcgggctcatcgcctgctctgtcctgtgggtgatctttgcgtttagcgctctattctcctttaccgtgaaatggctacgccgctcccggcacatcgcccaaacaggactgaaagtgctgggcagtcgtgatccaccggctagcgctttccaatctgcgggcattacaggcgtgtcacggtgcccgggacacccttctcggaagttccatcaagtggatattaattcctttactcggattacagacagagccctgtactggaagcccgcacctcggctgtcctcaccgccactgagggctgcccctggcaattgtcagcagatggcccctgccaggctgttcctttctttgaggctctgggcttggcgtggcggcggtgagtctcccaacagccgcgggacaggcgaaccaggacccaagttccacctggcttcaggcatgcactag

SEQ ID NO: 26184 - DNA, 1419 bp, synthetic construct
  misc_feature 1..1419: note = Description of Artificial Sequence: Synthetic coding sequence
  source 1..1419: mol_type = other DNA
atggaccacggcggcgtgggcccctacgagctgggcatggagcactgcgagaagtttgaaatcagcgagacgtcagtgaatagggggcccgagaaaatcagaccagagtgttttgaactcctacgggtcttaggtaaggggggttatggcaaagtcttccaggtgaggaaggtcacgggcgccaacactgggaaaatttttgcaatgaaggtactgaagaaagctatgatcgttagaaatgcaaaagatacggcgcacacgaaagcagaacgcaatatactggaggaggtcaaacatccctttattgtagaccttatttatgcttttcagactggtggtaagctgtacttaattcttgaatatctgtctggcggtgagctgttcatgcagttggagagggagggaatcttcatggaagacactgcatgcttttacttggcagaaattagcatggcactcggtcacctgcaccagaaaggcatcatatacagagacctaaaacctgaaaacataatgctgaaccaccagggtcatgtcaaattgaccgactttgggctatgtaaagaatcaattcatgacgggacagtgacccacaccttctgtggcacaattgagtacatggctccggagatcctcatgaggtcagggcacaatagggccgtggattggtggtctctgggagccctgatgtacgacatgcttactggagcaccaccatttaccggtgagaacaggaagaaaaccattgacaaaatattgaaatgcaaattgaacctccctccctacctgacccaagaggcaagggatctgctgaaaaagttgctcaagagaaacgccgccagtcggttaggggccgggcctggggacgccggtgaagttcaagcccatccgttttttagacatatcaattgggaggagctgcttgccagaaaggtggaacctccatttaaaccactgcttcaatctgaggaggacgtcagtcaatttgattcgaaatttactaggcaaactcctgtggattctcccgacgactctactcttagcgagtccgccaatcaggtgttcctcgggtttacctatgttgcccctagtgttttagagtccgttaaggagaaattcagttttgagcctaaaattaggagccccaggcggttcattggttcaccacgtacccctgtaagccccgtaaaattctcccctggcgatttctgggggcggggagcttcggcctctaccgcgaatccccagacgccggtggagtatcctatggagacgtccggtattgagcaaatggatgtaacgatgtccggtgaggctagcgcccctctgccaatccggcaacccaactccggtccctacaagaaacaggcgtttccgatgatctcgaaacgtccagagcacttgagaatgaatctctag

SEQ ID NO: 26185 - DNA, 1356 bp, synthetic construct
  misc_feature 1..1356: note = Description of Artificial Sequence: Synthetic coding sequence
  source 1..1356: mol_type = other DNA
atgcggcggcggcggcggcgggacggcttctaccccgcccccgactttagagaccgcgaagcagaggacatggctggggtcttcgacatcgatttagaccagccggaagatgccggcagcgaagatgagctggaagagggaggccaattgaatgaatcgatggaccatggaggcgtcggcccctatgaactcgggatggagcactgcgaaaagtttgaaatcagcgagacatcagtaaaccggggcccagagaagataaggcccgaatgcttcgagcttctacgggttctcggtaagggagggtacgggaaggtattccaggtgcgcaaggtaacaggagctaatacaggcaaaatattcgccatgaaagtgttgaaaaaggccatgatagtgaggaatgccaaggatactgctcacaccaaggctgagaggaacattctggaagaggtgaaacacccattcattgtcgacctcatctacgcgttccagaccggcggaaaactgtaccttatcctcgaatacctgtcagggggtgagctatttatgcagctagagagagaggggattttcatggaagacacagcatgcttttacctggccgagatcagtatggcactgggacacctacatcaaaagggtattatctaccgcgatttaaagcccgagaatatcatgttgaaccaccagggccacgtgaaattgactgacttcggactctgtaaggaatccatccacgacggcactgtcacacatactttctgcggaactattgagtacatggcccctgagattctaatgcgcagtggacacaaccgcgccgttgactggtggagtctgggagcactgatgtatgatatgcttactggcgcaccgcccttcaccggcgaaaatcgaaagaaaaccatcgacaaaattctgaaatgtaagctgaatcttccaccttatctgacgcaggaagcccgcgatttgttaaaaaaattactgaagagaaatgcagcctcaaggcttggtgccggaccgggtgacgccggtgaggtacaggctcaccctttttttcgccatatcaattgggaagagctgctggctagaaaggtggagcctccatttaaacctctgttacagtcagaagaggatgtaagccagttcgacagcaaattcacaaggcagacccctgtggattcccccgatgacagcaccctgtccgaatcagccaatcaggtgttcctcgggtttacctacgtggcccctagcgtgctggagtccgttaaagaaaagttcagttttgaacccaaaatcaggtccccaaggaggttcattggatcaccccgcacccccgtgagtacagccatgtgttag

SEQ ID NO: 26186 - DNA, 1509 bp, synthetic construct
  misc_feature 1..1509: note = Description of Artificial Sequence: Synthetic coding sequence
  source 1..1509: mol_type = other DNA
atgcggcggcggcggcggcgggacggcttctaccccgcccccgactttcgagacagagaggctgaggacatggccggggtgtttgacatagaccttgaccagcccgaggatgctggcagcgaggatgaacttgaggagggagggcaactgaatgaatctatggaccacggcggagtgggtccttatgaactgggcatggaacactgtgaaaaatttgaaatttctgagacttcggtgaacagagggcctgagaagatccggcccgagtgtttcgaattgctgagggtcctcggaaagggcgggtacggcaaggcaatgatcgttagaaacgccaaggataccgcccataccaaagcggaacggaatatccttgaggaggtcaagcacccatttattgtagacttgatctacgcctttcagactggaggaaagttatatctgatcctagaatacctgtcagggggagagctgttcatgcagctggagcgggagggaatttttatggaagatacagcatgcttttatctggctgagatctctatggcattagggcacttgcaccagaaaggaattatctacagagaccttaagccagagaacatcatgctcaatcatcagggacatgtaaagctgaccgatttcggtctgtgtaaagagtccattcacgatgggaccgttactcataccttctgcggaactatagagtatatggcacctgagatactgatgcgttcaggccacaaccgagccgtggactggtggagcctgggagcactgatgtacgacatgctgactggcgcgcccccttttaccggagagaatagaaaaaagacgatcgacaagattcttaagtgcaaactaaacctgccaccttatctgactcaggaggcgcgagacctgctgaaaaagctgttgaaacgaaacgctgcttcgaggctaggcgcaggtcccggagatgctggggaagtccaagctcacccgttcttcaggcacattaactgggaggaactgcttgcccgtaaggttgaaccacccttcaaaccactcctgcagtcagaggaggacgtgtcccagtttgacagcaagttcacacgccagacacccgtggattctcctgatgacagcacgctcagcgagtctgcaaatcaggtctttctcggcttcacatatgtcgcgccctcagtgctggagtctgtgaaggagaagttctcttttgaacccaagattcgatctcctagacggttcattggctctcctagaactcctgtgtctcccgttaagttttcccccggagacttctggggacgcggagccagcgcgagtactgctaacccccagacaccagtagaatatcccatggaaacctccggaatcgaacagatggacgtgactatgtccggtgaagcttccgcacccctgcctattagacaaccgaacagcggtccttacaaaaaacaggccttccctatgatatcaaaaaggccagagcacttacggatgaacctgtag

SEQ ID NO: 26187 - DNA, 1932 bp, synthetic construct
  misc_feature 1..1932: note = Description of Artificial Sequence: Synthetic coding sequence
  source 1..1932: mol_type = other DNA
atgaaggtgctgaagaaggccaccctgaaggtgcgggaccgggtgcggactaagatggagcgcgacattcttgccgacgtcaaccacccgttcgttgtgaaactgcattacgcttttcagacggagggcaaactttatctgattcttgattttcttcgtggtggcgatctcttcactagactgtccaaagaggtaatgtttacagaggaagatgtgaagttttatcttgctgagttggcactgggcctggatcacttacatagccttggtataatttaccgggaccttaaacctgagaatatcctgttagacgaagaaggccacatcaagttaacggattttgggttgtcaaaggaagctatcgatcacgaaaagaaagcctatagtttctgtgggacggtggagtacatggctccagaggtcgtgaaccgccagggacactcccactccgccgactggtggagttatggcgttcttatgtttgaaatgctcaccgggagcctgccatttcagggaaaagacagaaaagaaacaatgacactgattcttaaagccaaactggggatgccccagttcctgtcaactgaagctcagtccctgttgagagcattatttaagcggaatcccgccaaccgcctcggctcaggacccgatggagctgaagaaattaagagacacgttttttactccacaatcgattggaataaactatatcgtcgggagattaagcctccattcaaacccgcagtggcccaacctgatgacacattctattttgataccgaattcactagcagaacccctaaggattctcccggcatccccccttctgctggggcacaccagctcttccgaggctttagcttcgttgcgaccggccttatggaggacgacggcaagcctagggctccacaggctcctctgcacagtgttgtccagcagctgcacggtaaaaatctcgtattcagtgatggttacgtggtgaaagagaccatcggggtcgggagctactccgagtgcaagagatgtgtccataaggcgactaacatggaatatgctgtaaaggttatcgacaaaagcaaaagagatcctagcgaggagatcgagatactgctcaggtatggtcagcacccgaacatcatcaccctcaaagacgtgtatgatgacggtaagcatgtctatctggtcacagaattgatgagaggcggagaactgctcgataaaatcctgagacaaaagtttttctcagagcgtgaagcgtccttcgttctccacaccataggtaaaacagtggaatatctacactcccaaggcgtggtgcaccgcgatcttaaaccctcaaatattctgtatgtggatgagagcggaaaccccgagtgtctgagaatctgtgacttcggattcgccaagcaactgcgggccgaaaatggactgctgatgacgccatgttacactgctaattttgtggcacctgaagtgctgaagcgccaggggtatgacgaagggtgcgatatttggtccctgggaatcctgctgtacacgatgctggctggttacaccccgttcgccaatggaccatcagatacccccgaggagattttaacccgaattggatcaggcaaatttacccttagcggaggtaactggaatacggtctcagagaccgcaaaagacctcgtgagcaagatgttacatgttgacccccaccaaagactcactgctaagcaggtgcttcaacatccgtgggtgacacagaaagataagctgcctcaatcacaactgagtcaccaggacctccagctcgtaaagggagcgatggccgccacttactccgcactgaacagctctaaaccgacaccacaactgaaaccaattgaatcttcaatattggctcagcgccgggtccgcaagttgccttcaacaacgctgtag

SEQ ID NO: 26188 - DNA, 687 bp, synthetic construct
  misc_feature 1..687: note = Description of Artificial Sequence: Synthetic coding sequence
  source 1..687: mol_type = other DNA
atgccccagttcctgagcaccgaggcccagagcctgctgcgggccctcttcaaaagaaaccctgccaatcgtctgggcagtggaccagacggcgccgaagagattaagcggcacgtgttctattctaccattgattggaataaattgtaccggagggagatcaagccaccatttaagcctgctgtggcccagccagacgataccttctactttgatacagagttcaccagcaggactcccaaggattcccctggcatcccgccttctgccggtgcccaccagttatttaggggattctccttcgttgccacgggcctcatggaggacgacggaaagccgcgagcacctcaggctccactccacagtgtggtgcaggttatcgacaagtctaagagagacccttccgaggaaatcgagatccttctgcggtacggacagcaccccaacatcattacactgaaggatgtgtatgatgacggcaaacatgtgtacctggtaactgaattaatgagaggaggggagctcttggacaaaatcctacgccaaaagtttttctccgagcgggaagcttcattcgtcctccataccattggcaagactgtcgaatacctgcatagtcagggcgtggtccatcgagacctgaaacccagcaatattctctacgtcgatgaaagcgggaacccatag

SEQ ID NO: 26189 - DNA, 2208 bp, synthetic construct
  misc_feature 1..2208: note = Description of Artificial Sequence: Synthetic coding sequence
  source 1..2208: mol_type = other DNA
atgcccctggcccagctgaaggagccctggcccctgatggagctggtcccgctggatcctgaaaacggacagaccagcggcgaggaagcaggactgcagcccagcaaggatgaaggagtcctcaaggagatcagtattacacatcatgtgaaagccgggtccgaaaaggcagatccttctcacttcgaactgctgaaggttcttggccaagggtctttcggcaaggtgttcttggttcggaaggtgacaaggcccgattctggacacctatacgcaatgaaggtgctgaagaaggccaccctgaaggtccgtgatagagtgcgaacaaaaatggagagagatatattggctgacgtgaatcatccgtttgtggtcaagttgcactatgccttccagacggagggaaaactttatctgatattagattttctgagaggcggcgatctttttaccagactgtccaaggaagttatgtttacagaggaagacgtcaaattctacctcgccgagctcgctttggggctggaccacctccattctctgggtattatttatagggaccttaagccggaaaacattttattggacgaagaggggcatataaaactaactgattttggattaagtaaagaggccattgatcatgagaaaaaggcctactccttttgcggaacagttgagtatatggccccggaggtcgtgaatcggcagggacacagccattccgctgattggtggagctatggcgtgttaatgttcgagatgctcacagggtctctgccttttcagggcaaagaccgcaaggagaccatgacacttatcttaaaggcaaagctaggcatgccccaattcctttcaactgaggctcaaagtctgctgagggccctatttaagagaaacccagcaaataggctgggttcagggccagatggggccgaagagattaagcggcacgttttttactccaccattgattggaataagctctatcgtcgggagattaaaccgccttttaagccggcagttgcacagcccgatgacaccttttattttgacacagaatttacttccaggacaccaaaggatagccccggcattcctccttccgccggcgctcaccagctctttagagggttctcctttgtggccacagggctgatggaggatgatggcaagccgagagcccctcaggctccgctgcattctgtcgtgcaacagctgcacggcaaaaatctcgtcttttcagacggttacgttgtaaaggagacaataggcgtagggtcctactctgaatgcaagcggtgcgtccataaagcaactaacatggagtatgctgtcaaggtcatcgataagagcaagcgtgacccctccgaagagatagagattctcttaaggtatggccagcatcccaatatcatcactctgaaggatgtctatgacgacggcaagcatgtttatctcgtgaccgagctcatgaggggcggcgagctgcttgataagattttacgccagaagtttttttcagagagagaggcctcatttgttcttcacactatcgggaaaaccgttgaatacctccacagtcaaggtgtcgtgcacagggatctgaagccgtcgaatatcctgtacgtggacgaaagcgggaatcctgagtgcctgaggatctgtgacttcggcttcgcaaagcaacttcgcgccgagaacgggctgctgatgacaccttgctatacggccaatttcgtggctcccgaggttctcaagcgccagggatacgacgaggggtgcgacatctggtctcttggtattctcctgtatacaatgctggccggctacactccttttgctaatggcccttccgacacccccgaagaaatactgacaaggatcggttccggtaaatttactctcagtggcggtaattggaacacggtttccgaaacggcaaaggatctcgtgtctaaaatgctccacgttgatccccatcagcgcctcaccgcaaaacaggttctgcagcacccatgggtgacccagaaggacaagctccctcagtctcagctgtcccaccaggacctccaacttgtgaagggggcaatggcagcgacttattcagccctgaattctagcaagccgactcctcagctgaaaccaatagagagtagcatcctggcgcagcgacgcgtgcgaaagttaccaagtacgacactttag

SEQ ID NO: 26190 - DNA, 501 bp, synthetic construct
  misc_feature 1..501: note = Description of Artificial Sequence: Synthetic coding sequence
  source 1..501: mol_type = other DNA
gcccagcccgacgacaccttctacttcgacaccgagttcaccagccgaactcctaaggattccccaggcattcctccatctgcgggagcgcaccagctgtttagagggttttccttcgtggccaccggtctgatggaggatgatgggaaaccacgggctccacaggctccactgcattccgtagtgcaagtgattgacaaatctaaaagggacccgtccgaggagattgagatattgcttagatatggccagcaccctaacattatcacgctcaaggatgtgtacgacgacggaaagcacgtttatctcgtgactgaattgatgaggggaggtgaactgctggacaaaatcctgagacagaaattcttcagcgagcgggaggcctcatttgtcctgcacaccatcggcaaaacagtcgagtacttgcacagccagggcgttgtacatcgcgatttgaagcccagcaatatcttgtacgtggacgagtctggcaacccgtag

SEQ ID NO: 26191 - DNA, 2160 bp, synthetic construct
  misc_feature 1..2160: note = Description of Artificial Sequence: Synthetic coding sequence
  source 1..2160: mol_type = other DNA
atgcagacccccgccgacttcccccgggtggagcgggacctggtgccttgtcccagaaaagatgaaggagtgctaaaagagatcagcattacccaccatgttaaggccggatcggagaaggccgacccgtctcacttcgagttgctcaaggtgttgggtcagggtagctttgggaaggtgttcttggttcggaaggtgactcgccccgactccggacacctgtatgctatgaaagtcctgaagaaggccaccctgaaagtgagagacagagtcaggactaagatggagcgagatattctcgcggacgtaaatcacccttttgtggtgaaactccattacgctttccagaccgaggggaaattgtatttaatcctggacttcctgcgcggcggcgatttattcactcgactgtctaaggaggtgatgtttaccgaggaggatgtgaaattttacctggccgaactagctctgggcctggaccacttacactcactcggcattatttatagggacttgaagccagaaaacatactgctggacgaagagggacatatcaagttgaccgattttggcctcagtaaggaagccatcgaccacgagaagaaggcctacagtttctgcggaacagtggagtacatggcccctgaagtggtcaaccggcaggggcactctcactctgctgattggtggtcatatggggtcctcatgttcgagatgctgactggctctttgcctttccagggcaaagatcggaaagaaaccatgacactgatcctgaaagcaaagcttgggatgccccagttcctgtcgaccgaagcacagtctctgttgagggcactcttcaaaagaaaccccgcaaatcggctggggagcggacccgatggagccgaggagatcaagagacatgtgttctactccaccattgactggaacaaactatatcggagggagatcaagcctccctttaaacccgccgtcgcgcagcctgacgacacattctatttcgataccgaatttactagcaggacccctaaagacagtcctggcattccgccttccgcaggggctcaccagctgttccggggatttagcttcgtggcgaccggtctgatggaggacgacggcaaacccagagccccccaggcccctttgcattccgtggtgcagcagctccatgggaagaacctggtctttagtgacggttacgtggttaaggagaccattggcgtgggatcctattctgagtgtaaaaggtgtgtccacaaagcgacaaacatggagtatgctgtcaaggtcatcgacaagtctaagcgcgaccccagcgaggagattgagatccttcttcggtacggccaacaccctaatattataaccctgaaagacgtatacgatgacggaaaacacgtgtatctggtgaccgaattgatgagaggtggtgagctgctggataaaatactgagacagaaattcttttctgaaagagaggcctctttcgtgctccataccattggcaaaaccgttgagtatctccactcccagggggtagttcatcgcgacctcaaaccttcaaatattttgtacgtggacgagagcgggaacccagagtgtcttagaatttgcgactttggcttcgcgaagcagctgagagcagaaaatggactgctcatgacgccgtgctatacagcaaactttgtggcccctgaggtccttaagcgacagggatatgatgaaggctgcgatatttggagcctcgggatcctgctctacacaatgctggctggctacactccattcgccaatgggccatccgacaccccagaggagatcctgaccaggataggctccggcaaattcaccttgtctggcggtaattggaacactgtgagcgaaacagccaaagacctggtaagtaagatgctgcacgtggatccccaccagcgactgacagctaaacaggtgctccagcacccctgggtcacccagaaggacaagctgcctcagagccagctgtcccatcaagatcttcagttggtgaaaggggcgatggctgctacctattctgctctgaatagctcaaagccaaccccccaactcaagcccattgagagtagtatattagcgcagcggcgcgtccgtaagcttcctagcaccacgttgtag

SEQ ID NO: 26192 - DNA, 2202 bp, synthetic construct
  misc_feature 1..2202: note = Description of Artificial Sequence: Synthetic coding sequence
  source 1..2202: mol_type = other DNA
atggacctgagcatgaagaagttcgccgtgcggcggttcttcagcgtgtacctcagaagaaagagtcgtagcaaatcttcaagcctgagcaggttggaagaagagggcgtggtaaaggaaattgacatttcccatcacgtaaaggagggtttcgaaaaagccgatccatcccaattcgagctgctgaaggtgctgggccaaggctcatatgggaaggtgtttctagtgcggaaggtgaaagggtccgatgccggtcagctttacgccatgaaagtcttgaagaaggctacacttaaggtgagagatcgcgtccgctccaagatggagagagatatcctcgctgaagttaatcacccattcatagttaagctgcactatgcctttcaaacagagggtaagctatatttaatcctcgactttctacggggcggcgatctgtttacacgactgtccaaggaggtcatgtttactgaagaggacgtcaagttttacctagccgaactggctctagcactggatcacctccattctctcggaataatttacagagacctaaaacccgaaaacattcttttagacgaggagggacacatcaaaatcacggacttcgggctgtctaaggaggcaatcgaccatgataagcgggcctactccttctgcggcacaatcgagtatatggccccagaagtggtgaaccgcaggggacacactcagtcagctgactggtggtcgtttggagtcctgatgtttgaaatgctgacaggttctctaccctttcaggggaaagaccgtaaagaaaccatggctctgatccttaaagcaaagctcggtatgccccagtttctgagcggcgaagcacagagcctgctgcgcgccttgtttaaacgtaacccttgtaacagactgggtgccggtatagatggtgtggaagaaatcaaacgtcatccattttttgttacaatagactggaacaccctttatcgaaaggagattaaaccccctttcaaacccgccgttggtcgaccagaagacacatttcatttcgacccggaatttactgcacgaacacccactgacagtcctggcgtaccacctagcgccaatgctcaccatctttttagggggttttcatttgttgcaagtagcctcattcaggagccatcccagcaggacctccacaaggtccctgtacacccgatcgttcagcaactgcacgggaacaacatccattttacagacggctacgaaatcaaagaagatatcggggtgggcagctactccgtttgtaaaaggtgcgtgcacaaggccaccgatacagagtacgccgtgaaaatcatcgataaatctaagcgagatccctctgaggagattgagatcctactccgctacggtcaacaccctaacatcatcacactaaaggatgtgtacgacgatgggaagtttgtttatttagtcatggagcttatgagaggaggcgagctcctggatagaatactgcggcaaagatactttagtgagagggaagcatccgatgtcctctgcaccatcaccaagacgatggactacctccacagtcagggagtggtacacagggacttaaagcctagcaatattctttatcgtgacgaaagcggtagccccgagtcaatcagggtgtgcgattttggctttgccaaacaactgagggccggaaacgggttgcttatgactccatgttataccgctaactttgttgccccggaagtgctgaagcgacagggttatgacgctgcctgtgacatttggtccctaggtatcctcttatacactatgctggccggatttaccccctttgctaacggcccagatgatacgcccgaggagatcctggctagaatcggcagtggcaaatacgcattgagcggcggaaactgggattccattagcgatgccgcaaaggacgtagtgtcaaagatgctccatgttgatccacaccaaaggttgacggctatgcaggtgctgaagcatccttgggtagtaaatagagaatacctttctcccaatcagctttcgagacaggatgttcacctagtgaagggagcaatggctgccacgtacttcgcactcaatcgcacaccccaggctccgcgtctcgaaccggtcctttcgtcaaatctcgcccagaggcgcggcatgaagagactgacctccactcgtctgtag

SEQ ID NO: 26193 - DNA, 501 bp, synthetic construct
  misc_feature 1..501: note = Description of Artificial Sequence: Synthetic coding sequence
  source 1..501: mol_type = other DNA
atgttcaccgaggaggacgtgaagttctacctggccgagctggccttagcactggatcatctgcacagtctgggaattatatatagggatctgaagcctgagaacatcctgttggacgaggaaggtcatattaaaatcaccgacttcgggctctctaaggaagccatagatcatgacaagagggcctattccttttgtggcaccatcgaatatatggctcctgaagtggtgaatagacgcggtcatactcagtctgcagattggtggtctttcggcgttcttatgtttgaaatgctgactggatctcttcccttccaaggtaaggacaggaaagaaactatggctcttattcttaaggccaaactgggaatgcctcagttcctgtctggcgaggctcagagcttactcagggccctattcaagcggaacccttgcaatcgcctcggagaaaagaccgctttatgcccaagagtcagctgcagcaggctactcgggttctag

SEQ ID NO: 26194 - DNA, 1935 bp, synthetic construct
  misc_feature 1..1935: note = Description of Artificial Sequence: Synthetic coding sequence
  source 1..1935: mol_type = other DNA
atgaaggtgctgaagaaggccaccctgaaggtgcgggaccgggtgaggtctaaaatggaacgtgatatcctggccgaagtcaaccatccatttattgtgaaacttcactatgcgtttcagactgaaggaaaactgtatcttatcctcgattttttgaggggaggagacctgtttaccagactgtctaaggaagttatgtttaccgaggaggatgttaaattctacctcgccgagctcgccctcgcactcgaccacttacactctctgggcattatctatagggacctaaagcccgagaatatcctgctagatgaggaagggcacattaaaattaccgatttcggactgagtaaggaagccatagatcatgataaacgagcttactctttctgcgggaccatagagtacatggctcccgaggtcgttaaccgccgcggtcacacacagtctgctgattggtggtccttcggcgtcctcatgttcgagatgctgaccggaagcttacctttccagggtaaagacaggaaagaaactatggcattaatactgaaggcgaaattaggaatgcctcagtttctgagcggggaagcccagagcctcctcagagccttgtttaaacgcaacccctgtaatcgcctgggggccggaatcgatggggtggaagagattaaacgccatcccttctttgtgacaattgattggaacaccctttataggaaggagataaaaccccctttcaagccggctgtcgggcggccagaggacaccttccattttgatccagagttcactgctcgtacaccaacggattctcccggagtgccccctagtgccaacgctcaccacttatttcgcgggtttagcttcgttgcttcaagcctcatacaggaacccagccagcaggatctccacaaagtccccgtgcaccctatcgtgcaacaattgcatgggaacaatattcatttcacggacggctatgaaatcaaggaggatattggcgtaggatcttatagcgtgtgtaagaggtgcgtccataaagctacagataccgaatacgcggtgaagattattgataagtctaagcgcgacccatccgaggagatcgaaatactactccggtatggtcagcaccctaatatcatcacgctgaaggatgtgtatgacgacggcaaattcgtttatctcgtaatggagctgatgcgcggcggagaattgttggatagaatcttgcgacaacgctatttctccgagcgtgaggcatctgatgttctgtgcacaattacaaagacgatggattacctgcattcacaaggagtagtacatagagacctgaaaccaagcaacattctgtaccgtgatgaaagcgggagtcctgagagtatcagggtatgtgattttggcttcgctaagcagctacgagcaggaaacggcctgctcatgactccttgctacaccgcaaactttgttgcgcctgaggtactgaagagacaaggatacgatgcagcctgcgatatctggagtctagggatcctgctgtacaccatgctcgcaggcttcaccccgttcgcaaacggacctgacgacacccccgaagaaattctcgccaggatcgggtctgggaaatatgctctgtcaggcgggaactgggactccatatctgacgccgccaaggatgttgttagcaagatgttgcacgttgacccccaccaacggcttacagccatgcaggtccttaaacatccctgggtggtgaatcgcgagtatctatcaccaaaccaactgtcgcgccaagacgtgcacctagtcaagggagcaatggctgccacgtactttgccctgaaccggacgcctcaagccccccgtctcgagcccgttctctcttcaaatttggcccagaggcgtggtatgaaacgcttgacctctaccaggctgtag

SEQ ID NO: 26195 - DNA, 1935 bp, synthetic construct
  misc_feature 1..1935: note = Description of Artificial Sequence: Synthetic coding sequence
  source 1..1935: mol_type = other DNA
atgaaggtgctgaagaaggccaccctgaaggtgcgggaccgggtgagatcaaagatggagcgcgacattctcgccgaggtcaaccatccctttatcgtgaaattgcattacgctttccagaccgaaggtaagctttacttgatcctggacttcctgagggggggcgaccttttcactagactcagcaaggaagtgatgttcaccgaagaggatgttaaattctacctcgcagagctggccctcgccctggatcacttgcacagtttggggattatctatagagatctgaaacccgagaatattttgctagacgaggaaggccacatcaagatcacagatttcggactgtctaaagaagctattgaccatgacaagcgggcatacagtttctgcggcaccatcgaatacatggctccagaggtggtcaaccgccgcggccacacccagagtgctgattggtggagctttggtgttctcatgtttgagatgctgacaggctcgctgcccttccaggggaaggaccggaaagaaactatggctctcatactgaaagccaagcttggcatgccccaattcctaagtggcgaggctcagtccctcctgagggccctgttcaagaggaacccttgcaatcgtctgggcgccgggatagatggagttgaagagataaagcggcatcccttcttcgtgactattgactggaataccttatatcggaaggagattaagccgccgttcaagcctgctgtgggtcggcctgaggatacattccacttcgaccctgagtttactgcccggactcctacggactcccccggggttccccctagtgccaacgctcatcacctctttaggggattttccttcgtagcgtcctctctgattcaggagccaagccagcaggacctgcacaaggtgcccgtccaccccattgtccagcaactgcacgggaacaatatacacttcacagacggctacgaaatcaaggaggacatcggtgttggtagttactcagtgtgcaagaggtgtgtgcataaagctacagatacagagtacgccgtgaaaattatcgataaaagcaagagagatcccagcgaagaaatcgaaatactactgcgctacggccagcacccgaatatcattacactgaaagacgtatacgacgatggtaagttcgtctacctcgtcatggagttaatgcgggggggcgaactgctcgacagaattctgcggcaacgctacttctcagagcgcgaagccagcgatgtgctgtgtaccattacaaaaacaatggattacctgcattcccagggagtcgtccaccgcgacctcaagccaagtaacatcctttacagagatgagtcaggttcccctgaaagtatccgggtatgcgactttggtttcgccaagcagcttagagccggcaatggacttctcatgaccccttgctacactgctaactttgtggcccctgaagtgttgaaaagacaggggtatgacgctgcctgtgacatctggtcgctgggtattttgttatacactatgttagcaggctttactccgttcgccaacggccctgacgatacgcccgaagagatcctggcccggatcggctccgggaagtacgctctctccggcggaaactgggactcaattagcgatgccgcaaaagacgttgtctcaaagatgttgcacgtggacccccaccagagactgaccgcaatgcaagtactgaagcatccgtgggttgtcaacagagagtatttgtctccaaaccagctatcacggcaggacgtccatcttgtaaagggcgccatggctgctacttatttcgcgttaaacagaaccccccaggcgcccaggctggagcctgtgctgtcttcaaatctggcgcaacgaaggggtatgaagcgcctaacgagcactcgtctgtag

SEQ ID NO: 26196 - DNA, 2226 bp, synthetic construct
  misc_feature 1..2226: note = Description of Artificial Sequence: Synthetic coding sequence
  source 1..2226: mol_type = other DNA
atgcccatcgcccagctgctggagctgtggaagaagatcgaggtggagcccatggagatagagacaacagaggaggacctgaatttggatgtggagcccacgacagaagatactgccgaggaagaggagggagttgtgaaagaaatcgacatatcacatcacgtcaaggaaggtttcgagaaggctgaccctagccagttcgagctcctcaaggtccttgggcagggaagttacggaaaagtgttcctggtacgaaaggtgaaggggtcagatgctggccagctttatgccatgaaagtcctcaagaaggctaccctgaaagttagggatcgtgtcagatccaagatggagcgcgacattctggcagaggttaaccacccattcatcgtgaagctgcattatgccttccagacagaaggcaaactatacctcatccttgattttctgcgaggtggagatttatttacccgactgagcaaggaggtgatgttcacagaagaagacgtgaagttttaccttgctgaactggcactggcactcgatcaccttcatagtctggggattatataccgcgacctgaaaccagaaaacatactcctggacgaagagggccacataaaaattacagatttcggtctcagtaaagaggctatcgaccatgataagcgtgcctattctttctgtggaaccatcgagtacatggcccccgaggtggtgaaccgcagggggcatactcagagcgctgattggtggtccttcggtgtcctaatgtttgagatgctgacggggtcactgccattccaggggaaagataggaaggaaactatggctctgatcctcaaagctaagctgggaatgccccagttcctctcaggcgaagcacagtcgctgctgagagccctgttcaagagaaacccttgcaaccggctcggcgcaggcatcgatggcgttgaggagataaaacggcacccattcttcgttacaatagactggaataccctttatcgtaaagagattaagcccccatttaagccggctgtcggtagacctgaggatacttttcattttgaccccgaattcaccgctagaacccctaccgacagtcccggcgtcccgcccagcgccaatgctcatcacttgtttaggggatttagctttgttgcatcttcccttatacaggaaccttctcaacaagatcttcataaagttccagtacaccctatcgtccaacaactgcacggcaacaacatccattttactgacgggtacgaaattaaggaggacattggcgtgggatcatattccgtatgcaagcgatgtgtccacaaagcaacagacactgaatacgctgttaagatcatcgataaatccaagcgcgacccaagtgaggagattgaaatattgcttcggtatgggcaacacccaaatattattactctgaaagacgtctacgatgacggaaagttcgtgtacttagtgatggaactgatgcgaggtggagaactgctggaccggatactgagacagcgatacttttctgagcgggaagcctctgacgtgctgtgtaccattacaaagacgatggactacttgcactcacaaggggttgtgcacagggatttgaaacccagcaacatactctatcgagatgagtccgggtcacctgaatctattcgggtgtgcgattttgggttcgctaagcagctaagggccggaaatgggttactgatgactccttgttacaccgctaatttcgttgcccctgaagtgctgaagcgacaggggtacgacgcggcatgtgacatttggtctttggggattctgctatatactatgctggccggattcacccctttcgccaacggcccagacgataccccagaagagatcttggcacgcataggctccgggaagtacgcattaagcgggggaaactgggatagcatcagtgatgcagcaaaagacgttgtgtcaaaaatgctacacgtggacccccaccagaggctaaccgcaatgcaggttcttaagcacccgtgggttgtgaacagagagtatctatctccaaaccagttatcaagacaggatgtccatctggtcaagggagccatggccgcgacatatttcgcccttaatagaaccccgcaggcaccccgactggaaccagtactgagctctaacctggcccaacgccgaggtatgaagaggcttacaagcactcgcctgtag

SEQ ID NO: 26197 - DNA, 516 bp, synthetic construct
  misc_feature 1..516: note = Description of Artificial Sequence: Synthetic coding sequence
  source 1..516: mol_type = other DNA
atgcccatcgcccagctgctggagctgtggaagaagatcgaggtggagcccatggagattgaaaccacagaagaggacctgaaccttgatgtagaacccacaaccgaagacaccgcggaggaagggaaatccgattccgcggcctgcaagacaaaggtagccggctcggtggaagaggagggagtcgttaaggagatcgatataagccaccacgtgaaggaaggctttgagaaagctgatccttcgcaattcgagctcttaaaggttctggggcaagggtcatacggtaaagtattcctcgtgcgcaaggttaagggctctgatgccgggcaactgtacgcaatgaaagttctgaagaaggccaccctgaaagtccgagatcgcgttcgctccaaaatggagcgggatattctggcagaggtaaaccatcccttcatagtcaagctacattacgccttccaaaccgaaggaaaactataccttatcctggactttctccgtggcggtgacctttag

SEQ ID NO: 26198 - DNA, 2277 bp, synthetic construct
  misc_feature 1..2277: note = Description of Artificial Sequence: Synthetic coding sequence
  source 1..2277: mol_type = other DNA
atgcccatcgcccagctgctggagctgtggaagaagatcgaggtggagcccatggagattgaaactactgaggaggacctgaatctggatgtggagccaaccacggaggatacagctgaggagggcaaatcggactctgccgcctgtaagacaaaagtcgctggttcagtggaagaggagggcgtggtaaaggaaattgacatcagccatcatgtaaaggagggattcgagaaagccgacccctctcagttcgaactgcttaaagtgttgggtcagggttcctacggcaaggtgttcctcgtgcgcaaagtcaagggttctgacgcaggccagctttatgccatgaaagtgttaaagaaggctaccctgaaggtcagagatcgcgtccgctctaaaatggaaagggacatacttgcggaggtgaatcatcccttcatcgtgaaacttcactacgcctttcagaccgaaggcaagctctatctgatcctggatttcctccgaggcggggatttattcacacgactgagcaaagaggtgatgtttaccgaagaggacgtgaagttctacttggccgagctggctctcgcgttagatcacctccattctcttgggataatttatagggatctgaaaccagagaacatcctgctcgacgaagagggtcatatcaaaatcaccgacttcgggcttagcaaagaggctatcgatcatgataaacgggcctatagcttctgcggaactatcgaatacatggcccccgaagttgttaacagacgtggtcacacccagtctgccgactggtggagcttcggcgtattgatgttcgagatgctcactggctccttaccatttcaggggaaggatagaaaggaaactatggcactcatcttgaaggcgaagctcgggatgccacagtttcttagcggagaggcacaatctctgctgcgcgcattgtttaaacggaatccgtgtaacagactcggtgccggtattgatggagtagaggagatcaagaggcacccctttttcgtcaccattgactggaacactctgtatcgtaaggagatcaagccgccgtttaaaccggcggtgggaaggccagaggatacattccatttcgatccagagtttacagccaggacacccaccgatagtccgggggtgcccccctcagcaaacgcccatcatctatttcggggcttttcttttgtggctagttctcttattcaggaaccttctcaacaggatctgcacaaagtgcccgtgcaccccatagtgcagcagctacatggtaacaacatacatttcacagatgggtatgagatcaaggaggacatcggcgttggaagctacagcgtgtgcaagcgctgtgtgcacaaagccacggatactgagtacgccgtcaagataatcgataagagcaagagggacccctccgaggagatcgagatactgctacgatacggtcagcaccccaatatcattaccctgaaggatgtctacgatgacggaaagtttgtgtacctcgtcatggaattgatgcgcggtggtgagctgctcgaccggattttgagacagaggtacttcagcgaacgggaagcttccgacgtgctctgcaccatcactaagaccatggattacctccactcccaaggtgtggtacacagggacctgaaaccctcaaacatcctgtacagggacgagtccgggagccctgaatctatacgggtgtgtgattttggcttcgccaaacagctgagggcagggaatggcctcctgatgacgccctgctacaccgcaaactttgtggcccccgaggtgttaaagagacaggggtatgatgcagcatgtgacatatggtccctggggatactgctgtatacaatgctagccggtttcacaccatttgcgaatggacctgacgatactcccgaggaaatattggcgagaataggaagcggcaaatatgcactatcaggaggaaattgggattcaatcagcgatgctgccaaagacgtcgtctcaaagatgcttcacgtggacccacaccagcggctgaccgcaatgcaggtactgaaacatccctgggttgtgaatagagaatacctctcacctaatcagctctcaagacaagatgtccacttagtgaagggggcaatggctgcgacttacttcgctctgaaccggacgcctcaagctcctaggctagagccggtccttagcagcaatctggcacagagaaggggaatgaagcggcttaccagcacacgcctatag

SEQ ID NO: 26199 - DNA, 888 bp, synthetic construct
  misc_feature 1..888: note = Description of Artificial Sequence: Synthetic coding sequence
  source 1..888: mol_type = other DNA
atgagcggcgccctggacgtgctgcagatgaaggaggaggacgtgcttaagtttctcgctgccggcacacatctgggcggcaccaacttagattttcaaatggaacagtacatatataaacgcaaatccgacgggatttatatcatcaaccttaagcgaacttgggaaaagctactgttggccgctagagcaatcgttgctatcgagaacccggctgacgtgagcgtcatctcaagccgaaataccggacagcgggccgtgctgaagtttgccgctgctacgggcgcaacacctatagccggcagattcacaccagggactttcaccaaccagattcaggccgcatttcgggagccaagactcctcgtggtcactgacccccgcgccgatcatcagccattgactgaagcttcctacgttaaccttcccaccatcgctttatgcaatactgacagtcctctgaggtacgtggacattgcaattccttgcaataataagggcgctcatagcgtgggcctgatgtggtggatgctggcaagagaagtcctgagaatgaggggcactatctctcgcgagcacccatgggaggtgatgccagacctgtatttctatcgagatcctgaagagattgagaaggaagagcaagccgccgctgagaaagccgtgacaaaagaggaattccaaggggaatggacagcccccgcgccagagtttacagcgacccagcctgaagtggccgactggtcagagggggttcaggtgcccagcgttcccatccaacagtttcccaccgaagactggtccgcccaacctgctaccgaagactggagcgccgcgcctaccgcacaggccactgaatgggtcggcgctacaaccgattggagctag

SEQ ID NO: 26200 - DNA, 795 bp, synthetic construct
  misc_feature 1..795: note = Description of Artificial Sequence: Synthetic coding sequence
  source 1..795: mol_type = other DNA
atgagcggcgccctggacgtgctgcagatgaaggaggaggacgtgctcaaatttctggccgccggaacacatctgggtggtacaaacctggatttccagatggaacaatacatctataagagaaagagcgatgggatctatattatcaaccttaagaggacatgggaaaagctcctgctggctgcacgggccatagtggctatagagaatccggcagacgtaagcgtgatttcaagtagaaatacaggccagagagccgtgctgaagtttgccgcagcgaccggtgcgactcccattgccggccgattcacaccagggacattcacgaatcagattcaagctgcatttagggaaccacggctgctagttgtgactgatccgagggcagatcatcagcccctgacagaagcctcctatgtgaacctcccaacaatcgcgttgtgcaatactgacagccccttgaggtacgtggacattgctatcccatgcaacaacaagggagcgcacagtgtcggactcatgtggtggatgctcgcccgggaagtgttgaggatgcgcgggactatcagtagagagcatccgtgggaggttatgcccgatttgtacttttacagggaccccgaagagatcgagaaagaggagcaagccgcagcagagaaggcggtcacgaaagaggagtttcagggcgaatggaccgcccctgctcccgagttcactgccacgcagccagaggtcgccgactggagcgaaggggtccaggtcccaagcgttcccatccagcaatttccaacctag

SEQ ID NO: 26201 - DNA, 1458 bp, synthetic construct
  misc_feature 1..1458: note = Description of Artificial Sequence: Synthetic coding sequence
  source 1..1458: mol_type = other DNA
atgggcgagcccggcttcttcgtgaccggcgaccgggccggcggcagatcttggtgtttgaggagagtgggtatgagtgccggatggctgctgttagaagatggctgtgaagtgactgttgggaggggcttcggagtcacataccagttggtcagtaaaatttgtccactgatgatctcaagaaaccactgcgtgctgaaacagaatccagaaggccaatggaccatcatggacaataagtctcttaatggggtgtggcttaatcgtgcccgactggagccgctaagagtctacagcatacaccagggcgactatatccaactgggagtgcctctggagaataaggagaatgctgagtacgaatacgaggtgacggaggaggattgggagaccatttacccctgcctttccccaaaaaatgatcagatgatagagaagaacaaggagctccgcactaaacgaaagttcagtctcgacgagctcgccgggccaggggctgagggtccgtctaatctgaagagtaaaattaataaagtgtcctgtgagagcgggcagccagttaaatctcagggcaagggagaagtggccagcactccgagtgacaatctagatccaaaactcactgccctggagccctctaagacaaccggagcaccaatctacccaggcttccccaaagtaacagaagttcaccacgaacaaaaggcctcaaactcttcggcctctcagaggtctttacaaatgttcaaagtgaccatgagcagaattctgcggctgaagattcaaatgcaggagaagcatgaagctgttatgaacgtgaaaaaacaaacacagaaagggaacagtaagaaggtggtccaaatggagcaagagctgcaagacctgcagagtcaactatgcgcagagcaggcacagcaacaggcacgggtagagcagttggagaagacgttccaagaagaagagcagcacttacaggggctcgagatcgctcagggcgaaaaggaccttaagcaacaacttgcacaggcccttcaggaacactgggccctaatggaggagctgaatcgaagcaagaaggactttgaggctattatacaagctaagaacaaagaacttgagcagacaaaagaagagaaagaaaagatgcaagcccagaaggaggaggtgctgtctcacatgaacgacgttctagagaacgaattgcagtgtataatttgttctgaatacttcatcgaagccgttaccctgaactgtgcacattccttttgttcctactgcatcaatgagtggatgaagagaaagattgagtgtccaatttgccggaaagacataaagtccaagacttactcattagtcctggacaactgcatcaacaagatggttaacaacttgtcgagtgaagtcaaggagcgtcgcatcgtgctgattagggagaggaaagccaaaaggctattttag

SEQ ID NO: 26202 - DNA, 297 bp, synthetic construct
  misc_feature 1..297: note = Description of Artificial Sequence: Synthetic coding sequence
  source 1..297: mol_type = other DNA
atgggcgagcccggcttcttcgtgaccggcgaccgggccggcggccggtcttggtgcctgaggagggtgggcatgtccgccgggtggctactgcttgaagacggctgcgaggtgacagtgggaagagggttcggagtaacataccagttagtgagtaagatatgccccctaatgatctcccgcaatcactgtgtgctgaaacagaaccctgaaggacagtggaccatcatggacaacaaatctttcccctccgagaaagctgaggactttacagccgccggtgaaagatttttatag

SEQ ID NO: 26203 - DNA, 1347 bp, synthetic construct
  misc_feature 1..1347: note = Description of Artificial Sequence: Synthetic coding sequence
  source 1..1347: mol_type = other DNA
atgggcgagcccggcttcttcgtgaccggcgaccgggccggcggcagatcatggtgcctacgtagggtgggcatgtcagctggatggctgcttctggaagacggttgcgaagttacagtggggagaggctttggggtgacatatcaactggtgagcaaaatatgtccattgatgattagccgaaatcattgcgtgctgaaacagaaccctgagggccaatggactataatggataataaaagtctcaatggagtttggctgaaccgcgctcggttggagcccctgcgggtctacagcattcaccagggtgactatattcaattgggagtcccacttgagaacaaggagaacgccgagtatgagtacgaggtgactgaagaagactgggagaccatatacccatgcttgtcccccaagaacgaccagatgattgagaaaaataaagaactccgcacgaaaaggaaattttccttagacgaactggccggccctggggcagagggcccctccaatttgaaaagcaagatcaataaggtctcgtgcgaatcaggccagcctgttaaatcccaaggaaagggcgaagtagcctccactccttctgacaacctggaccctaaattgaccgcccttgaaccatccaaaactacaggggcaccaatctatcctggcttccccaaagtcactgaggtccaccacgagcagaaggctagcaactcctctgccagtcagcgaagcctccaaatgtttaaagtgactatgtccagaatcttgcgcctgaagatccaaatgcaggagaagcacgaagccgtcatgaatgtcaagaaacagacccagaaaggtaattcgaaaaaggtggtgcagatggaacaggagttacaggacctgcaatcacagctgtgcgcggaacaggcacaacaacaggctagggtggagcaattggaaaagaccttccaggaagaagaacaacacttgcaagggctcgaaatcgcccagggtgaaaaggacctcaaacaacagctggcacaagctctgcaggagcactgggcgctgatggaggagcttaacaggagcaaaaaggattttgaggcaatcatccaagcgaagaacaaagaattggagcagactaaagaggaaaaggaaaagatgcaggcccagaaagaagaggtactcagccatatgaatgatgttcttgaaaatgagctgcagtgcatcatctgcagcgaatacttcatcgagcagagggattgctctgaagatcgggcactgcgcgcattcgagagactccccgggtccgccagcctgcgctggtcaggggggttctccttggcagttactccactgctgtag

SEQ ID NO: 26204 - DNA, 1593 bp, synthetic construct
  misc_feature 1..1593: note = Description of Artificial Sequence: Synthetic coding sequence
  source 1..1593: mol_type = other DNA
atggccgacgacatcgacatcgaggccatgctggaggccccctacaaaaaagacgagaataagctgagttctgccaatggccatgaggaacggtctaaaaagaggaagaaaagtaaatctcgatcgcgttcccatgagagaaagcggtccaaaagcaaggagcgcaaaaggagcagagatcgggagagaaagaaatcaaagtccagggagagaaagcgctctaggtccaaggagcggaggcggtccaggtccaggtctagagaccggaggttccgcggacgatatagaagcccctattctggcccaaagttcaactcagccattcgtggcaagatcggattgccacactccataaagctgtcaaggcgcaggagcaggtctaaaagccctttcaggaaggacaaaagtcccgtgagagagccaattgataatctgaccccagaggaaagggacgctaggactgtgttctgtatgcaactggcggcacggattcgccctcgcgatctggaggagttcttttcaacagtcggtaaggttcgggacgtgcggatgatcagcgatcgaaatagtcgccgaagtaaaggaatcgcatatgttgaatttgtcgatgtgagctcggttcctttggccattggtctcaccgggcagcgggtgttaggcgtgccaatcatcgtccaggccagccaggccgagaagaatcgggcagcggctatggctaataacctgcagaagggatccgcagggcctatgagattgtatgtcggcagcttacacttcaacatcacagaggatatgctgaggggtatattcgagcccttcggtaggattgagtccattcaattgatgatggacagcgaaaccggacggagcaaaggctacggattcattaccttctccgactccgaatgcgcgaagaaagcactggagcagcttaacggattcgaacttgcaggtagacccatgaaggtgggacacgtgacggaaaggacagatgcctcttcagcctcctctttcctggactccgatgaacttgaacgaaccggtatcgacttgggcacgactggcagactgcagctcatggccaggttagcggaagggaccggccttcagatacccccggcagcccagcaggcccttcaaatgtctggcagcttggcctttggagcagttgctgagttcagtttcgttattgatcttcagacacgcctgtctcaacagacagaggcaagcgcactggccgcagccgcctcagtgcaacctctggccacccagtgctttcagcttagcaatatgttcaacccccagacagaagaggaagtgggttgggacactgaaatcaaagatgacgtgatcgaagaatgcaacaaacatggcggcgtcatccatatttatgtggacaaaaatagtgcgcagggaaatgtttacgtcaaatgcccatccatcgcagctgcgatagccgcagtgaacgcactgcacggccggtggttcgctggaaagatgatcacggccgcatacgtgcctttgcccacttaccacaacctatttccagatagcatgacggcaacacagctgctggtaccctcaaggcggtag

SEQ ID NO: 26205 - DNA, 1272 bp, synthetic construct
  misc_feature 1..1272: note = Description of Artificial Sequence: Synthetic coding sequence
  source 1..1272: mol_type = other DNA
atggccgacgacatcgacatcgaggccatgctggaggccccctacaaaaaggacgaaaacaagctgtcctcagctaacggacacgaagagcgctctaagaagcggaaaaagagtaaaagccgctcacggtcacatgaacgtaaacgcagcaagtccaaagaacggaaacgctccagagatcgcgagcgcaagaagtcaaaatctcgcgagcggaagcggagcagaagcaaggaaaggcggcgcagccgctctagatcgcgggatagaagatttagagggcgttacaggagtccatattctggaccaaaattcaatagcgccatccggggtaagattggccttccccacagcattaaactgagccgacgtcggtctaggagtaagagcccattcagaaaagataaatcacccgttcgggagccaattgataacctcacccccgaggaaagggacgcaaggaccgtgttctgtatgcagcttgctgcacgaattaggccaagggacctcgaagagttcttttccactgtcgggaaggtcagagatgtgcggatgattagtgatcgtaattctcgcagatccaaaggaattgcctatgtggagtttgtggacgtcagtagcgtacccctcgctatcggattgaccggacaaagagtcttaggcgtgcctatcatcgtgcaggccagccaggccgaaaagaatcgggcagcagcaatggctaataacctccagaaagggtccgcaggtccaatgagattatacgtaggctctctccactttaatattaccgaagatatgctgcgaggaatctttgagccatttggacgcatcgaatctattcagctgatgatggactccgagactgggagaagcaaaggctatggcttcatcacattttcagattccgagtgcgccaaaaaagccctagaacagctcaatggcttcgagctggcgggcagacccatgaaagtcggacatgtaaccgaacgcactgatgcatccagcgctagctctttcctggattccgatgagcttgagcggaccgggatcgatcttggcacgacgggcaggttgcaactgatggctcgcctggccgaagggacaggactccaaataccccccgcagctcagcaggcactacaaatgtccggctcacttgcctttggcgccgtcgcggatctccagactagattgtcccagcagactgaggcactgttcgtcattatgttttggaacgagatctggagcgataacatgattacgctccagctgtag

SEQ ID NO: 26206 - DNA, 1575 bp, synthetic construct
  misc_feature 1..1575: note = Description of Artificial Sequence: Synthetic coding sequence
  source 1..1575: mol_type = other DNA
atggccgacgacatcgacatcgaggccatgctggaggccccctacaagaaagatgaaaacaaactatcttctgccaacgggcacgaggagagaagcaagaagcgcaagaagagcaaatcacggagccgatcacatgagcgaaagcggagcaagtccaaagaaagaaagcgcagcagagatcgcgagagaaagaaaagtaagagtcgggagaggaaaaggtctcggagtaaagagcgacggcgatcacgctccagaagtagagatcggcgctttcgcggaaggtataggtctccatacagcggtccaaaattcaactcagctatacggggcaagatcggcttgcctcactcaatcaaactatcaagacgccgaagcaggtccaagagtccatttcgaaaagacaagtctcccgtgcgggaaccaatcgataacctgaccccagaggaaagggatgcccggacagttttctgcatgcagttggcagcaagaattcgccctcgcgatttggaagaattcttttccactgtgggaaaagtgcgggatgtccgcatgatctccgaccggaactcacgcaggtctaagggaatcgcatatgtggaattcgtcgacgtgagctctgtgccactcgccatcgggctaaccggccagcgcgtgctaggtgttccgatcatcgtgcaagcctctcaagctgagaaaaaccgcgctgccgcgatggctaacaaccttcagaagggtagcgccgggcctatgagactgtatgttggatcgctacattttaatatcacagaagatatgctgcggggtattttcgagccatttggcagaatcgagagcattcagctgatgatggactctgagacggggagatccaaaggctacgggtttattaccttcagcgactctgagtgcgcaaaaaaggcactggaacagttgaatggcttcgaattggccggcaggcctatgaaagttggtcacgtgaccgaacgcacagacgcgtctagcgctagcagctttttggattccgatgagttagagagaacaggtattgatttgggcacgaccgggcgactccaactgatggccagactggcggagggcactggcctgcaaattccccctgcggcacagcaggccctccagatgagtggttctttagcctttggcgccgtggcggaccttcagacacggcttagccagcagactgaggcctcggcgttagcagcagcagcatcagtccaacctctcgccacgcagtgttttcaactgtctaacatgtttaatcctcagacagaagaagaggtggggtgggacacagaaattaaggatgatgtgatagaggagtgcaataaacacgggggtgtgatacacatttatgtcgacaaaaattctgcccagggcaatgtgtatgtaaaatgtccttctattgccgctgctatcgctgctgttaatgctctgcacggacggtggtttgcaggaaagatgattaccgccgcttatgtccctctgccaacatatcacaatctcttcccagattctatgaccgccacacaacttctggtaccctcgcgccggtag

SEQ ID NO: 26207 - DNA, 696 bp, synthetic construct
  misc_feature 1..696: note = Description of Artificial Sequence: Synthetic coding sequence
  source 1..696: mol_type = other DNA
atggccgacgacatcgacatcgaggccatgctggaggccccctacaagaaggatgaaaacaagctgtcctcagccaacggacacgaagagagatctaaaaaacggaaaaagtctaaatcaagatctcgaagccacgagcgcaaaagatcaaagtccaaagagcgcaagagatccagggatagagaaagaaagaagtctaagtctagggaaagaaaacgatccaggtcaaaagaacggcggcgctcgcggtcccggtctagagacagacgctttcgaggacgatacaggtctccctactccggtccaaagtttaacagtgcaatccgaggcaaaattggactgccgcattccatcaagctgagacgacggtctcgttctaagtctcctttcaggaaggataaaagccccgtcagggaacctatcgataatctcacacccgaagagcgagatgctaggaccgtgttctgcatgcagttggctgcacgaattagaccgcgcgatcttgaagaattctttagtacagtgggtaaagtacgagacgtgagaatgatttccgatcgaaactcacgccgatccaaaggaatcgcatacgtcgagtttgtcgacgtgagcagcgtaccccttgccatcgggctgactggccagcgtgttctgggggtgcctataattgtccaagcatcccaagcggagaaatag

SEQ ID NO: 26208 - DNA, 1122 bp, synthetic construct
  misc_feature 1..1122: note = Description of Artificial Sequence: Synthetic coding sequence
  source 1..1122: mol_type = other DNA
atgcagctggccgcccggatccggccccgggacctggaggagttcttctcaactgtgggcaaggtccgagacgtgagaatgatctccgatcgaaattccaggcgttcgaagggcatagcgtatgtggagttcgtggatgtgagctccgtgcccctggcaatcggtttaacgggccaacgcgtcctgggtgtgcccattatagttcaggccagccaagctgaaaagaatagagctgccgccatggcgaacaatctgcagaagggtagtgccggtcctatgcgcttgtatgtggggagcctgcacttcaatatcactgaagacatgctcaggggaatttttgagccctttggccggatcgaatccatacaactgatgatggattcggagaccggccgttcgaagggatacggcttcattactttcagtgactcggaatgcgctaaaaaggcactggagcagttgaacggcttcgagctggcaggtaggcccatgaaagtgggccatgtgaccgagcggactgatgcttcctcagcctctagcttcctcgactctgatgagctggaacgtaccggaattgatctgggcacaacaggtcggctgcagctgatggcgcggcttgccgaaggtaccggcctgcaaatccctcccgcagctcagcaggctctgcagatgtctggaagcctcgcgttcggggcggtagctgagttttcctttgtgattgacctgcagacgaggctctcccagcagaccgaggcgtccgctttggctgctgccgcatccgtacagccactggccacacaatgttttcagttatccaatatgtttaatccccaaactgaagaggaggtcggctgggacaccgaaataaaagatgatgtcattgaagaatgcaacaagcacggaggggttatccatatctatgttgacaagaatagtgctcagggcaatgtgtacgtgaaatgcccctccatcgccgccgccatcgccgccgttaatgccttgcatgggcggtggtttgcggggaaaatgataaccgctgcttacgtgcccctccctacctaccacaatcttttcccagactctatgaccgccacccagctgctcgtccctagccgacgttag

SEQ ID NO: 26209 - DNA, 582 bp, synthetic construct
  misc_feature 1..582: note = Description of Artificial Sequence: Synthetic coding sequence
  source 1..582: mol_type = other DNA
atggccgacgacatcgacatcgaggccatgctggaggccccctacaagaaggacgaaaataagcttagttcagctaatggacacgaggagagatcaaaaaaaagaaaaaagagtaagagtcggagtcgatcccacgagaggaagcggtccaagtcaaaggaacgtaaacggagcagggacagagaaagaaagaaaagcaagtccagggaaaggaagaggtccaggtctaaggagagacgtaggtctcggtcaagatctcgcgaccgccgctttcggggacggtataggagtccgtattcaggcccaaagtttaactcagccattcgtggaaagataggacttcctcacagcatcaagctgtctaggcggagatcccggtccaaatcccctttccggaaggacaagtctcctgtgagggagcccatcgataacctgacacccgaagagcgagatgcccgtacagtgttttgcatgcagctggctgcacgcatccgcccccgcgacttggaagaattcttctccaccgttgggaaagtgcgcgatgtacggatgattagcgatcgaaatagccggaggtcatag

SEQ ID NO: 26210 - DNA, 1014 bp, synthetic construct
  misc_feature 1..1014: note = Description of Artificial Sequence: Synthetic coding sequence
  source 1..1014: mol_type = other DNA
tgaagccccttccggaaggacaagagccccgtgcgggagcccatcgacaacctgacaccggaggaacgggatgctcgtacggtattctgcatgcaactggccgctcgtataagaccgagggacctagaagagttcttctccaccgtgggcaaagtgcgcgacgtcaggatgatatctgaccggaatagccgtagatctaaggggattgcttacgtcgaatttgtggatgtgtcttctgttccactagctatcggattgacaggacagcgggtcctcggggtacctatcattgtacaagcttctcaggccgagaaaaaccgggccgcggcaatggcaaacaacttacaaaaaggtagtgccggacccatgagactgtatgtcggatcgctgcattttaatatcaccgaagacatgctcagagggatatttgaacctttcggtcgctttagcgatagcgagtgtgccaaaaaggccttggagcagctaaacggttttgagctggcgggccgcccgatgaaggttggccacgtgactgagagaactgatgccagtagtgcctcttcttttctggactcagatgagctggaaaggaccggcattgaccttggaaccacaggtcgtctgcaactcatggccaggttggctgaaggaacgggcctgcaaatccctcctgcagctcagcaggctctccagatgtctgggtccctcgccttcggggcagtcgccgagttcagttttgtgatcgacctgcagaccagactgagccagcagactgaggcctcagcccttgccgctgccgcctctgttcagcccttggccacccaatgttttcagttgagcaacatgttcaacccgcagactgaggaggaggtgggatgggataccgagattaaggacgacgtgatcgaagagtgtaataaacatggcggggtgatccacatatacgtcgacaagaacagcgcccagggaaatgtgtacgtgaagtgtcctagcattgcggcagctatcgcttag

SEQ ID NO: 26211 - DNA, 1527 bp, synthetic construct
  misc_feature 1..1527: note = Description of Artificial Sequence: Synthetic coding sequence
  source 1..1527: mol_type = other DNA
atggccgacgacatcgacatcgaggccatgctggaggccccctacaagaaagacgagaataaactcagcagtgccaacggtcacgaagaacggtcaaagaagcgcaaaaaatcaaagtcccgctctaggtcccatgagagaaagcggagcaagtccaaagaacggaagagaagcagagatagagaacgcaaaaagtccaaatcgcgggagcgtaagcggagtcgcagtaaggaacggaggcgctcacgaagtaggtcacgagataggagatttcgcggcagataccgcagcccttacaggcggagaagccgaagcaagtcccccttcagaaaagacaaaagccctgtaagagaacctatcgacaacctgactccagaagagcgagatgccagaaccgtcttctgcatgcaactcgctgcacgaattcgccctcgcgacctggaggaattcttttctaccgttggcaaagttcgtgatgtgaggatgatcagtgacagaaattcgcgtcgcagcaagggcatcgcatacgtggagttcgttgacgtgtcttctgtaccactggctattggactgaccgggcagcgagttcttggagtgcccatcattgttcaggcatcgcaggcagagaagaacagggcagcagccatggcgaataacctgcagaagggctcagccggaccgatgagactttatgtgggaagtttgcattttaacatcacagaggacatgctccgaggcattttcgaacccttcgggcgcatcgagagcattcagctaatgatggacagtgaaacaggacgtagtaaagggtacggatttatcaccttttccgacagcgagtgcgccaaaaaagcactagaacaactgaacgggtttgaactggccgggaggcctatgaaagtgggccacgttaccgaaagaacagacgcaagctccgcttcctctttcctggactctgatgaactggagagaacaggtattgatctgggaaccacagggcgactccagctgatggccagactggccgaaggcacgggacttcaaatcccccccgcagctcagcaggcccttcagatgagcggcagtcttgcatttggggccgtagccgagttctccttcgtgatcgatctgcaaactaggctgtcacagcagaccgaagcctccgcattggcagctgctgcgagcgtccagcccttggcaacacagtgtttccaactgtccaatatgttcaatcctcagacagaggaggaggttggctgggacacagaaatcaaagatgatgtgatcgaagagtgtaataagcatgggggtgtgatccatatttacgtggacaaaaactcagcacaaggcaacgtgtatgtgaagtgccccagcattgccgcagccatcgccgctgtcaacgcgctccatggccgctggtttgctggaaaaatgatcactgccgcatatgtcccactgccgacgtatcataaccttttccccgatagcatgacagcaactcaactgctcgtaccttcccggaggtag

SEQ ID NO: 26212 - DNA, 1176 bp, synthetic construct
  misc_feature 1..1176: note = Description of Artificial Sequence: Synthetic coding sequence
  source 1..1176: mol_type = other DNA
atggtggaggccgaccggcccggcaagctgttcatcggcggcctgaatactgaaaccaacgaaaaagccttggaagcggtctttggcaagtacggacgcattgtggaggtgctgcttatgaaagacagggaaactaataaatctagggggtttgcttttgtgacctttgagtcccccgccgacgctaaagacgctgcccgcgatatgaatggcaagagtcttgatggtaaggccatcaaagtggagcaggctactaaaccttcttttgagtcgggacggagagggcccccccctccccctaggagcaggggtccccctagaggtctgcgaggcggacgaggcggctccggtggtactcgcgggccgccaagcaggggcggtcacatggacgatggtggatactcaatgaacttcaacatgtctagctccagaggtcccctaccagtcaagcgaggacccccgccacgatcaggggggccaccacccaagcggagcgccccctccggaccggttcgcagctcgtccggaatgggcgggcgggctcccgtttcgaggggtagagatagttatggcggtcctcccagaagagaaccactcccctccagacgcgacgtgtatctctccccaagggatgacgggtactctacaaaagatagctactcttcgcgggattacccgagctcaagggacacgcgggactatgcccctccaccgagggattatacataccgcgactatggccatagcagttccagagacgattacccttctcgggggtactctgatcgtgacggctacggacgcgatagggactacagcgatcacccttcgggtggtagttatcgcgacagttacgagagttatggcaactctagatctgcacctcctaccagaggaccccccccttcctacggcggttccagcagatacgacgattattcaagctcacgcgatggttacggaggtagcagagactcttatagctcctcgagatcggatctgtacagctctggacgagatagagtcggtaggcaagaacgcggtctgccaccgagcatggaaagagggtacccaccccccagggactcatattccagcagcagccggggggctccgcggggcggaggacggggagggtcccggagcgacaggggaggcggcagaagccgctactag

SEQ ID NO: 26213 - DNA, 309 bp, synthetic construct
  misc_feature 1..309: note = Description of Artificial Sequence: Synthetic coding sequence
  source 1..309: mol_type = other DNA
tgaatgttcatctgcccccaggagatgatgggcatcctgctgaagacggctattcaggctgaaatcactcaggtccttgtaatactagagatcatgcatcaccatcacgaaatcattctgacagtgattatggtgattcctgtacacgtgatgaccattcaccaggaggatattgcaatcgagatggatatggtggttatcgtcactatccagattatccaggtggaagtacccaccgagattcacatgcgcgttatggtgggagactttgctcattacggcaggggtgtgctgatcgactcccaatag

SEQ ID NO: 26214 - DNA, 591 bp, synthetic construct
  misc_feature 1..591: note = Description of Artificial Sequence: Synthetic coding sequence
  source 1..591: mol_type = other DNA
atggtggaggccgaccggcccggcaagctgttcatcggcggcctgaataccgagacaaacgaaaaagcattagaagccgttttcggtaagtacggaaggattgtggaggtactgttgatgaaagacagagaaacaaataagtcccgggggttcgcctttgtcacgtttgagtctcccgcggatgccaaggatgccgccagggatatgaatggcaaactcctctatcacgttgaggagatcgtgatggaggttcacctggaggggaaccgctgccccctagtggaaatgtttatctgtccacaggagatgatgggaatactcctcaagaccgccatccaggccgaaattacccaggttctggtgatcctggaaatcatgcaccaccatcacgaaattatcctgacagtgataatggtgatcccagtgcacgtgatgaccattcatcaggaagacatcgctattgaaatggacatggttgtgattgttacaatccagataattcaggtggaggtacccactgaaatccacatgagagtgatggtcggagacttcgctcattacggaaggggtgtactgattgacagccagtag

SEQ ID NO: 26215 - DNA, 1137 bp, synthetic construct
  misc_feature 1..1137: note = Description of Artificial Sequence: Synthetic coding sequence
  source 1..1137: mol_type = other DNA
atggtggaggccgaccggcccggcaagctgttcatcggcggcctgaatactgagacgaacgaaaaggctttggaagccgtatttggcaagtacgggaggattgtcgaggtactcctaatgaaggacagagagagtccggctgacgccaaagatgcagcccgagacatgaatggcaaaagcctcgatggcaaagcaataaaagttgaacaggcgactaaaccaagtttcgagtcaggccgtaggggtccacctccccctccgcggtcaaggggtcctcctcgcggactcaggggcgggcgcggggggagcggaggcacgcgcggcccacccagcagaggcgggcatatggacgacggcggttacagcatgaacttcaatatgagctcatccagaggcccactgccagtgaagcggggacccccccctcgctcaggcggtcctcctcccaaacgaagtgcgccctccggtcccgttcggtcttcttctggcatgggcggcagagcgccggtcagccgggggagggactcttatgggggtccccccagacgggagccgttgcctagccgaagagacgtctatctgtcaccgcgggatgacggctactccacaaaagattcctatagttcccgggactacccctcatcccgagatacacgggattacgccccccctccccgcgattatacctaccgggactacggccactcatcatcacgtgacgactaccccagccgcggctatagtgatagagacggatacgggcgagatcgcgactactccgaccacccctctggcggttcataccgggattcctacgagagctacggtaattccaggtctgcacctcctactaggggcccccctccatcttacggcggaagctccaggtacgacgattatagctcctcccgagatgggtacggcggatcaagagactcttactctagcagccggtcagatctgtattctagcggccgagatagggtgggaaggcaagaaagaggcctgcctccttctatggagagaggttatcccccaccacgtgatagttattcatccagttctcggggcgcacccagagggggcggcagaggcggttcgaggtcagacaggggcggcggccgcagccggtactag

SEQ ID NO: 26216 - DNA, 1443 bp, synthetic construct
  misc_feature 1..1443: note = Description of Artificial Sequence: Synthetic coding sequence
  source 1..1443: mol_type = other DNA
atggccagcgacagcatcttcgagagcttccccagctacccccagtgctttatgcgcgagtgcatcctggggatgaacccatcgcgtgatgtgcacgacgccagcacctctagacggttcaccccaccttctactgcattgagcccaggtaaaatgtcagaggctttgccgttaggcgcccctgacgcaggcgctgccttggcggggaagttgcggagtggcgaccggtccatggttgaggtgctcgcagatcatcccggagaactggtgagaacagacagccccaatttcctgtgctccgttctgcctacacattggcgttgtaacaagacccttcctattgcctttaaggtagtggccctcggagacgtgccagatggcactttggtaacagtgatggcagggaatgatgagaactattccgccgagctgcgtaatgccacggccgcgatgaaaaaccaggttgcaagattcaacgacctccgcttcgtgggccgttccgggcgggggaagtcgttcaccctgacaatcacagtcttcactaaccccccccaggtggcaacttatcaccgcgcaataaagatcacagtggatggacccagggaacccagacggcaccgtcaaaaactcgatgaccagacgaagcccggcagcctgtcatttagcgaaagattgagcgagttggagcagcttcgccgcactgctatgcgcgtgtccccacatcaccccgcccctactccaaaccctcgagcctcactcaatcattccaccgcgtttaatccacagccccagagtcagatgcaggatacacgacagattcagccttcacctccctggagctatgaccagtcttatcagtatctcggtagtattgcatctccatcagtgcatccagcaacaccaatcagtcccgggagggcatcaggcatgacgacgctgtcagcggaacttagttcccggctgagcacagcccccgatctgacagctttctcagatccccgccaattccccgccctgccaagcatttcagacccgagaatgcattatcccggagccttcacatactccccaaccccagtaacatcaggaatcggaattggcatgtccgcaatgggtagtgctacccggtatcacacttaccttccgcctccttacccaggcagcagtcaggcccaaggggggccatttcaggcaagcagcccatcttaccatctgtactacggggcgagtgcgggcagctatcagttctccatggtagggggtgaacgcagccctccgcgaatcctgcctccatgcaccaacgctagcaccgggagcgccctgctaaacccgtcattaccaaaccagtccgacgtcgtcgaagccgagggctcccacagtaactcccctactaatatggcaccctctgctcgtttagaggaggctgtctggaggccatattag

SEQ ID NO: 26217 - DNA, 1407 bp, synthetic construct
  misc_feature 1..1407: note = Description of Artificial Sequence: Synthetic coding sequence
  source 1..1407: mol_type = other DNA
atgcccgccgccccccggggccccgcccagggcgaggccgccgcccggacgcgcagcagagacgcctcaacttccagacgcttcactccaccttctaccgctctgagcccgggcaagatgagtgaggctctgcctctgggcgcacccgacgccggggcagccttggccggaaagctccgttccggagacagatctatggtggaagttctggccgatcaccccggagagctggtgcggaccgattcccccaactttttatgtagcgtgctccctacccattggaggtgcaacaagactttgcccattgcctttaaagtggttgccctgggggatgtgcctgacgggacactggtaaccgtgatggccggcaatgacgagaattatagtgcggaactgagaaacgcgaccgccgctatgaaaaatcaggttgctcgctttaacgacctgcgattcgtgggcaggagcggcagagggaaatcctttactcttactattacggtcttcacaaaccccccccaggtagcaacctaccacagggcaatcaagataactgtggatgggcctcgagagccaaggcggcataggcaaaaactggacgatcagactaagcccgggtccctgtcattctcagaaagactaagcgaactcgaacagctccggaggacagctatgagggtgtccccccaccaccccgcccccacgccgaacccaagagccagcctgaaccactccactgcctttaaccctcagccacagtcccagatgcaggataccagacagatccagccttcaccaccctggtcttatgaccagagttaccagtacctcgggtccatcgcaagcccatcagtgcatcctgcgacacctatttcccccgggcgcgcctccggtatgacgaccttgtccgccgagctgagttcgcggctgtcaacagcgcctgacctgacggcattcagcgatcctaggcagttcccagctctccccagcatctcagacccgcgaatgcattatccaggggcatttacctattcacctacaccagtgacttcaggcattggcataggcatgtctgcaatggggtccgctaccaggtaccacacttacctgcccccgccttatccgggcagttcccaggcacagggagggccattccaggccagcagtccgtcttaccatttgtactacggcgcctctgcagggtcttaccaattcagcatggtgggtggcgaacgctcacccccaaggatattacccccttgcactaacgcatctactggtagtgccctgctgaacccttctctgcctaatcagtccgatgtagtggaagcggaggggtcacactccaactcacctaccaacatggccccctcagcgaggctagaggaggccgtctggagaccatattag

SEQ ID NO: 26218 - DNA, 1362 bp, synthetic construct
  misc_feature 1..1362: note = Description of Artificial Sequence: Synthetic coding sequence
  source 1..1362: mol_type = other DNA
atgcggatccccgtggacgccagcaccagccggcggttcacccccccctctacagcactgtctccgggcaagatgtctgaggcacttcccctgggcgctcccgatgctggtgcagcgctcgcgggcaagctgagaagcggcgatagatctatggttgaggtgttggcggatcacccaggcgagcttgtgcgaactgacagcccaaatttcctgtgctcagtactgcccacacactggcgctgcaacaaaacacttcccatcgcctttaaagtcgttgctctcggcgatgtgccagatggcactctggtcacagttatggctggaaatgatgaaaactacagtgctgaacttaggaatgccactgctgcgatgaagaaccaagtggctaggtttaatgaccttaggttcgtggggcggagcggccgcggaaagtcgttcacactgactataacggtgttcacaaaccccccccaagtggcaacatatcacagggccataaagataaccgtggacgggcctcgagaacccaggcggcatcgccaaaaactagacgatcagacaaagcccggcagtctttcatttagcgaacgcttatcagagctcgaacagctgcgtagaaccgctatgagggttagtccgcatcacccagccccaacgcctaaccctagagcatcactaaaccactcaaccgccttcaatccacagccccagtcccagatgcaggatacacggcaaatccagccatccccaccttggtcttacgaccaatcttatcaatatctaggaagcattgcatcccctagcgttcaccctgctaccccaatcagccctggccgagcttccggaatgacaactctctcagcagagctgtcgtctcgattaagcactgcccctgatcttactgccttcagtgatcctcgacagttcccagcgttgccttccattagtgatccacgaatgcattacccaggcgcgttcacctattccccgacccctgttacaagtggaatcggcattgggatgagcgcaatggggtctgcaacccgctaccacacatacctgccgcccccgtatccagggagttcacaggcccaggggggacccttccaagcatcctctccatcgtatcacctttactacggggcgtcagccggtagctaccaattttccatggtcggaggggagcgctcaccaccgcggatcttgcccccttgtaccaacgcatccaccggctcggctcttctgaatcctagcctgccaaatcagagcgacgtagtagaagctgaggggtcccactccaattctcccaccaacatggcaccatcagcacggcttgaagaggccgtatggcgaccatactag

SEQ ID NO: 26219 - DNA, 1428 bp, synthetic construct
  misc_feature 1..1428: note = Description of Artificial Sequence: Synthetic coding sequence
  source 1..1428: mol_type = other DNA
atgaaccccagccgggacgtgcacgacgccagcaccagccggcggttcacaccacctagcacagcattgagcccaggcaagatgtctgaggctcttcccttaggggctccagacgccggagcagccctggctggaaaactcaggtctggcgatcgttctatggtggaggtcctcgctgatcatccaggagaactcgtccgaacagactctcccaattttctatgttcggtgctccctacccactggagatgcaacaagaccctgccaatcgcctttaaggtcgtagcactaggtgacgtccctgacggtacgctggtgactgttatggccggcaacgatgaaaattatagcgcagagctacgcaacgccacagccgctatgaagaatcaggttgcaaggtttaatgacctccgcttcgtgggccgctcgggtagaggaaagagttttactcttaccatcactgtttttaccaaccccccacaggtcgctacgtaccaccgcgctataaaaatcacagtcgatggaccacgggaacctcggagacatcggcagaaattagatgaccagacaaagcctggaagcctatctttcagcgagaggttgtccgagttggagcagctgcggcgaacagctatgagagttagcccacatcatcctgcccccacaccgaaccccagagccagcttaaatcattctacagcctttaatccgcagcctcaatcccagatgcaagatacccggcaaatacagcctagccccccttggtcctatgatcagtcttaccagtatttgggctctatcgcttctcccagcgttcaccccgctacacctatctcacctgggcgagcgagtggtatgaccaccctgtcagccgaactctcttcaagactgtctacagctcccgacttgactgcgttcagcgatccccgccaatttcccgccctcccgtcaatctcagatccaagaatgcattatccgggtgctttcacctactcccctacccccgtcacgagcggaattggaattggtatgtccgccatgggcagcgccacaaggtaccacacttatttaccccctccgtatcctggctccagccaggcacagggtgggcccttccaagcctccagtccatcgtaccacttgtactatggggcttcggctggaagctaccagttcagtatggtagggggagagagatcccccccgcggattttaccaccttgcacaaatgcctcaaccggctcagcattactaaatccaagccttcccaatcagtccgatgtggtggaagctgagggcagccactccaacagccccacgaatatggcacgcgcctcatgctcaaggcaggctaggcgtgatcccggaccttgggctaggccaccttcatggggccggggaagaccaacagctcggatatccctttag

SEQ ID NO: 26220 - DNA, 99 bp, synthetic construct
  misc_feature 1..99: note = Description of Artificial Sequence: Synthetic coding sequence
  source 1..99: mol_type = other DNA
atggccagcgacagcatcttcgagagcttccccagctacccccagtgctttatgagggagtgcatccttggcatgaaccccagccgggatgtgcactag

SEQ ID NO: 26221 - DNA, 414 bp, synthetic construct
  misc_feature 1..414: note = Description of Artificial Sequence: Synthetic coding sequence
  source 1..414: mol_type = other DNA
atgcaggacacccggcagatccagcccagccccccctggagctacgaccagtcttaccagtatctggggagtattgcctcgccatcggtgcatcccgcaaccccaatctctcctggaagggcctctggcatgactactctctcggctgaactgagcagccggttgtcaactgcccccgatttaacagccttcagtgacccccgccagttcccggctctccctagcattagcgaccctcgtatgcattatcctggagctttcacttactcacctacgcctgtcacttccggtataggaattggaatgtccgccatgggttctgcgacgcggtaccatacatatctgccaccaccgtacccggggtctagccaggcccagggcggccctttccaggccagcagcccatcttactag

SEQ ID NO: 26222 - DNA, 1443 bp, synthetic construct
  misc_feature 1..1443: note = Description of Artificial Sequence: Synthetic coding sequence
  source 1..1443: mol_type = other DNA
atggccagcgacagcatcttcgagagcttccccagctacccccagtgcttcatgagggagtgcatcctgggaatgaaccccagtcgggacgttcatgacgctagcacctccaggagatttaccccccctagtaccgcactatctcctggaaaaatgagcgaggcacttcctcttggtgcacctgatgccggtgccgcattggctggcaagctacggtcaggcgatcgatcaatggtagaggtgctagcagaccaccctggggagctcgtccggaccgacagccccaattttctttgttctgtgctgcctacacattggcggtgtaataagactctgccgattgcctttaaggttgtggccctgggggatgtgccggacggcacactcgttactgtcatggctgggaacgatgagaattattcagccgagctgcgcaatgccaccgccgccatgaaaaaccaagtagcacgattcaatgacctgcgcttcgtcggaaggtccggccggggcaaaagttttacactgacaattactgtgtttaccaatccaccccaggtggcgacgtaccatcgcgccatcaaaattaccgtcgatggaccccgagagccccggaggcataggcaaaagctggatgatcagaccaaaccagggtccctttccttcagcgaaagacttagtgagctggaacagcttcgccggactgctatgagggtgtctccacatcatccagcacctacacccaatcccagagccagcttgaaccactccacagcttttaacccccagccccagagtcaaatgcaagacacccgacagattcagccgagtccaccttggtcctacgatcaatcctatcagtacttgggttcaatcgcctcaccatccgtgcaccccgccaccccaatatccccaggccgggccagcggaatgactacactgagcgccgagctttcgtctcgtctgagcactgctccggatctaaccgcgttcagcgaccctcggcagtttcctgctctaccaagcatttcggacccaaggatgcactacccaggtgcattcacatactctccaactccggtgacctcgggtattggcattggcatgtccgcgatgggatcggccacacggtaccatacctatctccccccaccatatcctgggagtagtcaggcccagggcggccccttccaggcctcgtcacccagttatcacctttactacggcgcctcagccggctcttatcagttcagcatggtagggggcgaacggtcgccacctcgtatcctgcccccctgtaccaatgctagcaccggtagcgctctgttgaatccttctctgcctaaccagtcggacgttgtggaggcggagggctcacatagtaatagtcccaccaacatggcgcccagcgccaggctggaagaagcagtgtggagaccttactag

SEQ ID NO: 26223 - DNA, 576 bp, synthetic construct
  misc_feature 1..576: note = Description of Artificial Sequence: Synthetic coding sequence
  source 1..576: mol_type = other DNA
atgaaccccagccgggacgtgcacgacgccagcaccagccggcggtttaccccacctagtacagccctctcacccggaaaaatgagtgaggcattgcccctgggggcaccagatgctggggcagcactggccggaaagctccgatcaggcgaccgatctatggtagaagtgctagctgatcatcctggcgagctagtgcgaactgactcacctaatttcctctgctctgtcctgccaactcactggagatgtaacaagacgctgcccattgcgttcaaagtggtggcactcggggatgtcccggatggcaccctcgtgacagtcatggcgggaaatgacgagaactattcagctgagctgcgcaacgcaactgctgcaatgaaaaatcaggtggcgcgcttcaacgacctgagattcgtgggccgctcaggacgtgggaagtcttttactctgacaataaccgtgttcaccaaccctccccaggtggccacctatcaccgcgccatcaaaatcactgtcgatggaccccgcgaacctcgcaattctttgacttggcccaggtacccccacatttag

SEQ ID NO: 26224 - DNA, 753 bp, synthetic construct
  misc_feature 1..753: note = Description of Artificial Sequence: Synthetic coding sequence
  source 1..753: mol_type = other DNA
atgcggatccccgtggacgccagcaccagccggcggttcacccccccgtccacggcgctatcaccagggaaaatgagcgaggccttgccgctgggagcccctgatgctggtgcggccctggccggaaaacttagatctggggatcgctcgatggtggaagtgttggcagaccaccccggcgagctcgtgcggactgactcgcccaatttcttgtgctccgtgctgcctacccactggagatgcaataagaccctccctattgcatttaaggtggtagcgctgggggacgtgcccgatggcacactagtcacagttatggctggcaacgatgaaaattacagtgctgaactcaggaacgccacagccgcaatgaagaatcaggtggcccgcttcaacgacttgcgctttgttgggagatccggaagaggaaaatctttcaccctgaccatcaccgtgtttactaaccctccacaagtggccacttatcaccgggcaattaagataacagtggacggccccagggagccacgaaggcacaggcagaagctggacgaccagactaagcccggcagcctcagtttttctgaacggttgtctgaactcgaacagctgcgccgtacggctatgagagtctcacctcatcacccagcgcctacacccaaccctcgcgcatccttgaatcacagcaccgcttttaacccacagccccagtcccaaatgcaagaagaggatacagcaccttggcgctgctag

SEQ ID NO: 26225 - DNA, 1770 bp, synthetic construct
  misc_feature 1..1770: note = Description of Artificial Sequence: Synthetic coding sequence
  source 1..1770: mol_type = other DNA
atgctgcacagcccccacaagcagccccagaaccacaagtgcggcgccaactttctacaggaagatagtaagaagagtctcgtgtttaagtggctgatctcagctggccattaccagcctccccggcccacagaatcgttcaaggccgcaagtagtatctataacagaggctataaattctacctgaaaaagaagggagggacgatggcaagtaactctctgttctccaccgtcactccctgccagcagaatttcttctgggacccaagtacatccaggcggttcagcccaccctcaagtagtctgcagcccggtaagatgagtgacgtgtcccccgtggttgctgcgcagcagcagcagcagcagcagcagcagcagcaacagcagcaacagcagcagcagcagcagcagcagcaggaagctgccgccgcggccgcagctgccgcagctgccgccgccgcagctgctgcagtacccagactcaggccgccgcatgacaatcggactatggtcgagatcattgctgatcacccagctgagttggtccggactgacagtcccaacttcctgtgctccgtgctgccttctcattggcgctgtaacaaaacccttcctgtggcatttaaagttgtagccctgggcgaagtgcctgatgggacggtggtaactgtgatggccggcaacgatgaaaattactctgcagagttgcgaaacgccagcgcagtgatgaaaaatcaggtagccaggttcaacgacctaagattcgtgggccgaagcggccgcggtaaaagctttactctgactattaccgtgttcaccaaccctcctcaggtcgccacataccatcgggcgatcaaggtcactgtagatggccctcgagagccaaggaggcatcgacagaagctggatgattctaaaccttccttgttcagcgaccgactaagcgatcttggcagaatcccacatccctccatgcgagtgggtgtccccccacagaatccacggccaagcctgaactctgcaccgtcccctttcaacccccagggccagtctcagataacagatccacgacaagcccagagctcccctccgtggtcctacgaccagtcttacccctcctatctgtctcagatgacttcaccatctatacactcaactactccactatcaagcacgcgtgggacaggtctacccgccatcaccgacgtgcctcgccgaattagcgacgatgatacagcaactagcgacttttgtctgtggccttccacgttgtccaaaaaatctcaggcaggcgctagcgagctgggaccattcagtgatccaaggcagttccccagcatcagcagcctcactgaatcaagattttctaacccacgaatgcactatccagcgacgtttacctatacaccaccggtgacttccgggatgagtttaggcatgtctgcgaccacacactaccatacttacttacccccaccttacccagggagctctcagtcccagtccggcccttttcaaacatctagtaccccctatctatattatggcacaagtagcggttcctaccagttcccgatggtgccaggtggcgaccggtcccccagccgaatgttacctccctgcacgaccacgagtaacggttctaccctgctcaacccaaatctgcccaatcagaacgacggagtggacgcagatggttctcatagctctagccctacggtattaaactcatcgggaaggatggatgaatcagtttggcggccgtactag

SEQ ID NO: 26226 - DNA, 1524 bp, synthetic construct
  misc_feature 1..1524: note = Description of Artificial Sequence: Synthetic coding sequence
  source 1..1524: mol_type = other DNA
atgcggatccccgtggaccccagcaccagccggcggttcagccccccttcgtcttcattgcaacctggcaagatgtccgacgtcagccctgtggtcgctgctcagcagcagcaacaacaacagcagcagcagcaacaacagcagcaacagcagcaacagcagcagcagcaggaggctgcggcagcagcggctgccgcagctgcggccgcagccgccgccgcagccgtgcccaggctcagacctccacacgataacaggacaatggttgaaatcatagccgatcaccctgcagagttggttagaactgatagccccaacttcctctgctccgtgctcccttctcactggaggtgtaacaaaacgctgcccgtcgcgtttaaggtggtagccctgggcgaggtgcctgatggcacagtcgtgacggtgatggcaggaaacgatgagaactatagcgccgagctgaggaatgcatctgctgtcatgaaaaatcaagtggcgcgatttaacgacctgagattcgtcggtaggtctggcagaggtaaaagcttcactctgactattacggtcttcacaaaccctccccaagtcgctacataccacagagcgattaaggtaactgtggacggcccacgtgagccacgtcgacatcgccagaagctggatgacagcaagccttccctgttctcggacagattatctgacctcggcagaattccccacccatctatgagggtgggcgtcccaccacagaaccccaggcctagcctaaacagcgcgccttccccatttaatccacaaggacagtcccaaatcaccgatcccaggcaggcgcagtcttccccaccctggagttatgaccagagttacccctcctatttgtctcagatgactagcccttccattcactccaccaccccgttatccagcacccgagggaccgggctacctgctatcacagatgtaccacggaggatttctgacgacgacaccgcaaccagcgatttttgcctgtggccgtccaccctgagcaaaaagtctcaggctggcgcctcagagttggggcccttttctgatcccagacagtttcctagcatttcttcattgacggagagccgcttcagcaaccctagaatgcactatcccgcgacttttacttacacaccgccggtgactagcggcatgagcctgggcatgtcagcaactacgcactatcacacctacctgccacccccatacccggggagttcacagtctcagagcggccccttccaaacttcatctactccttatctttactatggcacttccagcgggtcgtaccaattccccatggtccccgggggggaccggagccccagtagaatgcttcctccatgcacaactacgtccaatggttccactcttttaaacccaaacctccccaatcagaatgatggggttgacgcagatggttctcactctagctcccctactgtgctcaatagcagtggacggatggacgaatccgtgtggcgcccatactag

SEQ ID NO: 26227 - DNA, 1458 bp, synthetic construct
  misc_feature 1..1458: note = Description of Artificial Sequence: Synthetic coding sequence
  source 1..1458: mol_type = other DNA
atgcggatccccgtggaccccagcaccagccggcggttcagccccccatccagctccctccagcccggtaagatgtcggatgtgtccccagtcgttgcagcccagcagcaacagcaacagcagcaacagcagcagcagcaacaacagcagcagcagcaacagcagcagcaggaggccgcggcagcagctgctgctgccgctgccgctgccgcagctgccgccgcagttccacgccttcggccccctcatgataatagaactatggtggagataatcgcagaccaccccgccgagctggtgagaactgatagtcctaactttctctgttcagtgctcccttcgcactggcggtgtaataagactctgcccgttgcattcaaagtggtagccctgggagaggtcccagatggcaccgtggtgacagtcatggctggcaacgatgagaattattctgccgagctgagaaatgcctccgcagttatgaaaaatcaggtcgcccgattcaatgatctgcggttcgtgggcaggtcaggtaggggaaaatcctttacactgactatcacagtgttcacaaacccaccccaggttgcaacataccatagggctattaaggtgacggtggacgggccccgggagccacgcagacaccgccagaaactagatgacagtaaacccagtctgttctcagatagattatccgatcttggacgaattccccacccttccatgcgagtaggggtcccaccccagaaccccaggcctagcctgaactctgcaccatcgcctttcaacccccagggtcagagccagattaccgaccctcggcaggcccagagctcacctccctggagctacgaccagtcatacccttcttatctgtctcagatgacgtctcccagcatacactcaaccactcccctctcttcgacacgaggcaccggcctcccagccattaccgatgtgcccaggcgcatctctggggcttctgagttgggtccattcagtgatccccgacagttccctagcatttcttccttgactgagagccggttctccaatccgaggatgcactaccccgctaccttcacctacactccacccgtgacaagcggaatgtcgctcggaatgagtgccaccacgcactatcacacttatttgcctccgccttaccccggcagttctcaatcccagagcggaccattccaaactagtagtacaccatacctgtactatgggactagctccgggagttaccagttccctatggtcccaggcggcgaccgctccccaagtcggatgttacccccctgtacaactacctcaaacggttctacattactgaatccgaacctgcccaaccagaacgatggtgtggacgccgacggcagccattcttcctctcccacagtgctgaactcttctgggcggatggatgagagcgtgtggaggccctactag

SEQ ID NO: 26228 - DNA, 1500 bp, synthetic construct
  misc_feature 1..1500: note = Description of Artificial Sequence: Synthetic coding sequence
  source 1..1500: mol_type = other DNA
atggccagcaacagcctgttcagcaccgtgaccccctgccagcagaacttcttctgggatcctagtacatctaggagattcagcccaccaagttcctcgctgcagccaggtaaaatgtcagacgtttcccctgtcgtggctgcccaacagcaacagcagcagcagcaacagcaacaacagcagcagcagcaacagcaacagcagcagcagcaggaggctgcggccgctgcagctgctgccgccgcggcggctgcggccgccgctgctgttcccaggctgcgtccccctcacgataacaggacaatggtggagatcatcgccgaccaccctgcggaattggtccggacagactctcccaactttttatgcagtgtgctccctagccactggcgatgtaataagaccttgccggtcgctttcaaggtcgtagccctgggcgaagtcccagacggcaccgtggtgaccgtgatggcaggcaacgatgaaaattacagcgccgagctccggaatgcctcggcagtgatgaaaaatcaggtggctagatttaacgacctccggttcgtcggtcggtccggcaggggaaaatcctttacgctgacaatcactgtgtttaccaacccgccccaggtggccacgtaccaccgcgccatcaaggtaaccgtcgacgggccaagggagccacgccgccaccggcagaagcttgacgattcaaagccatccctgttcagcgacagactaagtgacctcggaagaattcctcacccatccatgcgggtcggcgtgcctccccagaacccccgcccgtcccttaactcggccccaagtccgttcaatccacagggccaaagccaaatcactgatcctcgccaggctcaatcctctccaccatggtcttacgaccagtcttatccctcctacttatctcaaatgacaagcccatcgatccactctactacccccctaagcagcaccagaggtactggactgcccgctatcaccgatgtacctaggcgaataagtggcgcctcagaactgggccccttctccgatccaaggcagttccccagcataagttccttgacggagtcccggttctccaatccaaggatgcactatccagcaacattcacctatacaccccccgtgactagtggaatgagcttgggcatgagtgcgaccacacattatcacacctacttgccgccaccatatcccgggtccagtcaaagccagtccggtccattccagacctccagcactccatacctgtattatggcacatcatccggatcatatcaattccccatggtccccggcggcgacaggtcacctagtagaatgttgcctccttgcacaacaactagtaacgggtccactcttctaaaccctaatctccccaaccaaaacgatggcgtggatgccgacggctcccattcctcgagcccaacggtgctgaactcaagcggcagaatggacgagtccgtctggaggccgtactag

SEQ ID NO: 26229 - DNA, 1566 bp, synthetic construct
  misc_feature 1..1566: note = Description of Artificial Sequence: Synthetic coding sequence
  source 1..1566: mol_type = other DNA
atggccagcaacagcctgttcagcaccgtgaccccctgccagcagaatttcttctgggatcccagcacttccagacgattctcccctccctcatcgtcacttcagcctggtaagatgtccgacgtctcaccagtggtcgctgcacagcaacaacagcagcagcagcaacaacagcaacagcagcagcagcaacagcagcagcagcagcagcaggaagccgccgccgcagccgccgccgccgcggccgctgcagccgcagccgcagccgtccctagacttagaccccctcatgacaataggactatggtagagataatcgctgaccaccctgccgaactagtgcgcacagactcgccgaattttctgtgttctgtgctcccgtctcattggcggtgcaataaaacactccccgtagcatttaaagtggtggctctgggcgaagtccctgacggcactgtggtcaccgtcatggctggcaatgacgaaaattactcagccgagctgcggaacgctagcgctgttatgaagaaccaggtggcccgttttaatgatctcagattcgtaggccggtccggtagggggaaatctttcaccttaacaatcaccgtgttcactaaccctcctcaggtcgctacctaccaccgggccattaaggtgacggtggacggcccacgggaacctaggaggcacaggcaaaaactagatgacagtaagccctccctgttcagcgaccgcctgtctgacctcggaagaattccccaccctagtatgcgtgtgggcgtgccccctcagaacccccgcccctccctcaactctgctcctagcccatttaatccgcagggacagagccaaatcactgatcccaggcaggcccagagctcccccccttggagctatgatcagtcttaccctagctacttgagccagatgacctccccttccattcattctaccacgcctctgagcagtacacggggaaccggtctgccggccataaccgatgtgcctcgacggatcagcgatgatgataccgccacttccgatttctgcctgtggcccagcacactatcaaagaagtcccaagctggcgcatccgaactcgggcctttttctgatccaaggcagttcccttccatttcatcactgacagagtctagattttcgaatccccgcatgcattacccagccacctttacttatactccccctgttacttcggggatgagtctgggcatgagcgccaccacacattaccacacttatctgccaccgccttacccaggatccagtcagtcccaatcggggcctttccagactagcagcactccctacttatactacgggaccagttctggctcttatcagttcccaatggtacctggcggcgatagatcaccatcgagaatgctgccaccttgtactaccactagcaatgggagcaccttactcaaccccaatttgcctaaccagaacgatggagtggacgccgatggctcccattcgtcttcacctactgtgctgaatagctctggtcgcatggatgagagtgtctggaggccatactag

SEQ ID NO: 26230 - DNA, 1566 bp, synthetic construct
  misc_feature 1..1566: note = Description of Artificial Sequence: Synthetic coding sequence
  source 1..1566: mol_type = other DNA
atggccagcaacagcctgttcagcaccgtgaccccctgccagcagaattttttctgggatcccagtaccagccgccgatttagtccccctagttcatctctgcagcccggtaagatgtctgacgtctcccccgtggtggccgcccagcagcagcagcagcagcagcagcagcagcaacagcagcagcagcagcagcaacagcaacagcagcaggaggctgccgcggcagccgcagctgccgcagcagccgccgccgcagctgctgcagtgcctcgtcttaggcctcctcacgataatcggacgatggtggagattatcgcggaccatccggccgagttggttcgcacagactctccaaacttcctctgcagtgtcctgccatcccattggcgctgcaataagacccttccagtggcattcaaggtcgtggctctcggggaggtgccagacggcaccgtcgtcaccgttatggccgggaacgatgaaaactatagcgcagagttgcgcaacgcaagcgctgtgatgaaaaaccaagtggccaggtttaatgatctcagatttgtgggacgatcggggcgcggaaaatcttttaccttgacgattacagtcttcacaaaccctcctcaagtcgcaacctaccacagggcaatcaaggtgaccgttgatggtccccgtgaacccagaaggcatcgccagaagctcgacgactctaagccgagcctgttttctgacaggctgagcgacttaggaagaatcccccacccgagtatgcgggttggagttccccctcagaatccacgtccaagcctcaatagcgcgccaagtcccttcaacccacaaggtcagtctcaaattacagacccacgacaggctcaatcttctcccccatggagctacgatcagtcgtatccatcctatctgagccaaatgactagtccatctatccactccacgacaccgctcagtagtacacgaggaaccggcctccccgctattacagacgtcccccgccgaatttccgatgatgacaccgccactagtgacttctgcctctggcccagcacattgtcaaaaaagagtcaggcaggcgctagcgagctagggcctttttcagatccacggcaattccccagtatctccagcttgacagagtctcgcttctcaaaccctaggatgcattatccagcaacgtttacatacactccaccagttacttctggcatgagtctcgggatgtctgctactacccattatcacacctatctgcctcctccctaccccggaagcagtcagtcgcaatccgggccctttcaaacatcatccactccttatctctactacgggacatcgtcaggttcataccagttccccatggttccgggcggtgaccggagcccgtctcgaatgctgcctccctgtactactacaagcaacgggtcgaccttactgaatccaaatctccctaatcaaaacgatggcgtggacgctgatggatcgcacagttcatccccaaccgtgctgaacagtagtggcaggatggacgagtcggtttggcggccctactag

SEQ ID NO: 26231 - DNA, 1704 bp, synthetic construct
  misc_feature 1..1704: note = Description of Artificial Sequence: Synthetic coding sequence
  source 1..1704: mol_type = other DNA
atgctgcacagcccccacaagcagccccagaaccacaagtgcggcgcaaacttcctccaggaggactccaaaaagagcctggtctttaagtggcttatttccgccggccattatcagcctccacgccctacagagagttttaaggctgcgtcctctatatataacagggggtataagttttacctcaaaaagaagggcggaacaatggcctcaaactcgctgttttcgaccgtgaccccatgtcagcagaattttttctgggatccttccacctctaggagatttagcccccctagcagctcattgcaacctggaaagatgtcggatgtgtcccctgtggtagccgcgcagcaacagcagcagcagcagcagcagcagcagcagcagcaacagcagcaacaacagcaacagcaacaggaagccgccgctgccgctgcggccgccgctgcggcagccgccgcggccgctgcggtccccaggctccgcccccctcatgataacagaacaatggtagagattatcgcggatcaccctgctgaactagtcagaaccgattctccgaatttcttatgctctgttctccctagccattggcgttgtaacaaaaccctgcctgtggcatttaaggtcgtagctctgggcgaggttccagacggtacggtcgttactgtaatggctggtaatgacgagaactacagtgcggaactgcggaacgcatctgccgtgatgaagaaccaggtagctcgcttcaacgacctccgattcgtcggtcgtagcggacgtgggaagagtttcacacttacaatcaccgtatttaccaaccctcctcaggtcgcaacctaccacagggccatcaaagtcaccgtggacggcccgagagaaccacgtcgtcaccgtcagaaacttgatgatagtaagcccagcctgttctctgatcggcttagcgacctgggcaggatccctcatccctcaatgcgggttggagtgcccccccagaacccacgacctagcctaaacagcgcgccttctccattcaaccctcaaggccagtcgcagatcactgatccgaggcaggcacagagtagcccaccctggtcatatgatcagtcgtatccgtcatatctttcccaaatgacatccccctccatccactcaaccacgccgctgagctccaccaggggtaccgggctgcctgcaattaccgacgtcccccgtcggatcagcggagcctcagaactgggaccattcagcgatcctcgacagttcccgagcattagctctttaactgagtcacgcttctcaaaccctcgcatgcactatccagcaaccttcacttacacaccgccagtgacgtcgggtatgtccctcggtatgagtgctacaacacactatcatacctacctgccccctccttacccggggtccagccaaagccagagtgggccattccagacgtcaagtactccttacctgtattacggaacatcaagtggatcctaccagttcccgatggtgcccgggggcgacaggtcgccgagtagaatgctgcccccatgtacaacgacaagtaatggtagtaccttgctgaaccccaacctccccaatcagaatgatggtgtggatgcagatgggtctcactcctcatcaccaaccgtgctaaactcgtcggggcggatggacgaatcagtgtggaggccctactag

SEQ ID NO: 26232 - DNA, 1248 bp, synthetic construct
  misc_feature 1..1248: note = Description of Artificial Sequence: Synthetic coding sequence
  source 1..1248: mol_type = other DNA
atgcggatccccgtggaccccagcaccagccggcggttcaccccccctagtcccgccttcccatgtggtggcggcggaggaaagatgggcgagaatagtggggccttgagcgctcaggctgctgtgggtcccggcggacgcgcccggcccgaggtccgaagcatggttgatgttctcgctgaccacgctggggaactcgtcaggacagattctcctaattttctgtgtagtgtcctcccctcacattggaggtgcaataaaaccctacccgtagccttcaaagtagttgccctaggcgacgtcccagatggtaccgtggtgacagttatggccggaaatgatgagaactacagtgcagagcttcggaacgccagcgcagtgatgaagaaccaggtagcccgctttaatgacctacggtttgtggggaggagtggccgcggcaagtccttcactttgaccataacggtgttcaccaaccccacacaagtggctacgtaccatcgggcaatcaaggtaaccgtagacgggccacgtgagccacgacggcatcgccagaaactggaagatcaaacgaagccgttcccggacaggtttggcgacctagagcggcttcggatgcgcgtcacacctagtactccttcacctagaggcagtctctctactacctcacatttttccagccagcctcagacccctattcaggggacttcagagctgaacccatttagcgatccaagacagtttgaccgctctttcccaaccctgcctaccctcactgagtctaggtttcccgatcctaggatgcattatcccggagccatgagcgccgcctttccttattcagcaacccccagcggaaccagcatctcatcactgtcagttgccggaatgccagccacatcacggtttcatcatacatatttgccccctccataccccggagctccacaaaatcagagcggccctttccaggcaaatccatccccctaccacttgtattatggaactagttcggggtcatatcagtttagtatggtcgctggttcatcgtcagggggagaccggtctcctacccgcatgcttgcttcctgtacctcctctgctgctagcgtggcagccggaaatctgatgaatccaagcctcggaggccagtcggatggcgtggaggcagatggcagccactctaattccccaaccgccctgagcacacccggccgcatggacgaggccgtgtggcgtccctattag

SEQ ID NO: 26233 - DNA, 1290 bp, synthetic construct
  misc_feature 1..1290: note = Description of Artificial Sequence: Synthetic coding sequence
  source 1..1290: mol_type = other DNA
atggccagcaacagcatcttcgacagcttccccacctacagccccacattcatccgggacccctcgacatctagaagattcacaccgccatctcccgcctttccctgcggcggaggcgggggtaagatgggtgaaaactctggggccttgtcagcacaggccgccgtcggacccggtgggcgggccagaccagaggtaagatctatggtggatgtgctcgccgaccatgcaggcgaactggtacggacagattctcctaactttctttgttctgtgctcccaagccattggaggtgcaataagactcttcctgtggcttttaaagtggtcgcgctcggagacgtgcccgatggaactgtggttacagtgatggccgggaacgacgagaattattctgcagagttaagaaatgcatccgctgtcatgaagaaccaagtcgcacgattcaacgacttgagattcgtgggccggtcggggagaggcaaatcatttaccctcacaatcaccgtttttaccaacccgacgcaggttgccacataccatcgggcaattaaagtcaccgtggacggcccaagagaaccaagaaggcacagacagaaactggaggaccaaacaaagcccttccccgatcgatttggcgatcttgaaaggttacgcatgagggtgacaccaagtacaccttcaccaagaggctccttgagcacaacctctcacttttcctcgcagccacagactcccatccagggcacctccgagctgaaccccttcagtgatccccgtcagttcgaccgctcatttcctaccttaccaacgctcactgaaagccgattccctgacccaagaatgcactatccgggcgccatgagcgccgctttcccatactcagctaccccttcgggcacatcaatctcaagccttagtgttgcaggaatgccagcaacaagtcggttccatcacacctatctcccccctccttatcccggtgcccctcaaaaccagtctggcccatttcaagccaacccgagtccatatcatctttattacgggacatccagcggtagttaccagtttagcatggtcgcaggatcaagctctgggggtgatcgttcccccaccagaatgcttgcctcgtgcacctcctccgcagccagtgtggccgccgggaatctgatgaatccttcacttggcggtcagagcgacggagtcgaggctgatgggtcgcatagcaactccccaaccgcactgtctacacccggcagaatggacgaagctgtgtggcgtccctattag

SEQ ID NO: 26234 - DNA, 1290 bp, synthetic construct
  misc_feature 1..1290: note = Description of Artificial Sequence: Synthetic coding sequence
  source 1..1290: mol_type = other DNA
atggccagcaacagcatcttcgacagcttccccacctacagccccacatttattagggacccttctacctcccggaggttcactcctcccagcccggctttcccatgtgggggggggggcgggaaaatgggcgagaactcaggagcattatccgcacaggccgcggtagggcctggtggccgggcacgccccgaggtgagaagcatggtggatgttctcgccgaccacgctggcgagcttgtgaggaccgattcgccaaattttctttgcagcgttttaccctctcattggagatgcaacaagaccttacctgtcgcgttcaaagtcgttgcactcggagatgtgcccgatggcacggtggtaactgtgatggcagggaacgatgaaaactacagcgctgagctgcgcaacgcctctgctgtcatgaagaatcaggtcgctcgctttaacgatctgagatttgttggtcgcagtggacggggcaaatcatttacgttaacaattaccgtgtttacgaacccgactcaggtggcaacttatcatcgcgccattaaggtgactgttgatggaccacgcgaacctcgtcggcatcgccaaaagttagaggaccaaacgaagccttttccagatcggttcggggatcttgaaaggctccgcatgagagtgactccctcaacaccctcccctagggggagtctgagcacaacctcgcactttagttcacaaccacaaactcctatccagggaacaagcgagctgaaccccttttccgatccccggcagttcgaccgctctttccctacactgccaactctgacagaaagccgctttcccgatcccagaatgcattaccccggcgccatgtctgctgcctttccatatagcgctaccccgagcgggacaagcatatctagcctctccgtagccggaatgccggctacctctcgcttccaccacacctaccttcccccaccatatccaggggcacctcagaaccagagcggcccttttcaggctaatcctagtccataccatctctattacggcacatcctcagggtcataccaattcagcatggtagccgggagctcatctggtggtgacagaagtcccactcgcatgcttgcttcctgtacgtcaagtgccgcctcagtcgctgcgggtaacttaatgaatccctccttgggaggccagtccgatggcgtggaggctgacggctcccattctaacagtcctacagccttgtctacaccgggacgcatggacgaggcagtctggagaccctattag

SEQ ID NO: 26235 - DNA, 1089 bp, synthetic construct
  misc_feature 1..1089: note = Description of Artificial Sequence: Synthetic coding sequence
  source 1..1089: mol_type = other DNA
atgcggatccccgtggaccccagcaccagccggcggttcacccccccttcccccgccttcccatgtggaggcggcggtggtaagatgggggagaattccggtgccctcagcgcgcaagcagctgttggtcctgggggaagagctcgtccagaagtcaggtctatggttgacgtgctggccgaccacgcaggcgaattggtgcgcactgactctcccaacttcctgtgctcagtgctgccatcacactggagatgcaataagacactgcctgtggcgtttaaggtggtcgcgctcggggatgtgccggatggtactgtcgtgacggtaatggctggtaacgacgaaaactactctgccgaactgaggaatgcgtctgctgtgatgaagaatcaagtggcccgcttcaatgatcttagattcgtgggacgatctggcagaggaaaatcttttaccctgacaatcactgtgtttacgaaccctacgcaggtagccacttaccatagagccatcaaggtgacggtggatggcccacgggaacctcgccgaacatcagagctcaaccccttcagcgacccccggcagttcgataggtcttttcccaccctgccgacactgaccgagtcccggtttccagacccccgcatgcactaccctggcgccatgtctgctgccttcccatactcagctaccccgagcggaacctctatttcttctttaagtgtggcgggaatgccagcgacgtctcgcttccaccacacgtatttgccacccccctatcctggcgccccacagaaccagtccggacccttccaggctaatccttcgccctaccacctgtactacggtacttcctcaggatcttaccaatttagtatggtggccggatcttcctcaggcggcgatcgttctcctacaaggatgcttgcaagctgcacgagtagtgccgcatctgttgcagccgggaatttaatgaatccctcactgggtggccaatcggacggagtggaggcagatggatcgcacagcaacagtcccacggccctgtccaccccagggagaatggacgaggctgtctggcgtccatactag

SEQ ID NO: 26236 - DNA, 969 bp, synthetic construct
  misc_feature 1..969: note = Description of Artificial Sequence: Synthetic coding sequence
  source 1..969: mol_type = other DNA
atggtggtggccctgggcgacgtgcccgacggcaccgtggtgaccgtaatggcggggaacgacgagaattattcagccgaactgagaaacgcctccgctgtgatgaaaaatcaggtagcccgattcaatgatcttagattcgtggggaggtctggtcgaggcaagtcatttaccctcacaatcacagtattcactaatccaacacaagtagctacatatcaccgcgcaattaaagtcaccgtggacggaccgcgagagcctcggagacaccggcagaagctagaggatcaaaccaagcccttccctgatcgctttggagacctggagcgcctgagaatgcgggtaacaccttccacacctagtccaaggggaagcctgtctaccacatcgcatttctcaagccaacctcagaccccgatccaggggacctcagagttaaaccctttcagtgaccccaggcagtttgatagatcgtttcccactcttcctacactgaccgaatctcggttccccgatccgagaatgcactatccgggtgcaatgtccgcagcctttccatactcggctacgccgtcagggacaagtatttctagcttgtctgtcgccgggatgcccgcgacgtcgcgctttcaccatacatatctgcctcccccctatccgggcgccccgcaaaatcagtcgggaccgtttcaggctaacccttcaccctaccacctgtattacggaacgtctagtggttcctatcagttttccatggttgcgggctcctctagtggcggagaccggtctcccaccagaatgttggcctcttgcacatccagcgcagcctctgtcgccgctggcaatctaatgaatccttctcttggcgggcagtccgatggggtggaagcagatggaagtcatagcaactccccaaccgcactatccacaccaggtcggatggacgaagccgtatggcgcccttactag

SEQ ID NO: 26237 - DNA, 2439 bp, synthetic construct
  misc_feature 1..2439: note = Description of Artificial Sequence: Synthetic coding sequence
  source 1..2439: mol_type = other DNA
atggacttcagccggctgcacatgtacagccccccccagtgcgtgcccgagaatacagggtacacttatgctctgtcgagcagctactcgagcgatgcgctggattttgagacggaacataagctcgatccagtgttcgactctccgcgaatgtcaagaaggtctctgaggctcgccaccaccgcttgcacactgggtgacggtgaagccgtgggcgcagactccgggacatcatctgccgtgtccctgaagaatagagccgcacggactacgaaacagagacgctccacgaacaaaagcgcatttagtattaatcatgtcagccgacaggtgacgtcttctggagtgtctcacggaggcactgtgagtctccaggatgcggtgacaaggcgcccaccggtgctggacgagagctggatcagggagcagactacggtcgatcacttttgggggctggatgatgacggcgacctcaaaggaggcaataaagccgccatacagggaaatggcgatgttggagctgctgcagccacagctcataatggtttcagttgctcgaattgtagcatgctttccgagcgcaaggatgtactgacggctcatcccgccgccccaggcccagtatccagggtgtactcacgtgatcgcaatcagaagtgtgacgactgcaagggcaagcgacacttagatgcacatcctgggagagcggggactttgtggcacatctgggcttgtgccgggtacttcttactgcaaattttgagacgtattggagccgtgggtcaggccgtgtctcggactgcctggtctgccctgtggctagcggttgtggcccccggaaaggccgcgtccggtgttttctggtggctcggcattggatggtatcagtttgtgacgcttatcagctggctcaacgtatttctgttaacacgttgcctcaggaatatttgtaaattccttgtcctgctgattccccttttcctactgctggccggtttaagcctgcggggccaggggaatttctttagcttcctgcccgtgctgaattgggcatccatgcacaggacacaaagagttgacgatccgcaggacgtttttaaaccgaccacctctcgactcaaacagcccctgcagggagactcagaggcattcccatggcactggatgtcaggggtcgaacagcaggtcgcatccctgagcggccagtgccatcaccatggagagaacttgcgggaactgacaacactgttacaaaaactgcaagctagagtggatcaaatggaagggggggctgcaggaccttccgccagtgtgcgtgatgctgtgggccagccccccagggagactgactttatggctttccaccaggaacatgaggtacgcatgtctcatctggaagatatcctggggaagttgcgcgagaagtccgaagccatccagaaggaacttgagcaaaccaaacagaaaacaatttccgcagtcggggagcagctgctcccgacagtggaacacctgcagcttgagttggaccagcttaagtctgagttgtcttcgtggagacatgtgaaaactggatgcgaaacagtggacgccgttcaggaacgggtggatgttcaggtcagggaaatggtgaagctgctgttctccgaggatcagcagggagggtccctagagcagttgctgcagaggttttcctcacagtttgtgtcgaagggagatttacagactatgctcagggatttacagcttcagatcctccgaaatgtcacccaccatgtgtcagtcactaagcagttgcctacaagcgaggcagtggtctctgccgtgtccgaggcaggggcgagcggaattactgaggcgcaagcccgcgccattgtgaattccgctctaaagctctactctcaagataaaactgggatggttgattttgccttggaaagcggaggaggatccatcttgtctaccaggtgctccgagacttatgaaaccaaaaccgcgctgatgagtctgttcgggattccactgtggtatttctcccagtcaccacgcgtggtcattcagcccgacatatacccaggaaactgttgggcttttaaaggctcacagggctaccttgtggtgagactgagcatgatgatccatcctgcagcctttactcttgagcatattcccaagactctttcacccactggaaacataagttcagccccaaaggatttcgcggtttatggcctggagaacgagtaccaggaggagggacagctgctgggccaatttacttacgatcaagacggtgagtccctgcagatgtttcaggccctcaagagaccagacgacacagcctttcagatcgtggaactcagaatattttccaactggggtcacccggagtacacctgcctttatcgcttcagggttcatggggaaccagtcaagtag

SEQ ID NO: 26238 - DNA, 2109 bp, synthetic construct
  misc_feature 1..2109: note = Description of Artificial Sequence: Synthetic coding sequence
  source 1..2109: mol_type = other DNA
atgagccggcggagcctgcggctggccaccaccgcctgcaccctgggcgatggtgaggcagttggtgcagacagcggtaccagtagcgctgtatcactgaagaacagggctgcccgcacaactaagcagagacggtccacaaataaaagcgcattctcaattaaccacgtgagtagacaggttactagttccggtgtttcgcacgggggcaccgtgagcttacaggatgccgtgacgcgccgccccccggtactggacgaatcatggatccgcgagcagactacggttgaccacttctggggcctggatgatgatggcgacctaaaagggggcaacaaagcagctatccaaggtaatggagatgttggcgccgccgccgccaccgcccacaacgggttctcgtgcagcaattgctcaatgctttcagagcgcaaggacgtgctgactgcccatcctgccgccccaggtccggtgtcgcgggtctacagccgcgatcgcaatcagaaatggaaagccgcctccggtgttttttggtggttaggaattggttggtatcagtttgtaactctgatctcatggctgaacgtgtttttactgacacgttgtcttcgtaatatctgcaagttcttagtgcttctcattcctctattcctgctcctcgcaggtctgagtctgagagggcagggtaatttcttcagtttcctgcccgtcctgaactgggctagcatgcacagaacacagcgcgtggatgatcctcaggacgtgttcaagccaaccacctcccggctgaaacagccattgcagggggactctgaggcttttccctggcactggatgtctggcgttgagcagcaggtagcctctctatcgggccagtgccatcatcacggagaaaatctgagggaacttaccacgctgcttcagaagcttcaggcacgcgtggaccagatggagggcggtgccgccgggccatcagctagcgtccgcgacgctgtgggtcagccccccagagaaacagacttcatggccttccaccaggagcacgaagtacggatgtcacatctggaggacattttggggaaactgcgagagaaatccgaggctatccagaaagagctcgagcaaaccaaacaaaagaccatcagcgccgtgggagagcagctactacccaccgtcgagcatcttcagctggagcttgatcagctaaaatcagagctgtcctcttggcgccacgtcaagacaggatgcgagaccgtggacgctgtgcaagagcgggttgacgtacaggttcgcgagatggtcaaacttctgttctctgaggaccaacagggcggctctctcgagcagctgttacagagatttagctcgcagttcgtgtctaaaggcgatttacagaccatgctcagagatctacagttacagatcctgagaaatgtgactcaccatgtgagcgtcacgaaacaactgcccacgtctgaagcagtagtctctgccgtctctgaagccggagccagtggaataactgaagcgcaggcacgagctatagtgaacagtgcactgaagttatattcccaagataagactggcatggtggattttgcattagagagcggtggagggtctatccttagcacacgctgttctgagacttacgaaacaaagaccgccttaatgagcctattcgggattccactgtggtacttctcacagagcccacgggttgtcatccagcctgatatctatccaggcaactgctgggcttttaagggttctcagggctatctggttgtgcggctcagcatgatgatacaccccgccgcctttacccttgaacacatacccaagactctgtcacccactggcaacatttcctccgctcccaaagattttgccgtctacgggctggagaatgagtaccaggaggagggccaactgctgggacagtttacctacgaccaggatggcgagtccctccaaatgttccaggctctaaagcgacccgatgataccgcattccagatcgtggagctgcgaattttctctaattggggacatccagagtacacttgtctatacaggtttcgcgtgcacggcgagcctgtgaagtag

SEQ ID NO: 26239 - DNA, 2358 bp, synthetic construct
  misc_feature 1..2358: note = Description of Artificial Sequence: Synthetic coding sequence
  source 1..2358: mol_type = other DNA
atggacttcagccggctgcacatgtacagccccccccagtgcgtgcctgaaaatacagggtatacctacgcactttcatccagctacagcagtgacgccctggacttcgaaacggagcacaaactggatccggtgttcgacagccccaggatgagtcggcggagcctgcgcctcgccaccaccgcctgtacactgggagacggggaagctgttggagcagattcaggtaccagcagtgccgtctctctcaaaaatagagcagccaggacgactaaacagcgacgcagcacaaacaagtctgcatttagtatcaaccatgtgagccgacaggtgactagctcgggagtttctcatggcggtaccgtgagtctgcaggacgctgtcactcgtcggcctccagtgctcgatgagagctggatcagagagcagacaactgttgatcatttttgggggctggacgacgacggtgatcttaaaggtggaaacaaggccgctattcagggcaatggcgatgtcggagccgcagcggcaaccgcacacaatgggtttagctgcagcaattgttccatgttgtcggaacggaaagacgtgctgaccgcacacccagcggcaccaggtccagtaagccgggtttactcgagagatcgaaaccagaagtgctactttcttctgcagatactgaggcgaatcggagccgttggacaggccgtatcccggaccgcatggtcggccctttggctcgcggtggtggcccccggcaaggcggcgtctggggtgttttggtggctgggtatcggatggtatcagtttgtcacactgatcagctggctgaatgttttcctgttgacgcgctgcttgcgaaacatttgcaagtttctggttctcctgattccactgttcctgctcctggctggactcagcctgcgcggccagggtaactttttttcatttctcccagtgctcaattgggcttcaatgcataggacacagcgggtggatgacccccaggacgtctttaaacccactacaagtcgcctgaaacagcccctccagggcgatagcgaagccttcccatggcactggatgtcaggggttgagcaacaggtggcaagcttgtccggacagtgccaccaccacggtgagaaccttcgggagctgactacgctgctccagaaactccaagcacgcgtggaccagatggagggtggggcagcgggcccctcggcatctgtacgcgacgcagtgggacagccccctcgcgagactgactttatggctttccatcaggaacacgaagttcgaatgtcacatctcgaggatatccttgggaagctgcgggaaaagtcagaagcaatacagaaagaactggaacagacaaaacagaagacaatttccgctgtgggcgagcagctcctgccaaccgtggaacatctccagttggagctagaccagctgaaaagcgagttaagtagctggagacacgtgaaaaccgggtgtgagacagtcgacgctgtgcaagagagagtagacgtgcaagtacgcgaaatggtgaagctcctcttttcagaggatcagcaggggggaagtctagaacagctgctgcagagattctcaagccagttcgttagcaagggcgatctgcagaccatgttaagggacctgcagctccaaatcctccggaatgttactcaccatgtgagcgttaccaagcaattacctacttctgaagcagtggtctcagcagtctctgaagctggcgctagcggaattacagaagcccaggcccgagccatcgtaaatagcgctctgaagctgtacagtcaggataaaacaggtatggtggactttgccctcgagagcggaggcggaagtatactgagcactaggtgtagcgagacttacgaaaccaagaccgccctgatgtccctctttggaatacccctctggtatttctcacagtcccccagggtagtaattcagcccgacatttatcccggaaactgttgggcattcaagggttcccagggatatttggttgtcaggttgagtatgatgatccatcctgccgctttcaccctggaacacataccaaaaacactgtcccccacaggcaacatcagctctgctcctaaagacttcgcagtctatggactcgagaacgagtaccaggaggaagggcaactgctcggtcagttcacctacgatcaggacggcgaaagcctccagatgtttcaggccttgaaacgcccagatgacaccgcttttcagatcgtggagttacgcatcttttcgaactggggtcaccctgaatatacatgcctctacagattccgtgtgcacggtgagcctgtcaagtag

SEQ ID NO: 26240 - DNA, 774 bp, synthetic construct
  misc_feature 1..774: note = Description of Artificial Sequence: Synthetic coding sequence
  source 1..774: mol_type = other DNA
atggacttcagccggctgcacatgtacagccccccccagtgcgtgcccgagaacactggttacacctatgccttaagtagctcctattcctctgatgccctcgacttcgagactgaacacaaattggacccagtttttgactctccccgtatgagccgacgcagcctgagactcgccacaaccgcctgcacactgggggacggagaggctgtaggcgccgacagcgggacatcgtcggcggtcagccttaagaaccgagccgcccggacgaccaagcagcgccgcagcacaaataaatccgctttcagtattaatcacgtttcccgacaggtcaccagttccggcgtgtctcatggaggcaccgtgtccctacaggatgctgtgacccgccgccctcccgtactggacgagtcctggataagggaacagaccaccgttgatcatttttggggtttggacgatgacggcgacctgaaaggcggtaacaaagccgctattcagggcaacggtgatgtgggggctgcagccgccaccgcacataacggattttcatgctccaactgcagtatgctgtcagagagaaaggacgttttaacggctcatcctgcagcccctgggcccgtttccagagtgtactcaagggacagaaatcagaagtgtaaatctcagagctttaaaacccagaagaaggtgtgttttcccaatttgatcttccctttttgtaaatctcagtgcctacactatctgtcgtggcggttaaaaattattccatag

SEQ ID NO: 26241 - DNA, 2469 bp, synthetic construct
  misc_feature 1..2469: note = Description of Artificial Sequence: Synthetic coding sequence
  source 1..2469: mol_type = other DNA
atggacttcagccggctgcacatgtacagccccccccagtgcgtgccagaaaacacgggctatacctacgctctgtccagcagttattcaagtgacgccctggacttcgagaccgaacataaacttgaccctgtcttcgactcccctcgtatgtcacggaggtcgctaaggttagcaactacagcttgtactctcggagatggcgaagctgttggagcggactccggaacatccagtgctgtcagcttgaagaatcgcgccgctaggacaaccaaacagaggagaagcaccaacaagtctgccttttctatcaatcacgtgagccgtcaggtcacctcttctggggtatctcacggcggaactgtctccctccaggacgcggtcacaagaaggccgccggtactggacgagtcatggattagggagcagacaaccgtggaccatttttgggggctggatgacgacggcgatctcaagggcggaaataaggctgccatccaaggtaatggcgatgtcggcgccgccgccgctaccgcacataacggattctcctgtagtaactgttccatgctcagtgaacgcaaggatgtgctgacggcccacccagctgccccagggcccgtcagtcgggtgtattctcgcgacagaaaccagaaatgtgatgattgcaaaggcaaaaggcaccttgacgcccacactgccgctcacagtcagagtccacggcttccagggcgcgcaggaacactatggcacatctgggcctgtgccggctatttcctacttcagatcctgcgccggatcggggctgtggggcaagccgtaagccgaaccgcttggtccgcactgtggctggctgtggttgccccaggcaaggctgccagcggagtgttctggtggctgggcatcgggtggtatcaattcgtgacattgatttcatggctgaatgtgtttctcctcacgagatgtctgagaaacatatgtaagtttttggtgctgttgatcccgctgttcctgctcctcgcagggctcagtttacggggacagggcaattttttttctttccttccagtgctcaactgggcgtcaatgcaccgtacccagagggtggacgacccccaggatgtttttaaacctactaccagtaggctgaagcaacctctgcagggcgattccgaagctttcccttggcactggatgtccggagtggagcagcaggtcgcaagcttaagcggccagtgccatcatcatggagaaaatttgagggagctcactacactgttacagaagctccaggcacgagtggaccaaatggaagggggagctgccggcccaagcgcgtccgttagagacgcagtcggtcagccgccacgcgaaacagattttatggcctttcatcaggagcacgaggtgcgcatgtctcacctggaagacatcctggggaagctccgtgaaaaaagtgaagctatccaaaaggagcttgagcagaccaagcagaagaccataagcgcagtgggggagcagttattacccacggtggaacatcttcagctcgaactggaccagctgaagagcgagctctctagctggcgccacgtaaaaaccggttgtgagactgtcgatgccgtacaggaacgagtggacgtccaggtacgggagatggtcaagttgctgtttagcgaagaccagcaaggaggatctctggaacagctgcttcagcggtttagctcacaatttgtctcaaagggcgatctccagaccatgctgagagacctgcagcttcaaattcttagaaacgtgacacatcacgtcagtgtcaccaagcaactcccgactagcgaggctgtggtgagcgcagtctccgaggctggtgcgagtggcattacggaagcacaggcacgcgctattgtgaacagcgcacttaagttgtactcccaagacaagactgggatggtggatttcgccttggagtccgggggggggagcattctgtcaacgagatgttcagagacatacgaaactaaaacggccctgatgagcctgtttggaatccctctgtggtactttagccagtctcctagagtagtgatacagcctgatatatacccagggaactgctgggcgtttaagggctcccaggggtatttggtggtgcggctgtccatgatgattcatcctgccgccttcacgctggagcatatcccgaaaacactgtccccgaccgggaatattagcagtgctcccaaggattttgcagtatacggcttagagaatgagtatcaagaggagggtcagctgttgggacagtttacatacgaccaggacggcgagtcccttcagatgtttcaggccctcaaaagaccagacgacaccgccttccagatagttgaactgagaatttttagtaactggggccacccagaatacacttgcctttatcgctttcgggttcacggggaacccgtgaagtag

SEQ ID NO: 26242 - DNA, 1752 bp, synthetic construct
  misc_feature 1..1752: note = Description of Artificial Sequence: Synthetic coding sequence
  source 1..1752: mol_type = other DNA
atgaagctgagctacgagagcgagaactacaagctgaagacccacgagagcaaagattgcgagtctgagtcttacaagtccaaaagtcacgaaagtaaggctcacgcatcatactacggccggatgaacgttcgagaagtgcttcgcgaagacggccacctatcggttaacggcgaggccctgtggaaagctgccagcggcgtcttttggtggctggggatcgggtggtaccagttcgtgactcttatatcttggctgaacgtctttctgctcacacggtgcctcagaaacatctgtaagttcctggttttgttgattcccctcttcttactgctcgccggtctatccttgcgtggtcagggcaatttcttctcattcttgcccgtactcaattgggccagtatgcatcggacacaacgcgtggacgatccccaggacgtatttaagcccactacaagtaggttgaaacaaccgcttcagggcgattccgaagcctttccctggcattggatgagcggtgtggagcagcaggtagcgtcattatccgggcagtgtcaccaccatggtgagaatctcagggaactgaccacactactgcagaaactgcaagcccgggtggatcagatggagggaggagcggcgggacctagcgcctcaacagactttatggccttccatcaggagcacgaggtgaggatgtcacaccttgaagacatcctcggaaagttgcgggaaaaatctgaggctatacaaaaggagctggagcaaactaaacagaaaactatttccgcagtgggggaacaactgcttcctactgttgaacacctgcaactcgaacttgatcagcttaagtccgaactttcaagctggcgccacgtaaaaaccgggtgcgaaacagtggacgctgtgcaggagcgtgttgatgtgcaggtgcgggagatggttaaactgctgttctctgaagatcagcagggggggagtctggagcagctgttacagcggttttccagccagttcgtctccaagggcgatctgcagaccatgctgagggaccttcaattacagatcctgcggaatgtgacccaccacgttagtgtaaccaagcaattacccacaagcgaagccgttgtgagcgctgtgagtgaggcaggagctagcggaattacagaggcacaagcacgtgcgattgtgaatagcgccctgaagctgtatagccaggataaaactggaatggtggactttgcccttgaatcaggcggtggatctatattgtcgactagatgtagcgagacttatgaaacaaagaccgcactgatgtctctatttggaatcccactgtggtacttctcccagtcacccagggtcgtgattcagcctgacatttatcccggcaattgttgggcctttaaagggtctcagggatatctagtcgtgaggttatcgatgatgattcaccccgccgcttttactctggagcacatcccaaagacactgtccccgacagggaatatcagctccgcccccaaagatttcgctgtctatgggttggaaaacgaatatcaggaagaaggtcagctattagggcagttcacttatgaccaagacggagaatcactgcagatgtttcaggctctgaagaggcctgatgataccgcctttcagattgtggagttgagaatctttagcaactggggccatccggagtacacatgtctttaccgtttccgggtgcatggagagcccgtgaaatag

SEQ ID NO: 26243 - DNA, 342 bp, synthetic construct
  misc_feature 1..342: note = Description of Artificial Sequence: Synthetic coding sequence
  source 1..342: mol_type = other DNA
atggacttcagccggctgcacatgtacagccccccccagtgcgtgcctgaaaatactggctacacctatgcactttctagctcctattcatctgatgccttggatttcgagactgagcataagttggaccccgtgtttgatagtccgcgcatgtcccggcgatctctgcgtctagctacgactgcctgtacccttggagacggagaggccgtgggggccgacagcgggactagttcagccgttagtctaaaaaatcgcgcagccaggacaacaaagcagaggaggagcaccaataagagcgccttctccatcaatcacgtgtctcggcaggtcacatcttag

SEQ ID NO: 26244 - DNA, 267 bp, synthetic construct
  misc_feature 1..267: note = Description of Artificial Sequence: Synthetic coding sequence
  source 1..267: mol_type = other DNA
atggacttcagccggctgcacatgtacagccccccccagtgcgtgccagaaaacaccggttacacatatgcactgtcgagctcttatagttccgatgcgctggacttcgagaccgagcataaattggatccagtattcgattctccccgcatgagccgtcgttccctccggttggccaccactgcctgcactttgggggatggagaggcagttggtgccgactcaggaacaagtagtgctgtctctcttaaaaatcgggctgcctag

SEQ ID NO: 26245 - DNA, 2109 bp, synthetic construct
  misc_feature 1..2109: note = Description of Artificial Sequence: Synthetic coding sequence
  source 1..2109: mol_type = other DNA
atgagccggcggagcctgcggctggccaccaccgcctgcaccctgggcgatggcgaagctgtaggggccgacagtgggacatccagcgcagtttctctaaagaatagggccgcgaggaccacaaaacagcggcgatcaactaataagagtgcctttagcataaaccatgtgtctcgccaggtaacttcctcaggcgtcagccacgggggaaccgtgtctctgcaagatgcagtcacccgcaggcctcctgttctggacgaaagctggataagagagcaaacaacagtagaccacttctggggcctcgacgacgacggcgatctgaagggaggtaacaaggctgcgatacaagggaacggcgatgtaggagcagccgccgccacagctcacaacggttttagctgcagcaattgtagcatgctctcagagaggaaggacgtgcttacagcacatccggccgcaccaggcccggtgtctcgggtttattctcgagatcgcaatcagaagtggaaggcagcatctggagtattctggtggctggggatcggttggtaccagtttgtgactctgatatcatggcttaacgtgttccttcttacacgatgccttaggaacatctgcaaattcctcgtgctgcttatcccattgttcctcctgcttgccggactctcccttcgcggccaaggcaacttcttttcattcctgccagtcttaaactgggcgagcatgcatagaacccagagagtggacgatcctcaagacgtgtttaaacctactacttctaggctgaagcagccattgcagggtgactcagaggcctttccctggcactggatgtcaggtgtggagcaacaagtggcgtctctcagcggacagtgccaccaccatggggagaatttaagggaactgaccactcttttgcagaagctgcaagcgagggtcgatcaaatggagggcggggctgccggaccatctgcatctgttagagacgccgttggccagcccccaagagagacggacttcatggccttccaccaggaacacgaggttcggatgtcacacctcgaggatatcctcggcaaacttagagagaaatccgaggccatacagaaagagctcgagcaaacaaaacagaaaacaataagcgccgtcggagagcagctgctccccacagtagagcacctgcaactcgaattagaccaactgaaatctgagctgagtagttggaggcatgtgaagaccggatgtgagactgtagacgccgtccaggagagagtagacgttcaggtgagggagatggtcaagttgcttttctccgaagatcaacagggcggttctttggagcagcttctgcagcgattcagttcccagtttgtcagcaaaggggatctgcaaaccatgcttcgagaccttcaactgcaaatattaaggaatgttacacatcatgtgtctgtcaccaagcaactccctacatccgaggcagtggtatcagccgtctccgaagccggtgcctcagggatcactgaggcccaagctagggctattgtgaattccgcactgaagctctacagtcaggacaaaaccgggatggtggactttgcactggagagcggcgggggctccattctcagcacccgatgcagcgaaacttacgagacaaaaaccgccttgatgtctttatttgggatccccctttggtacttcagtcagtctccaagggtggtgatccaacccgacatctatcccgggaactgttgggcttttaagggtagccaaggttatctggtggtccggttaagcatgatgattcaccctgccgccttcacccttgaacatatcccaaaaaccctgtcacctacggggaacatcagctctgccccaaaggatttcgctgtctacgggcttgagaacgaataccaagaggaggggcagctgctcggccagtttacctatgatcaggatggagagtccctgcaaatgttccaggcactgaagcggcccgacgacaccgcctttcaaatcgtcgaacttagaatcttctccaactggggccatcctgagtatacttgcctttaccgtttccgcgtccatggagaaccagtgaaatag

SEQ ID NO: 26246 - DNA, 525 bp, synthetic construct
  misc_feature 1..525: note = Description of Artificial Sequence: Synthetic coding sequence
  source 1..525: mol_type = other DNA
atggacttcagccggctgcacatgtacagccccccccagtgcgtgcctgaaaacacaggatacacctacgccttgagttcgtcgtactctagcgatgctctggacttcgaaactgagcacaaacttgatcccgttttcgattctcctcgcatgagcaggcggagcctgaggctcgccacaactgcatgcacactgggtgacggtgaggcagtgggggccgattccggaacatcgtcagccgttagtctaaaaaaccgcgccgcgagaacaactaagcaaaggagaagtactaacaagtctgcattctccatcaatcacgtgtcacggcaggtaaccagcagtggggtgagtcacgggggcacagtatcgctccaggacgccgtgactaggcgcccacccgttctggatgagagttggattagagagcagactacagtggaccacttctggggccttgacgacgatggggacctaaagggagggaacaaagcagcaatacaggggaatggggacgtgggcgcttag

SEQ ID NO: 26247 - DNA, 408 bp, synthetic construct
  misc_feature 1..408: note = Description of Artificial Sequence: Synthetic coding sequence
  source 1..408: mol_type = other DNA
atggacttcagccggctgcacatgtacagccccccccagtgcgtgcctgagaacaccgggtatacatatgccctaagttctagttacagctccgacgccctggattttgagactgaacataagcttgatcctgtcttcgatagcccccggatgagtcgaagaagcctgaggctggctactaccgcctgcactctgggcgatggggaggcggtaggggccgatagtgggacatcctctgctgtgagcctgaagaatcgagccgctagaaccactaagcagcgacgaagcaccaacaagtctgccttttctataaaccacgtgagtaggcaggtcacatcatcaggtgttagccacggcgggaccgtgtcattgcaggacgctgtgaccaggcggcccccagtgctgtag

SEQ ID NO: 26248 - DNA, 267 bp, synthetic construct
  misc_feature 1..267: note = Description of Artificial Sequence: Synthetic coding sequence
  source 1..267: mol_type = other DNA
atggacttcagccggctgcacatgtacagccccccccagtgcgtgccggaaaacacgggctacacctatgccctcagttctagctattcctccgacgcccttgattttgagactgaacacaagctcgacccagttttcgattccccacggatgtccagacgatccctgcgcctggcaactacagcttgcacattaggcgacggggaagcggtgggagcagattctggcacctctagtgcagtgagcctgaaaaatagggctgcttag

SEQ ID NO: 26249 - DNA, 2049 bp, synthetic construct
  misc_feature 1..2049: note = Description of Artificial Sequence: Synthetic coding sequence
  source 1..2049: mol_type = other DNA
atggacttcagccggctgcacatgtacagccccccccagtgcgtgccggaaaatacagggtacacctatgcactgtcctcgtcctattcctcagacgccctagacttcgagacagaacataaacttgatccagttttcgacagcccccgcatgtctagacggagcctaagactcgcaaccaccgcctgtactctaggggacggtgaggccgtcggggcagatagcggcacttcaagcgccgtttccctgaaaaacagggccgcaaggacaacgaagcagcggcgtagtaccaataagtcagccttctccatcaatcatgtctcgcgacaggtaacgagcagtggcgtgtcacatggcggtacagtatccctccaagatgccgtgacccggcgccccccggtgctggatgagagctggatcagggagcaaacaacggtggaccacttttgggggaaggctgctagcggagtgttctggtggctgggtattggatggtaccagtttgtcactctgatttcttggctcaacgtgttcctgttaactcggtgcttgcgaaacatatgcaagttcctggtcctgctgatcccgctgttccttctgctcggactgtcgttgcggggacaaggcaattttttcagcttcctcccagttctcaattgggcaagcatgcacaggactcagagggtggacgatccacaagatgtattcaagccaactacctcgcgccttaagcagccacttcaaggcgatagcgaggcgttcccgtggcactggatgagtggcgtggagcagcaggtggccagcctcagcggacagtgccatcaccatggtgaaaatctccgggaactcacaactctgctccaaaaactgcaagctcgggtagatcagatggaggggggcgcagctgggccttcagctagcgttagagacgccgtggggcagcctcctcgtgagacggacttcatggcgttccatcaggagcatgaggtgaggatgagtcacctagaggacattctgggcaagctgcgagagaaaagtgaggcaattcaaaaggagctggaacagaccaagcagaagaccatcagcgccgtcggcgagcagcttcttccaactgtggaacacctgcagctggagctggaccagctgaagagcgagttgtcgagttggcggcacgtgaaaaccggatgtgagacggtggacgcagtgcaagaacgggtggatgttcaggtcagggagatggtcaagctcctgttcagtgaggaccaacaaggcggaagtctggagcaactgctgcagagatttagctctcagttcgtgtctaagggcgaccttcagaccatgctccgggacctgcagctccaaattcttcggaatgttactcaccacgtgtcagtgaccaagcagctccccacaagtgaagccgttgtgtctgccgtgtcagaggcgggtgcaagtgggattaccgaagcacaagcccgtgccatcgttaattccgctctcaaattgtattctcaagacaaaaccgggatggttgacttcgctcttgagtcgggggggggatcaattctgagcacccggtgcagcgaaacttatgagaccaaaacagcactcatgtcattgttcgggatccccctttggtacttctcccagtcaccccgggtggtgatccaaccagacatataccctggaaattgttgggcctttaaaggctcccaaggatatctcgtggtgaggctgtccatgatgatacacccagctgcatttactctggaacatattccgaagaccctcagccccaccggaaacatctcctccgcacccaaggattttgcggtgtacggcttggaaaatgagtaccaagaagaggggcagttgctgggacagttcacctacgatcaagacggcgagagcctacagatgtttcaagcactgaagcggcctgacgacacggcgtttcaaatcgtggagctgaggatcttcagcaattgggggcaccccgagtatacatgcctttaccgatttcgggtgcacggggagcctgttaagtag

SEQ ID NO: 26250 - DNA, 2925 bp, synthetic construct
  misc_feature 1..2925: note = Description of Artificial Sequence: Synthetic coding sequence
  source 1..2925: mol_type = other DNA
atgggcgacgtgcggaaggccaaggaggccctggccgaggtgcagatccctccaccagatgccggtccatctcccagatgcaaacctcccccagccgagaggctcctcggccccggtcggaggaggcgcgggttaagaagaagacgtgaagccgtttggttcgaggttgttaatatggacttttcgcgcctccatatgtactccccaccccagtgtgtaccggaaaacacaggatatacctatgccctatctagtagctactcatccgacgcactcgattttgaaacagagcacaagctcgatcccgtgtttgacagtcctagaatgagcagaagatcactcaggctagccactacagcctgcacattgggggatggggaagctgtgggggcggacagcggcacaagctctgcagttagccttaagaacagggcagccaggaccactaaacaaagaagatctaccaacaaatctgccttctctatcaatcacgtgtcccgacaggtaacttctagtggagtgagccatgggggcaccgtgtctctacaggacgcagtgacacggagaccacccgtgctcgacgagagctggatcagggagcagactacagttgatcacttttggggcctggacgatgacggcgatctgaaaggcggaaacaaagctgcaattcagggtaatggagatgttggagccgcagctgctacggcgcacaacgggttctcatgcagtaactgtagcatgctatctgaaaggaaggatgtactgacagcccatccagctgcaccaggccctgtgagcagggtttactcccgggaccggaatcaaaagtgtggcgcttctttttatgtcaatcgcatcctgtggctcgcgcgttatacagcctcaagtttcagcagcttcctagttcaacttttccaggtggtgttaatgaagctttcttatgaatccgaaaattacaagctgaaaacccatgagtcaaaggattgtgagtccgagtcttacaagtctaaatctcatgaatccaaggcccacgctagttattacggcagaatgaatgtgcgcgaagtcctgagagaggatggacacctgtcagtgaatggcgaggctctgtgtgatgactgtaagggcaagcggcacttggatgcccacaccgctgctcactcacagtctccacgcctgcccggacgcgctggcacactttggcacatctgggcttgcgccggatactttctgctgcagattctgcgacggatcggagccgttggccaggcagtctcccggacagcgtggtcggcactgtggctggccgtggtagctcccggcaaagcagcgtctggggtcttttggtggctgggcatcggatggtatcagttcgttacattgattagctggctgaatgtatttttactgacaaggtgcctgcggaacatttgtaagtttctcgttttgctcatcccactgtttttgcttttagcggggctctccttgcggggccagggaaatttttttagcttcctgcccgtcttgaattgggcctctatgcatcgaactcaacgagttgacgacccgcaggacgtgttcaaaccaactacaagccggttgaagcagcctctacaaggggattcagaggccttcccttggcattggatgtccggtgtggaacagcaggtagcgagtttgtctgggcagtgtcatcaccatggcgaaaatctgcgcgaattgacgaccctgctgcagaagctgcaagcacgggtagatcaaatggaaggaggagccgccggcccctctgcatcagtgcgagacgcagttggacagccgcctagggaaacagacttcatggccttccatcaggagcatgaggtcaggatgtcccatctggaagacatattggggaaactcagggagaaaagcgaagctatccagaaagagctggagcagaccaaacaaaaaaccatctcggctgtaggcgagcagctgctgccaactgtagaacaccttcagctggaactggatcagctcaaatcagagctatcctcctggcgccatgtcaagacgggctgcgagaccgtcgacgcggtacaagagcgagttgacgtgcaagttagggaaatggtcaaactcttgttctccgaagatcagcagggaggaagcctggaacagctgctgcaaagattctcttcccagtttgtgtctaagggagacctacagacaatgctcagagatctacaattgcagattctgcgcaacgtgacccatcatgtgtccgttaccaagcagctccctacaagcgaggccgtggtgtccgcagtaagcgaagctggagcctccggcattaccgaagcacaggccagggcaatagttaactctgccctgaagctgtactctcaggataaaacgggtatggtggatttcgcgctggagtcgggcggtggctcaatcctatccactaggtgcagcgagacatacgagaccaaaaccgccttaatgagcctgttcgggatccccttatggtacttttcccagagccccagagtggtcatccagcccgatatctaccccgggaattgttgggcttttaaagggtcacagggctacctggtcgttcgcctgagcatgatgatccaccccgctgctttcactctggagcacattccaaagactctcagccctacgggaaatatctcatccgcccctaaggatttcgccgtgtacgggttggagaacgaatatcaagaggagggtcagttactcggccagtttacttacgaccaagacggcgagtcactccagatgtttcaggccctcaagcgcccagatgacactgcctttcaaatcgttgagctgaggattttttctaattggggacaccccgagtacacctgcctgtacaggtttagagtgcacggagagccggtgaaatag

SEQ ID NO: 26251 - DNA, 837 bp, synthetic construct
  misc_feature 1..837: note = Description of Artificial Sequence: Synthetic coding sequence
  source 1..837: mol_type = other DNA
atgggccggatcagccccggcagccccggcctgccccggaccgtgtggttcgaggtcgtaaatatggatttcagccggttgcacatgtattctccaccacaatgcgtccctgaaaacacaggatatacatatgcactgtcctcctcttactcatcagacgctctggatttcgaaacagaacacaaactggatccagtattcgattctccaaggatgagccggaggtctttgagacttgcaacaactgcctgtaccctgggggatggggaggctgtcggggctgatagtggaacctctagcgccgtgagtctaaaaaaccgggccgcccgaacaaccaagcagcgtcgttccaccaacaaatctgcattctcgattaatcacgtcagccggcaagtaactagttccggcgttagccacgggggaacggttagtttacaggatgcagtaaccagacgcccaccagtgctagacgagtcctggattcgtgagcagacaaccgttgaccacttctggggcctggacgatgacggggatctgaaaggtgggaacaaggcggccatccaggggaacggagacgtaggagcagccgcagctacggcccacaatgggttctcttgttcaaactgcagcatgctcagcgagaggaaggacgtgctgaccgcccatcccgctgcccccggtcccgtttcgagagtatattctagagataggaaccagaagtgtaaatcgcagtccttcaagactcagaaaaaagtttgctttcctaacttaattttcccattctgtaagagtcagtgcctgcattatctgtcatggcgcctgaaaatcattccatag

SEQ ID NO: 26252 - DNA, 360 bp, synthetic construct
  misc_feature 1..360: note = Description of Artificial Sequence: Synthetic coding sequence
  source 1..360: mol_type = other DNA
atggacttcagccggctgcacatgtacagccccccccagtgcgtgcctgaaaataccgggtacacttacgctctctcttcctcctattcctccgacgcattagatttcgaaaccgagcacaaacttgaccccgtatttgactctcctagaatgagtcggcgcagcctgagattggctaccactgcctgcacattaggggatggcgaggctgtcggagccgatagtggtacgtctagtgcggtgagcttgaaaaaccgggcagctaggaccacaaagcaacgacggtcaaccaacaaatccgctttttcgataaatcacgtgagccgacaggtgacctcttctggagttagccatggatag

SEQ ID NO: 26253 - DNA, 2352 bp, synthetic construct
  misc_feature 1..2352: note = Description of Artificial Sequence: Synthetic coding sequence
  source 1..2352: mol_type = other DNA
atggtgatcatgagcgagttcagcgccgaccccgccggccagggccagggccagcagaagccattaagggtaggcttctatgatatcgaaaggactttgggtaaaggcaacttcgcagtagtaaaactcgcccggcacagagtcacgaagacccaggtcgctatcaaaatcatcgacaagacgcgtctcgactcttccaatttggaaaagatatatagggaagtccaactgatgaagctgctgaatcaccctcacattataaaactctaccaggtgatggagacgaaggacatgctctatatagtgactgaatttgccaagaacggagaaatgttcgactacctcaccagcaatggtcatctcagcgaaaacgaggcacgaaaaaaattctggcaaatcctgagcgcagtggagtactgccacgatcatcacattgtccatagagacctaaagaccgaaaaccttctcctggatggcaacatggacattaaactggccgatttcggcttcggcaatttctataagtctggcgaacctcttagcacatggtgcgggagtccgccctacgctgcccccgaggtctttgagggcaaagagtatgagggaccgcagttggacatatggagcctcggcgtagtgttgtatgtactggtttgtgggtccctcccattcgatgggccaaacctgcctacattacggcaaagggtcctggagggtaggttccgcatccctttctttatgtcccaggattgcgaatccttgatcaggagaatgttggtggtggaccctgccaggaggattactatcgcccagatccgtcagcacagatggatgagggctgaaccatgccttcccgggcccgcttgtcctgccttctccgcccacagttacacatctaacctgggcgactatgatgagcaggctttaggaattatgcagactctaggggtggaccggcagcgcacggtggaatccctgcagaatagcagctataaccacttcgctgcaatctactacctgctgcttgagcggctgaaagaatacagaaacgcacagtgcgcacgacctgggccagcccgccaaccacgtccaaggagcagcgatcttagcgggttagaggttccccaggaggggttatcaactgaccccttcagacccgcactactctgtccacaaccacagacacttgttcagtctgtcttgcaggccgagatggattgcgagctgcaaagttctctacaatggccgcttttcttccctgtggacgccagctgcagcggggttttcagaccacggcctgttagcccttccagcctacttgataccgctatctcagaggaggcccgccaggggccaggccttgaagaggaacaggatacgcaggagtcactgccatcgagtaccgggagaagacatactcttgccgaggtgtccacccgcttatctcccttaaccgctccatgtattgtggtgtcacccagcacgacagcgtctccagccgagggaacgagcagtgacagttgccttacattcagcgcctcaaagtctccagcgggcctgtcaggaacccccgctacacagggcctgctgggagcttgctcccccgtgcgattggcctcacccttcctcggctcacaaagtgcgacaccagtgttgcaagcccagggcgggctggggggagctgtgcttctgcctgtgtcttttcaggagggccgacgcgcctctgacacatcactgacgcagggcctgaaagcttttaggcagcaactgaggaaaactacacggacgaaggggttcctgggcctcaacaaaatcaagggactcgccaggcaggtgtgccaggcccccgctagtagagcatcccggggtgggctgtccccttttcacgctccagcccaatcaccaggcctacacgggggagctgccggatcccgagagggctggagtctcctcgaggaggtcctggaacagcagagactcctgcagttacagcaccaccctgcggcggctccagggtgttcacaggccccccagcctgcccctgcgccttttgtaatcgctccatgtgacggccccggggccgcacctctgccctcgacactgctgacttcggggcttcctttgcttcctccccccttgctccagacaggggcctcccctgttgcttccgccgcacagttgctcgatacacaccttcatatcggcacgggccctactgccttaccagccgtgccgccccctaggctggctcggttggcccccgggtgtgagcccctgggcctcctccagggcgattgcgagatggaggatctgatgccttgttccttgggcacttttgtgcttgttcaatag

SEQ ID NO: 26254 - DNA, 3744 bp, synthetic construct
  misc_feature 1..3744: note = Description of Artificial Sequence: Synthetic coding sequence
  source 1..3744: mol_type = other DNA
atggaggacgccggcgccgccggccccggccccgagcccgagcccgaacccgaacctgagcctgagcctgcaccagaacctgaaccggagccaaaacctggcgcaggaacttctgaagcctttagtcgtctgtggactgatgtgatgggcatactagacgggtccctgggtaacatcgacgacctggctcaacaatatgccgactactacaacacatgtttttctgatgtttgcgagaggatggaggaactgcggaaacgacgggttagccaggatctcgaggtggagaaaccggatgcatcacccacttccttacagctgcggtcccagatcgaggaatccctgggcttttgctctgcagtttctaccccggaagtggagcggaagaatccccttcataaaagtaatagcgaagattcttctgtagggaaaggtgactggaagaaaaagaacaaatacttctggcagaatttcaggaagaatcagaagggcataatgagacagacgagtaagggcgaggacgtaggatacgttgctagcgagattacaatgtcggacgaagaacggattcaactgatgatgatggtgaaggaaaaaatgatcaccattgaggaagccctagcaagactgaaagaatacgaggcccaacatcggcagtctgccgcactcgaccctgccgattggccggacggctcgtatccgacgtttgatggatccagcaactgcaactcccgcgaacagtccgacgatgagactgaagaatcagtgaaattcaaaaggcttcacaagcttgttaatagcaccagacgggtgcgaaaaaaactcatacgggttgaggaaatgaagaaacccagcacggagggaggggaagagcacgtgttcgagaatagtcctgtgctggatgagcgttctgctctctactctggtgttcataagaaacccctatttttcgacggctcaccggaaaaacctccagaagacgactctgactcccttaccacttccccaagttcgagctccctggacacttggggcgcgggacgaaaactggtaaaaacttttagtaagggagagtcaagggggctcataaaaccccccaagaaaatgggaacttttttcagctatccagaggaggaaaaggcacagaaggtgtcaaggagcctgactgagggggagatgaagaagggtctgggcagcttgagtcatggtcgcacatgttcatttggcggatttgacctgacaaataggtcattgcatgtggggagtaataactcggatcccatgggcaaagagggtgactttgtttacaaggaagtaatcaaaagccccaccgcaagccgtataagtttgggtaagaaagtgaagagcgttaaagagacaatgagaaaaaggatgtcaaaaaaatactcctcttctgtctccgaacaggatagcgggttagatggaatgccaggttccccgccaccgtcccaacccgatcctgaacatctagataaaccgaaactgaaagccgggggctctgtggagagcctacgctcatcgctctcaggccagtcatcgatgtccggacagacagtatctaccaccgattcttccacttctaacagggaatccgttaagtcggaggatggagatgatgaagaacccccgtatagggggccattttgtggtcgcgcccgggtacacacagacttcaccccttcaccgtatgatacggacagcctgaaactgaaaaagggcgacatcatcgacataatctctaaaccacccatggggacctggatgggactactcaacaacaaggtggggactttcaagttcatatatgtcgatgtcttaagcgaggatgaggagaaaccgaagagacctactcgacgaaggcgaaagggccggcctccccagccgaaatctgtagaggacctattggacagaatcaaccttaaggagcacatgccaacatttctgtttaatgggtacgaggacttagatactttcaaactgctggaagaggaagacctggacgaacttaatatacgggaccctgagcaccgagcagttttattgactgccgtcgaactcttgcaggagtatgacagcaattctgaccagtctggatctcaggaaaagctcctggtagactcccagggcctttccgggtgcagcccaagagactccggctgctatgaatcaagcgagaacctggaaaatggcaagacacgcaaggcctctctgttatccgctaagtccagtaccgaaccctctctgaaaagtttttcacggaatcaacttggtaattatcccaccctcccactgatgaaatcaggggacgccctcaagcagggacaagaggaggggcgcctgggcggcggtctggcgcctgacacgtcgaaatcctgtgatccaccaggcgttactggtctcaacaagaacagaaggagccttccagtgagcatttgtcggtcctgtgaaaccctcgaaggtccacaaacagtggatacctggccacggagccacagtctcgacgatctgcaagtggagccaggagccgaacaggacgtgccaacagaagttacagagcccccacctcaaattgtgcctgaggtccctcagaagactaccgcaagctcgacaaaggcgcagccacttgagcaggattctgctgtggataacgccctactcctgacccagtcaaaaaggttcagtgaacctcagaagctcaccacaaagaaacttgagggttccatcgccgccagcggaagaggtttgtcacccccccaatgcctccccaggaactatgatgcacagccgccaggtgccaaacatggcctggccaggactcccttggaggggcatcggaagggccacgagttcgaaggcactcaccatccactggggacaaaggaaggcgttgacgcggagcagcgaatgcagcctaagattcccagtcagccacctcccgtgccagccaagaaatccagagagcgactggcaaatgggttgcacccagtacccatggggccatcaggagccctgcctagtcccgacgccccctgcctgcccgtgaagcgggggtctccagcttccccaacttctccatcagactgcccaccggcactggcccccagacccctgtccggccaggcccccggttccccaccctctacccgaccgcccccatggctcagcgagttgccagagaacacgtcactgcaggagcacggagtgaagctagggcccgcgctgacacgcaaggtgagctgcgccaggggggtggacttggaaactctgaccgagaataagctccatgctgaagggatcgatttgaccgaagaaccttactccgacaagcatggccgctgtggaattcctgaagccctcgtgcaacgctacgcagaagacctcgaccagcccgagagagatgtcgctgcgaacatggaccagataagggtcaagcagctccgcaaacagcaccgcatggccattccaagtggcggcctcaccgagatttgtaggaagccggtttcacccgggtgcatcagctccgtgtccgactggctgatctccatcggccttccaatgtacgctgggactctctcaacggccggattctcaactctcagtcaagtgcccagcctgtcccacacttgtctccaggaagctggtattaccgaggagcgccacataagaaaacttctttcagcagcccgcttgtttaagttgccccccggcccagaggccatgtag

SEQ ID NO: 26255 - DNA, 255 bp, synthetic construct
  misc_feature 1..255: note = Description of Artificial Sequence: Synthetic coding sequence
  source 1..255: mol_type = other DNA
atggaggagcaggactgccgggacggcagcctgggcaacatcgacgacctggcccagcagtacgcagactattataatacgtgtttttccgatgtgtgtgagcggatggaggagctgagaaaacgtagggttagccaggatctggaagtggaaaaacctgacgcctctcccacatccctgcagcttcgaagtcaaatcgaggaatctctcgggttctgttcagccgtgtcaactcccgaggtggagcgaaaatag

SEQ ID NO: 26256 - DNA, 249 bp, synthetic construct
  misc_feature 1..249: note = Description of Artificial Sequence: Synthetic coding sequence
  source 1..249: mol_type = other DNA
caggcccaggacttcaaggacggcagcctgggcaacatcgacgacttggcccaacaatatgctgactattacaacacttgtttctccgacgtgtgcgagcggatggaagagctgcggaagcgcagagtctcacaggacctcgaggtggaaaagcccgatgcgtctcccacctccctccagcttaggtcacagatcgaggagtcactgggattttgcagcgctgtcagtacacccgaggttgaaaggtag

SEQ ID NO: 26257 - DNA, 2091 bp, synthetic construct
  misc_feature 1..2091: note = Description of Artificial Sequence: Synthetic coding sequence
  source 1..2091: mol_type = other DNA
atgcccaagcccagccgggagcagagcgacgacgagaccgaggagagcgtgaaatttaagcgactccataagctggtgaactctacacgtcgcgtccggaagaagctgatccgcgtcgaggagatgaaaaagcccagtaccgagggaggggaggaacacgtgtttgagaactcccctgtgctggatgagagatcagctttgtatagcggagtgcataagaaacccctatttttcgatggctcgccggaaaagcctcccgaggacgactctgattcactgaccacctctcctagtagctcatcactagacacctggggcgcaggcaggaaactcgttaagaccttctcaaaaggggagtctcggggtcttatcaagccgcccaagaaaatgggcacgtttttctcttaccctgaggaagaaaaggcccagaaggtgagcagatctttaaccgagggcgagatgaaaaaggggctaggaagtctgtcccacggtcgcacctgctcatttggaggattcgacctgaccaacaggagcctacacgtcggcagtaacaatagtgaccctatgggaaaagagggggactttgtgtacaaggaagtcattaaatcccctactgcgtccaggatatctcttggcaagaaagttaaatcggtgaaggagaccatgcgcaaacggatgtccaaaaaatatagtagctccgtgtcagagcaggactcaggattggatggcatgcccggttcgcccccgccaagccagccggatcctgaacacttggataagcccaagctgaaggccggaggatccgtggagagcctccgctcaagcctctctggccagtcctccatgtccggccaaactgtgagcaccaccgactctagtacatccaatcgagaatctgtgaaaagcgaggacggagatgacgaagagcccccttacaggggtcctttttgcggaagggcccgtgttcatacagacttcacaccttcaccttatgatacagactccctgaaactgaaaaagggtgacatcatagatattatcagtaaaccccccatgggcacatggatgggcttgcttaacaacaaggttgggaccttcaaatttatctacgtagatgtcctatcggaggatgaagaaaagcccaaaagaccaaccaggcggaggcgaaagggccgccctccacaaccaaaaagtgtcgaggatctgctggatagaattaacctcaaagagcacatgcccacttttctatttaacggttatgaagacctggacaccttcaagctgctggaagaggaagatttagatgagctgaatataagagaccctgagcatagagctgtgctgctgacagctgtagagttactgcaggaatacgacagcaactccgatcagagcgggtcacaagagaagcttctggttgacagccaggggcttagcggatgctctccccgggattcaggatgttacgagtcatcagaaaacttagaaaacggcaagacacggaaggcatccctgctctccgctaaaagctcaaccgagccatctctcaagagcttcagccgaaatcagcttggaaactaccctaccctgccactgatgaagagcggcgatgcacttaagcagggccaagaggaagggagattaggcggcgggttggctcctgatacaagtaaatcctgtgatccccccggtgtcactggcctgaacaagaatcgccggtccttgcctgtttcaatctgcaggagctgtgagaccctagagggtccacagacagtcgatacctggcccaggtcacattcactggatgatctgcaggtggagccgggggccgaacaggatgtcccgacggaagtgaccgagccgcctccccagatcgtgcccgaagttcctcaaaaaacaacagcgtctagtaccaaggcacagcctctggaacaggactctgctgtggacaatgccctgctgctcacacaaagtaaacgcttctcagaacctcaaaaacttacaactaagaaactggagggttcaattgctgcatccggcaggggcctgtccccaccccaatgtctccctcgaaactacgatgcccaatag

SEQ ID NO: 26258 - DNA, 1974 bp, synthetic construct
  misc_feature 1..1974: note = Description of Artificial Sequence: Synthetic coding sequence
  source 1..1974: mol_type = other DNA
atgggcacctggatgggcctgctgaacaacaaggtgggcaccttcaaattcatatatgtcgacgtgctgtcagaagacgaggagaaaccaaaaaggccgacccggaggcgacgcaagggtagacccccccagcctaaaagcgtcgaagacctcctcgacagaatcaatcttaaagagcacatgcccactttcctctttaacggatatgaagacctcgatactttcaagctgcttgaagaggaggatctcgacgagctgaacatccgggatcctgaacatcgcgccgtgctattgaccgccgttgagctgcttcaggagtacgattcaaactccgaccagtccggatctcaggaaaaacttctggtggacagtcagggcctcagcggctgcagccctagggactcagggtgctatgaaagctcagagaaccttgagaatgggaagacgcggaaagcctccctgctgtctgctaagtctagcaccgagcctagcttaaagtcttttagccgaaatcagctgggaaactaccccaccttacctctgatgaagtccggagatgctctgaaacaggggcaagaggaggggcgcctgggaggtggccttgcgcctgacacttccaagtcatgtgacccccctggagtcacagggctgaataaaaatcgccggagtctgccagtctctatctgtagaagctgcgaaactctggagggaccccagacagtagatacgtggccaaggagccacagcctcgacgatctacaggtggagccaggcgccgagcaggacgttcccacagaggtgaccgaaccgcccccccagatcgtgccagaagtgccacaaaaaaccaccgcaagtagcacaaaggcacagcccctcgaacaagattctgctgtggacaatgctcttctcctgacccaaagtaagagattctcagagccccagaagctgacaacaaaaaagctcgaaggctcaatagcagcgagcggcagaggactgagtccacctcagtgcttacccaggaattacgatgcccagccgcctggcgccaaacacggcttggcccggactccacttgaggggcataggaaaggtcacgaattcgaggggacgcatcaccccttaggtacgaaggagggagtggatgccgagcaaaggatgcaaccaaaaatcccatcgcagcctccgcccgttcccgcaaagaagtcccgcgagcgcctggccaatgggctgcaccctgtccccatggggcccagcggagcattgccgtctccggacgctccttgcctgcctgtgaagcgtgggtccccagcctctcctacttcccctagcgactgtcctcctgctctggccccacgtcccttgagcgggcaggccccaggaagccctcctagcacccggccccctccatggttgtcggagcttcccgagaacacctctctgcaggaacacggcgttaaacttggtccagcattgactaggaaagtgtcttgcgcaaggggagttgacctggagaccctcaccgagaataagctgcatgccgaaggcattgatttaaccgaggagccatactccgacaaacacggacggtgcggaatccccgaggctctggttcagcggtatgcagaggacctggatcagcctgagcgggatgtggctgctaatatggaccagattcgggtgaagcagttgcgcaagcagcacagaatggctatcccatccggagggttgacggagatctgccgtaaacccgtgagcccaggttgtatttctagtgttagtgactggctaatctctattgggctgccgatgtacgccggtacactgagcacagccggatttagtaccttatcccaggtccctagcttgtcacacacatgtctccaagaggcgggcatcacggaagagaggcacattaggaaactattgtcagctgctcggctctttaagctgccaccagggcctgaggccatgtag

SEQ ID NO: 26259 - DNA, 621 bp, synthetic construct
  misc_feature 1..621: note = Description of Artificial Sequence: Synthetic coding sequence
  source 1..621: mol_type = other DNA
atgctgccccccgccatccacttctacctgctgcccctggcctgcattctgatgaaatcgtgtctcgcattcaaaaacgatgcgacagaaattctgtactcccatgttgtgaagcccgttcccgctcacccttctagcaactcaaccctaaatcaggcaagaaatggcggacgtcattttagcaatacgggtctggaccggaacacacgcgtacaagtagggtgcagggagctgagaagtacaaagtatatctcagacggacagtgcacttccattagtcccctgaaggaactggtgtgcgccggggagtgccttccactacctgtcctgccaaactggatcggaggcggctatggaaccaagtactggtctaggaggtcctcgcaggaatggcgatgtgtaaatgacaagacccggactcagaggattcagttgcagtgtcaggacggctccactaggacgtacaagataaccgtggtcaccgcatgcaagtgtaaacgctacactcggcaacacaacgaatcttcacataatttcgagtctatgagtcccgccaaacctgtgcagcaccacagggaaaggaagcgcgcgagtaaaagtagtaaacactccatgtcctag

SEQ ID NO: 26260 - DNA, 693 bp, synthetic construct
  misc_feature 1..693: note = Description of Artificial Sequence: Synthetic coding sequence
  source 1..693: mol_type = other DNA
atgctgccccccgccatccacttctacctgctgcccctggcctgcattctaatgaagagctgtctggcgtttaaaaatgatgcaacggagatcctctatagccacgtcgttaagcccgttcctgcccatccatcttctaacagcaccctcaaccaggcccggaatggagggaggcactttagcaataccggcctggaccgcaatcggaccgaaagcctgactaggcaaaattatttttggttgttcccaggcgctttcctcagacagctgcaggaggccagagtacaagtaggatgtcgagagttgcgcagcaccaagtatatctcggatggacagtgtaccagcatcagtcctttgaaggagctcgtgtgtgccggggagtgcctgcctctgcctgttttgcccaactggatcggtggtggttatgggacaaagtactggagcagacggagtagccaggaatggcgttgtgtcaatgacaaaactagaacgcaaaggatacagctacaatgtcaggacggcagtaccaggacatacaaaatcaccgttgtgacagcttgtaagtgcaaaaggtatacacggcagcataacgagagtagtcataactttgagtctatgtccccagctaagcctgtccagcaccatcgcgagcgtaaaagggcatctaagagtagcaaacattcgatgagctag

SEQ ID NO: 26261 - DNA, 2229 bp, synthetic construct
  misc_feature 1..2229: note = Description of Artificial Sequence: Synthetic coding sequence
  source 1..2229: mol_type = other DNA
atgggcagcgagaacagcgccctgaagagctacaccctgcgggagccgcctttcaccctacccagcggtctggccgtctatcccgctgttctgcaggacggcaagttcgcctctgttttcgtgtacaagcgcgaaaatgaggataaggtcaataaagcggccaagcatctgaaaacgttgcgacacccctgcctcctgagattcctgagctgcaccgtcgaggcggatggcatccatctggtaacggaaagggttcaacccctggaggtggcactagagactctctcaagtgctgaggtgtgtgcagggatctacgacattctcttagccctgatctttctgcacgatcgaggccatctgacgcacaataacgtatgcctcagctctgtcttcgtcagtgaagatggccactggaagctgggcggaatggagaccgtgtgtaaggtgtctcaggcaacgcccgagttccttcgctctatccagtctattcgggatccggcctctatcccccctgaagagatgagcccagagttcacgacgctgcctgagtgtcatgggcacgcgcgcgacgccttctccttcgggacgctcgtcgaaagcctcctgacaatccttaacgaacaagtttctgcggacgtgctttctagtttccaacagactttgcattctaccctcctgaatcccatcccgaaatgccgacctgccctttgcacccttctgtcccatgacttcttccgcaacgatttcctggaggtggtgaacttcctgaagtcattgacactgaaaagtgaggaggaaaaaaccgagttttttaagttcctgctggatcgggtatcttgtctttctgaagaactgattgcgtcccggctggttcccctcttgttgaaccaattagtctttgccgagcctgtggccgtgaagagttttttgccttacctgctcggccctaagaaggaccacgctcaaggcgagacaccctgtctgctgagccccgccctatttcagtcaagagtgattccagtcttacttcagctgttcgaagtccacgaagaacatgttcgcatggtcctcctctctcacatcgaagcctatgtcgaacatttcacccaggagcaactcaagaaggttatcttgccccaggttcttctgggactgagggacaccagcgactccatcgtggcaatcaccctgcatagcctagctgttctggtttcattgttaggaccagaggtggttgtggggggggagcggaccaagatcttcaagcggaccgcaccctcctttactaagaatactgatttgtcattggaggactccccaatgtgtgtcgtgtgcagtcaccattcccagatcagtccgatactcgagaacccattttctagcatctttcccaagtgcttctttagcggttctacacccatcaacagcaaaaaacacatccagagggactactataatactttactgcagacgggagaccctttctcccagcccatcaagtttcctatcaatggactctccgatgttaaaaacacctcagaagacagcgaaaactttccatcctcctctaaaaaaagcgaggaatggcctgactggtccgagccggaagaacctgaaaaccagactgtgaatattcagatttggccgagagaaccatgcgatgacgtgaaatcccagtgtacaacattggatgtagaggaaagctcctgggacgactgtgaaccttccagtttggacacgaaggtcaaccctggcggcgggatcactgccacaaagcctgtcaccagtggagaacagaagccgatacctgcactcctaagcttaacggaagaatcaatgccctggaaatcgtccctgccgcagaaaatttcgctggttcagcgtggcgatgatgcagatcaaattgagccgcccaaagtaagctcgcaggagcgccctctgaaggtgccaagtgagcttggactgggtgaagagttcaccattcaggttaagaagaagcctgtcaaggaccccgagatggactggtttgccgacatgatccccgaaatcaagccaagcgctgccttcctgattcttcctgaattgaggaccgaaatggttccaaagaaggatgacgtttccccggtgatgcaattcagttccaaatttgctgctgccgaaatcactgagggtgaggccgaaggatgggaggaagagggcgaactgaattgggaagataataattggtag

SEQ ID NO: 26262 - DNA, 2067 bp, synthetic construct
  misc_feature 1..2067: note = Description of Artificial Sequence: Synthetic coding sequence
  source 1..2067: mol_type = other DNA
atgggcagcgagaacagcgccctgaagagctacaccctgcgggagcccccatttacgctccccagcgggctagctgtgtaccctgcagtgctgcaggatggaaaatttgccagtgtctttgtttataagcgggagaacgaagacaaggtcaacaaagcagcaaaacatttaaaaaccctgagacacccatgcctgttacgctttttgagctgtacagtggaagcagacgggattcacctggttacggaaagggtccaacccctcgaggtggcacttgagacactttcttctgcagaagtttgcgccggaatttacgatatccttctagctctgatttttctgcatgaccgcgggcacctgacacataacaatgtgtgtttgtccagcgtgtttgtgagtgaagacgggcactggaagctgggagggatggaaactgtctgcaaggttagtcaggctacgcccgagtttttgagatctatccagagcatcagagacccagcgagtataccaccggaggaaatgagcccggagttcactacactacccgaatgtcatggacatgctagggacgcattctcctttggaaccctcgtcgaaagcttgttaactattctgaatgagcaggtatctgccgacgttctgtcctccttccagcaaactttgcactccactcttctgaatcctattcctaaatgtcgccctgccttgtgcactttattgagccacgattttttccggaatgacttcttagaagtggtgaacttcctcaagtctctgacactcaagtccgaagaggagaagacagaattctttaagtttcttctcgaccgtgtaagttgcttgagcgaggagctgatcgcttcaagattggtacctctgctgctgaaccagctggtgttcgcggagcccgttgcggtcaaatctttcctgccgtacttgctcggccccaaaaaagatcatgcccaaggagagactccttgtctgttgagccccgccctcttccagtcacgggtgattcccgttcttctgcagctgtttgaggttcacgaagagcacgtacgcatggtgttgctgagtcacatcgaagcctatgtggagcacttcactcaagaacagctcaaaaaagtcatcctgcctcaggtgcttcttgggctgcgcgatacaagtgactctattgtggcaattacactccacagcctagctgtgttagtgtccctgctgggccctgaagtggtcgtgggaggcgaaagaaccaagatctttaagaggactgccccctccttcacaaagaacaccgacctgagcctggaaggcgacccctttagccaacctatcaagtttcccatcaacggtctgtctgatgtcaagaatacaagtgaggacagcgaaaacttcccatcgtcatccaagaagtctgaggagtggccagattggagcgagcctgaggaacccgagaaccagacagttaacatccagatatggccgagggaaccctgcgatgatgtgaaatcacagtgtaccacactggacgtggaagagagtagttgggacgactgcgagccttcatcccttgatacaaaggtaaacccaggaggagggatcactgccactaagcccgtcacctctggggagcaaaaacccatcccggctctcctgagtctaacggaggagagtatgccttggaaatcaagtctccctcaaaagattagcctggtgcagcggggcgacgacgcagaccagatcgagccccccaaagtttctagtcaggaacgcccactcaaagtgcctagcgagctcggccttggagaggagtttacaatacaggttaagaagaagcctgtcaaggatccggagatggattggttcgccgacatgatccctgaaatcaaaccaagtgccgcgttcctcatcttgcccgaactcaggacggaaatggtgcccaagaaggatgacgtgagtcccgtgatgcagttctcctcaaaatttgccgccgcagaaatcaccgagggggaggcagagggctgggaggaagaaggggaattgaactgggaagacaacaattggtag

SEQ ID NO: 26263 - DNA, 2229 bp, synthetic construct
  misc_feature 1..2229: note = Description of Artificial Sequence: Synthetic coding sequence
  source 1..2229: mol_type = other DNA
atgggcagcgagaacagcgccctgaagagctacaccctgcgggagcctcctttcaccctccccagtgggttggccgtgtatcctgcggttttgcaggacggcaaatttgcctctgtctttgtgtataagagggagaatgaagataaggtgaataaggcagccaagcatcttaaaacgctgaggcatccctgtttattgcgtttcctttcctgcactgtcgaagcagatggtattcatctggtgactgaacgggtgcaacccctggaggtagctctggagaccctaagtagcgctgaagtgtgcgctgggatctatgatattctgctggccttgatctttttgcacgacagaggtcacctcacacacaacaatgtgtgcctctctagtgtcttcgtgtctgaggacggtcactggaaactcggaggcatggaaacagtgtgtaaagtgtcacaggctactcccgaattcctgaggagtattcagtcaattcgcgatcccgcttcgattccacctgaggaaatgtcccctgagttcacgaccctgcccgaatgtcacggacacgccagggatgcatttagttttggcacattggttgaatccttgttgactatcctgaacgaacaggtgtccgcagacgtgcttagcagtttccaacaaactctacattctacactccttaacccaattccaaaatgccggccggcgctctgtaccttactgtcgcacgatttttttcgcaacgatttcttagaagttgtcaacttcctgaaatccctgacgttgaagtccgaagaagagaaaaccgagttcttcaaatttctgctggatcgagttagctgccttagtgaagagctcatcgcttctcggctggtgcccctcctgctcaatcagcttgtgttcgccgaaccagtagcagtgaaatcttttctgccgtatctactcggccctaaaaaggaccacgcgcagggggagacgccctgtctgttgagcccagccctatttcagtcacgtgtgatccctgtactcctgcagctgttcgaggttcacgaagaacatgtacggatggtattgctttcacacattgaggcttatgtcgaacattttactcaggaacaactcaaaaaggtcatcctgccccaagtcctgctcggcctccgcgacacatcagacagcatcgttgccatcaccttgcactctttagccgttttggttagcttgcttggacctgaggtagtggtgggcggcgaacgcacaaaaattttcaagcggaccgcacctagcttcaccaaaaacaccgatttatcccttgaagattcgcctatgtgtgtggtctgtagccaccattcccaaatttctccgatcttggaaaacccgtttagcagtatattccccaaatgtttttttagtggaagtacacccatcaactccaagaagcatatccaaagagactattataacaccctgctgcagacaggagacccgttcagtcaaccaataaagttccctatcaacggtctttccgatgtgaaaaatactagcgaagattccgagaacttccccagctcctcgaagaagagcgaggaatggccagactggtcggaaccagaggaacctgaaaaccagaccgtgaatatccagatttggcccagggaaccttgcgatgatgttaaatcccagtgtaccactctagacgtagaggagtcctcctgggatgactgcgagccctccagcttagacacgaaagttaatcccggaggcggaatcacggcgacgaaaccggtcacttctggagaacaaaaacctattcccgctctcctcagtctcaccgaagagagtatgccttggaagagctcgctgcctcagaagataagtctggtgcagagaggggatgacgctgatcagatcgaaccgcctaaggtgtcatcacaggagaggcccttgaaggtccctagcgaacttgggctgggtgaggaattcaccatacaagtgaagaagaagccggtcaaagacccagaaatggactggttcgccgatatgatccccgaaatcaagccaagtgcggcttttcttatcctgccagagctaaggactgagatggtacctaagaaagatgacgtaagcccggtgatgcaattttccagcaagttcgcagctgccgagattaccgaaggagaggccgaaggatgggaggaggaaggcgagctcaattgggaggataacaactggtag

SEQ ID NO: 26264 - DNA, 1767 bp, synthetic construct
  misc_feature 1..1767: note = Description of Artificial Sequence: Synthetic coding sequence
  source 1..1767: mol_type = other DNA
atgggcagcgagaacagcgccctgaagagctacaccctgcgggagccgccattcaccctgcctagcggtctcgctgtgtatcctgccgtcttacaagacggaaagtttgcctcagtatttgtttataaaagggagaatgaggacaaagttaacaaagcagcaaagcacctaaaaacactgcgccacccgtgcctcctgcggtttctctcctgcacggtcgaggccgatggcatacatctggtaaccgagcgcgtgcagcctcttgaagtggctttggagactttatcatctgcggaagtgtgcgctgggatctacgatatacttctggctctcatatttcttcacgatagaggccatttaacgcacaataacgtttgcctgtccagtgtgtttgtctcggaggacgggcattggaaattgggcggtatggagaccgtgtgcaaggtgagccaggccacccccgaattcctgcggagtattcagagcatccgagatccggccagtatccctcctgaggaaatgtcacctgaattcactacactgcctgagtgccacggccacgcaagagacgcgttctctttcggaacgctggtggagtccctgctgactatcctaaacgagcaagtctccgctgacgtgttgagctcttttcagcagaccttgcattcaactctgctaaatccgattccaaaatgtaggcctgccctctgcacactgctgtctcacgattttttccgtaacgatttcctagaagttgtgaattttctgaagagtctaactctgaagtcagaggaggaaaaaaccgagtttttcaagttcctgctagatagagtgagttgtctatctgaagagcttatcgcctcaagactggtgcctctcctattgaaccaactggtctttgccgagcccgtggctgttaagtcttttctgccgtacctcttggggcctaagaaagatcacgcccaaggtgagacaccctgtctgctgtctccagccctgtttcagtctcgggtaattcccgtgctcctgcagttgtttgaagtgcatgaagagcatgttcggatggttctgctgtcacacatcgaggcctatgtggaacacttcacacaagaacagttaaagaaggttatcctgccacaagttctgctgggcttgcgggatacctcggactcgattgttgccataaccctacacagtcttgcagtcctagtttccctcctgggtcccgaggtcgttgtgggtggcgaaagaacaaaaatctttaaacggaccgccccatccttcactaagaatacagatctgtcattggaaggcgacccattctctcaacctattaaattccccattaacggcctgagcgacgtaaagaacacttccgaggactcggaaaatttccctagttcctccaagaagagcgaagagtggccagactggtcagaaccagaagaaccagagaatcagaccgttaacatacagatctggccaagagagccatgcgatgacgtgaagtctcagtgcaccacgctcgatgtcgaggagtcctcttgggacgactgcgaacctagcagcttagacaccaaggtgaaccccggtggtggcattactgccacaaagccagtgacctccggcgaacaaaagcccatccccgcgctcttgtcacttaccgaagagtcaatgccctggaaaagctcccttccacagaagatctccctggtgcagcgcggagacgatgcagatcagatcgagccacctaaagtgtctagctag

SEQ ID NO: 26265 - DNA, 1008 bp, synthetic construct
  misc_feature 1..1008: note = Description of Artificial Sequence: Synthetic coding sequence
  source 1..1008: mol_type = other DNA
atgaagctgcccgcccgggtgttcttcaccctgggcagccggctgccgtgcgggctggcacctagaaggtttttttcttacgggacgaaaatcctgtaccaaaacaccgaagccctgcaatctaagttcttctcccctctccagaaggccatgctgccaccgaactcttttcagggcaaagtggcattcatcactggaggcgggactggccttggcaagggcatgaccactctgctctcttctctgggggctcagtgtgtgatcgcctcacgcaaaatggatgttctaaaggccaccgctgaacaaatttcatcccaaacaggaaacaaggtgcatgctatccagtgcgatgtgcgcgaccccgatatggtgcagaacaccgtgagcgagctgatcaaagtggctggacatccaaacattgtcatcaacaacgctgccggtaatttcatcagtcctaccgagcgtctgtctcctaatgcttggaaaaccattacggatattgtgttgaatggcaccgcctttgtaactcttgagattggcaagcagctcattaaggctcagaaaggtgctgctttcctgtcgatcacgactatctacgccgagaccgggagtggctttgttgtgccttctgcatccgctaaggcaggggtcgaggccatgtccaagagtctggccgccgagtggggcaaatacggcatgcgattcaatgtcattcagccgggaccgattaaaaccaagggggcgttctcccgcttggatcctacgggaacattcgaaaaggagatgattggcaggattccctgtgggcgcctcgggacagtggaagagttagctaacctggctgccttcctctgctccgactatgcatcttggataaacggagcggtgatcaaattcgatggaggggaggaagttctgatctctggggaatttaatgacttgagaaaagtgactaaagaacaatgggacacgattgaggaattgatccgtaagaccaaaggcagttag

SEQ ID NO: 26266 - DNA, 945 bp, synthetic construct
  misc_feature 1..945: note = Description of Artificial Sequence: Synthetic coding sequence
  source 1..945: mol_type = other DNA
atgggcatcggccggagcgagggcggccggcggggcgccgccctgggggtgcttctcgccctaggggccgctctcctcgctgttggctccgccagtgaatatgattacgtttcttttcaatcagatattggcccttaccagagtggtagattttataccaaaccaccacagtgtgttgacatccccgcagacctgaggttatgccacaatgtcgggtataaaaagatggttcttcccaacttactagagcacgagacaatggcagaggtaaagcaacaggcctctagctgggtacctctgttaaacaagaactgccacgccggaacccaggtgttcctgtgctccctgtttgcaccagtctgtctggacagaccaatttatccctgcagatggttatgcgaagctgtgcgcgactcctgtgagcccgtgatgcaatttttcggattctactggcctgagatgttgaaatgcgacaaatttcccgaaggcgatgtatgtatagcaatgacccctcctaatgcaacggaagcatcaaagcctcaggggaccacagtttgccctccctgtgataacgagttgaagagcgaagccatcatcgagcacctctgtgctagcgagttcgcacttagaatgaagatcaaagaagtaaagaaagaaaatggtgataagaaaattgtgcccaaaaaaaagaaacctctgaaactgggtcccatcaagaaaaaagatttgaaaaagcttgttctgtacttgaaaaacggcgctgactgcccatgccatcaactcgataacttatctcaccattttctcatcatgggtcgcaaggtgaagtctcagtacctgctgacggccatccacaagtgggacaagaagaacaaggagttcaagaatttcatgaagaagatgaagaatcacgaatgccccacttttcagagcgtgttcaagtag

SEQ ID NO: 26267 - DNA, 1041 bp, synthetic construct
  misc_feature 1..1041: note = Description of Artificial Sequence: Synthetic coding sequence
  source 1..1041: mol_type = other DNA
atgttcctgagcatcctggtggccctgtgcctgtggctgcacctggccctcggagtgcgaggtgcgccctgtgaggcagtcagaataccaatgtgcaggcacatgccctggaatatcacccggatgcctaaccacttacaccacagtactcaggaaaacgccatcctggcaatcgagcaatatgaggaacttgtagacgtgaactgtagtgcagtcttgcgattttttttatgcgccatgtatgcaccaatatgtactctggaatttttgcacgatccaattaagccatgcaagagtgtgtgccaaagagccagggatgattgtgaaccactgatgaaaatgtataaccacagctggcccgaaagcttggcgtgcgacgagctgcccgtgtatgaccgcggcgtgtgtatttcaccggaggccatagtgactgacctgccagaagatgtgaagtggattgacataacccctgacatgatggtgcaggagagacccctggatgttgactgcaaacggctctcacccgaccggtgcaaatgtaagaaagttaagccaacattagcaacctacctatccaagaactatagttatgtcatccacgctaaaatcaaggccgtgcagcgaagcgggtgcaacgaagtgaccaccgtagtagacgtcaaggaaatcttcaagtccagcagcccaatcccccgcacacaggtgccgctgattaccaactcttcctgtcagtgcccacacatcctgcctcatcaggacgtgctgatcatgtgttacgagtggcgctcccgcatgatgctgctcgagaattgcctggtggagaagtggagagaccagctgtccaagcgctccatccagtgggaggagcgtttgcaggagcagcgtagaacagtacaggacaaaaagaaaaccgctggccggacttctagaagcaatccaccaaaacctaagggaaagcctcccgcacccaaaccagcgagcccaaagaagaacataaaaacgcggtccgctcaaaagcgcacaaaccccaagcgggtgtag

SEQ ID NO: 26268 - DNA, 1032 bp, synthetic construct
  misc_feature 1..1032: note = Description of Artificial Sequence: Synthetic coding sequence
  source 1..1032: mol_type = other DNA
atgcgggtggccggccgggagggccggttcctgagcgccggcgtggcagccagggagggaagtgcaatgtttctctcaattctggtggccctgtgcctgtggcttcacttggccctgggcgttcggggggccccctgtgaggctgtgcggatcccgatgtgcagacatatgccatggaatatcacgcggatgcccaaccatctccatcactccacccaggaaaatgcaatgtacgccccaatctgtacactggagttcctgcatgaccccataaagccttgtaaaagtgtctgtcaaagagcacgggatgactgcgagcccttaatgaagatgtataaccatagttggcctgagagccttgcctgtgacgaactgccagtctatgaccgcggtgtttgcatctcaccggaggccatcgtgacagacctccctgaggatgtgaagtggatagatattacgccagacatgatggtgcaggagagaccattagatgtggactgcaagcgactctctccggatcggtgtaaatgtaagaaggtgaaacccaccctggctacatatctctcgaagaattattcatacgtgatccatgctaagatcaaggccgtgcagcggtccggctgcaacgaggtcactactgttgtcgacgtgaaagagatctttaaatctagttcacccatacctcggactcaggtcccccttatcaccaatagttcctgccagtgtccgcacattctcccccaccaagatgtcttgatcatgtgctacgaatggcgctcacgcatgatgctgttagagaactgcctagtcgaaaagtggagggatcagttaagtaagcggtctatacaatgggaggagaggctgcaggagcagcgccgaaccgtacaggataagaagaagaccgctgggaggacttcccggtcgaacccacccaaacccaaaggaaaaccccccgcccccaaacccgccagtcctaagaagaacattaaaactaggagcgcccaaaagcgtaccaaccctaaacgtgtgtag

SEQ ID NO: 26269 - DNA, 954 bp, synthetic construct
  misc_feature 1..954: note = Description of Artificial Sequence: Synthetic coding sequence
  source 1..954: mol_type = other DNA
atgcgggccgccgccgccggcggcggcgtgcggaccgccgccctggcattactccttggtgccctccactgggctcccgcaagatgcgaagagtacgactactatgggtggcaggcggagccgctgcatggaagatcctattcgaagccgccccagtgtctagacatcccagcggatctgcccctgtgccacaccgttggctataaacgaatgagactgccaaatctactagagcacgagagtctggccgaagtaaagcaacaggcctcttcttggcttccactgctagccaagaggtgccacagcgacacacaggtattcttgtgctccctctttgctcctgtatgtttggacaggcctatctatccctgcaggtctctctgtgaagcggtgagggccggatgcgctcctttaatggaagcttacggctttccatggccagagatgttgcactgtcacaaattcccacttgataacgacctctgcattgccgtccagttcggacacctaccagctactgctcccccagtcacgaaaatctgtgcccaatgtgaaatggagcacagcgccgacgggttgatggagcagatgtgctcctccgacttcgttgttaagatgagaattaaggagatcaagattgaaaacggagaccgtaaactgattggggcccagaagaaaaagaagttgctgaagccggggcctctaaaacggaaagacacaaagcggctggtgctgcacatgaagaacggagcaggatgtccatgtccccagcttgactcccttgcggggagtttcctggtgatgggccgtaaagtggacggtcagcttctcttgatggctgtctatcgatgggataagaagaacaaagaaatgaagttcgccgtgaaattcatgttctcttatccctgttccctgtactaccctttcttttacggcgcggctgagcctcactag

SEQ ID NO: 26270 - DNA, 903 bp, synthetic construct
  misc_feature 1..903: note = Description of Artificial Sequence: Synthetic coding sequence
  source 1..903: mol_type = other DNA
atgcggatcgccgtgatctgcttctgcctgctgggcatcacctgcgcgatccccgtgaaacaggcggactcaggttccagtgaggaaaagcagctgtacaataaatatccagatgcagtcgctacatggctgaatccagaccctagccaaaagcaaaatctgcttgcaccccaaactctgccctctaagtccaatgagagccatgaccacatggatgatatggacgacgaagatgatgacgatcatgtcgattcccaggacagcattgactctaatgattccgacgacgtggatgataccgatgactcacaccagtcggatgaatctcatcactctgatgaaagtgatgaattagtcacagatttccccacagaccttcctgcaacagaggtcttcaccccagtagtgcccactgttgatacgtacgatgggaggggtgattcggtggtgtatggcctgaggagcaaatccaaaaagttccgccggcctgacattcagtaccccgacgctactgatgaggatattacttcgcacatggaatctgaggaactgaatggagcgtacaaggctataccagtggcccaggatctcaatgcccctagcgactgggatagcagaggcaaagatagttacgagacgtctcagcttgatgatcagtcagcagagactcactcccacaagcagtcccgcctgtataagcggaaggcaaatgacgagtccaacgagcacagcgacgttattgactcacaggagctgtctaaggtctccagggaatttcactcccacgaattccactcacacgaggacatgttagtggtcgacccaaagtcgaaggaggaagacaagcatctgaagtttcgaatcagtcatgagttggattcagcaagctctgaggtgaactag

SEQ ID NO: 26271 - DNA, 879 bp, synthetic construct
  misc_feature 1..879: note = Description of Artificial Sequence: Synthetic coding sequence
  source 1..879: mol_type = other DNA
atgcggatcgccgtgatctgcttctgcctgctgggcatcacctgcgccatccccgttaaacaggccgattccggcagtagtgaagaaaaacagctgtacaataagtatcccgacgcagtggcaacatggctaaatcccgatccctcacaaaaacagaacctccttgcaccccagaatgcggtttcatcagaagagaccaatgattttaagcaggagaccttaccaagcaaatctaacgaatcacatgaccacatggacgacatggacgatgaggacgatgacgatcatcagtccgacgagtcccatcactcagatgagtccgacgagctggtgaccgatttcccaacagatctcccagccacagaggttttcaccccggtggtccccactgttgatacatacgatggccgaggagactctgtggtctatggccttagatctaagagcaagaagttccgacggcccgacatccagtaccccgatgcaaccgacgaggatatcacctcccacatggagtcagaggaactcaatggcgcatacaaggcgattccagtggctcaggatttgaacgcgccaagtgattgggacagtcgagggaaagacagctacgaaacatcccaacttgatgatcagagcgcggaaacgcatagccataaacaatccagactgtataaaaggaaggccaacgatgagagcaacgaacacagtgacgtgatcgattcccaggagctgtctaaagtgagccgggagtttcactcccacgaatttcattcccacgaggacatgttagttgtcgacccaaagtctaaagaggaggataaacatctgaaattcagaatctcgcatgaattggattcagcttcatccgaggtcaactag

SEQ ID NO: 26272 - DNA, 864 bp, synthetic construct
  misc_feature 1..864: note = Description of Artificial Sequence: Synthetic coding sequence
  source 1..864: mol_type = other DNA
atgcggatcgccgtgatctgcttctgcctgctgggcatcacctgcgcaataccagtcaaacaggcagactctggcagcagcgaagaaaagcagaatgcggtgtcatccgaagaaacaaacgatttcaaacaggaaacacttccttctaaatcgaacgagagccacgaccacatggacgacatggatgatgaggatgacgacgatcacgtggatagccaggatagcattgactcaaatgatagcgatgatgtcgatgatactgatgactcgcaccagtcagacgagagccaccactctgacgaaagtgacgagttggttactgatttcccgactgatttaccagcaactgaagtcttcacccctgttgtgcccaccgtggatacctatgacgggcgcggtgactctgtcgtgtacggcctaagatccaaatccaaaaagttcagaagaccggacattcagtacccggacgccacagatgaggatataacgtctcacatggagagcgaagaactgaacggcgcctacaaagccattcccgtggctcaggatctaaacgctcctagcgattgggactctaggggcaaggactcttacgagacgtcacaattggacgatcagtccgccgagactcattcacacaagcagagcaggctgtataagagaaaagccaatgatgagagcaatgagcattcagacgttatcgatagccaagaactctctaaagtaagtcgcgagtttcattcccatgaattccactcacatgaggatatgctggtcgtggatcctaaaagcaaggaggaagacaagcatttgaagttccggatcagccacgaactggacagcgcgagtagcgaagtcaactag

SEQ ID NO: 26273 - DNA, 945 bp, synthetic construct
  misc_feature 1..945: note = Description of Artificial Sequence: Synthetic coding sequence
  source 1..945: mol_type = other DNA
atgcggatcgccgtgatctgcttctgcctgctgggcatcacctgcgccatcccagtcaagcaggccgactccgggagttcagaagagaaacagctgtataataagtaccccgacgctgtggcaacatggctgaatcccgacccttcacaaaaacagaatctgttagcaccccaaaatgctgtatctagcgaagagacaaacgacttcaaacaggagactctgccaagcaagagcaacgagtcacatgaccatatggatgatatggacgacgaggacgacgacgatcacgtggacagccaagactctattgactccaacgatagtgacgatgttgatgataccgatgacagtcaccagagcgatgaatcccatcattctgacgagtccgacgaacttgtgaccgactttcccaccgatcttccggcaaccgaggtctttacaccggtcgtacctacagtggacacctacgacgggagaggagattctgtggtgtacgggctgcgatctaaatctaagaagtttcgccgaccagacattcagtaccctgacgccacagatgaggacatcacctcccacatggagtccgaagaacttaatggtgcctataaagccatacccgtagcccaggaccttaatgcaccaagtgactgggacagccggggcaaggacagttacgaaacgagtcagcttgacgaccagagtgcggaaacccatagtcacaagcagtctcgattgtataagcggaaagcgaatgacgaatctaacgagcacagtgacgtgattgatagccaggagctttccaaggtcagccgggagttccacagccacgaatttcattcccatgaagatatgttggtggttgacccaaagtcaaaggaagaagataagcacctcaagttcagaatctctcatgagcttgatagtgccagcagtgaggttaactag

SEQ ID NO: 26274 - DNA, 822 bp, synthetic construct
  misc_feature 1..822: note = Description of Artificial Sequence: Synthetic coding sequence
  source 1..822: mol_type = other DNA
atgcggatcgccgtgatctgcttctgcctgctgggcatcacctgcgccatacccgtgaaacaggctgactccggcagctctgaagaaaaacagaccttgccttcaaagtctaatgagtcccatgaccacatggacgatatggacgatgaagatgacgatgatcacgtcgattcccaagactcgatcgatagtaatgacagcgacgatgtggatgatactgacgacagccatcagagcgacgaatcacatcactcagacgagtcagatgagctggttacagactttccaaccgacctgcctgccaccgaagtgttcacacctgtagtccctaccgtcgatacctatgatggccggggagactctgtggtctatggcctgaggtcgaagagtaagaagttccggcgacctgacatacaatacccagatgcaaccgacgaggacataacgtcgcacatggagagtgaggaactgaacggagcctataaagcaattccagttgctcaggacctaaacgccccatccgactgggacagcagaggcaaagatagctatgaaacctcccagttagatgatcagagcgccgaaactcattcacacaagcagtctcgcctgtataaacggaaagctaatgacgaatcaaatgagcacagcgacgtgatcgattcccaggaattgagcaaggtctccagggaattccacagtcatgagtttcattcccacgaagatatgctggtggttgatcccaagtccaaagaagaagacaagcatttgaagtttcgtatttcccacgagctggatagcgcaagcagtgaagtcaattag

SEQ ID NO: 26275 - DNA, 2370 bp, synthetic construct
  misc_feature 1..2370: note = Description of Artificial Sequence: Synthetic coding sequence
  source 1..2370: mol_type = other DNA
atgcggacctaccactacatccccctgttcatctggacctacatgttccacacagttgacacgattttactccaagagaaacccaacagctacctgagctctaaaaagattgcaggtctgaccaaggacgacgggaagatgcttcgtagaacaaagcggggttggatgtggaatcaatttttcctgttggaggagtacaccgggacggacacccagtacgtagggaagctccatacagaccaggacaagggggacgggaatctgaaatacattttaacgggagatggagcaggcagcctgttcgtaattgatgaaaatactggcgatatccacgctgctaaaaaactggacagggaggaaaagtccctctacatactacgcgccaaagcaatcgataggaaaaccgggcgacaagttgaacccgaaagtgagtttataatcaaaattcacgacataaacgataacgagccgaaattcaccaaggacctgtatacagcttccgtcccagaaatgtccggcgtaggaacgtccgtgatccaagtaaccgcaacagatgccgatgatgcgaattacggaaattctgccaaggtcgtttattctattctgcagggacagccttacttctccgtggaccctgaatctggcatcattaaaaccgccttgccagatatgagccgcgagaaccgggagcagtaccaggtcgtcatccaggctaaagatatgggaggacaaatgggcggactttctggcacaaccaccgtcaatattacacttacagatgtaaacaataaccctccccgatttcctcagtcgacgtatcaattcaactcacccgaaagcgttccactgggtacacatctgggaagaataaaggcaaacgatcctgacgtgggcgaaaacgccgagatggagtactctattgcggagggtgatggcgccgacatgtttgacgttatcaccgacaaggatactcaagagggaattataacggtgaagcagaacttggactttgaaaatcagatgctctacacactgcgtgtagacgcttccaatactcaccccgaccctcggttcctccacctggggcccttcaaagacactgctgtcgtgaaaatcagtgtagaagatattgacgagcctccagttttcacaaaagtgagttaccttatagaggttgacgaggacgtgaaagaaggttccatcatcggccaggttacagcatatgacccagatgctcggaataacctcattaaatattctgtagaccggcacacggacatggatcgtatctttggcattcattccgagaacgggagcatttttaccctgaaggcattagatagggaaagttctccttggcataatatcaccgtgactgcaacagaaatcaataaccctaagcagagctctcatatcccggttttcatccgcattctggacatcaacgaccatgcccccgaatttgccatgtattatgaaacatttgtttgcgaaaacgcaaagcccggtcaattgatccagacagtgagtgtgatggacaaggacgaccctcctaggggtcacaaattctttttcgagcccgtccccgagttcacgctgaatccaaactttacaattgtggataacaaagacaacacggctggaattatgactagaaaggacggctattctaggaacaaaatgtccacctacctgttacccattctgatcttcgataatgattatccgatccagtcaagcacgggtacactaaccatccgcgtgtgcgcttgcgacaatcagggaaacatgcagtcatgcaccgctgaggcccttatcctgagtgctggactcagcaccggcgcccttgttgcaatcctgctgtgcgtactgatcctactcattctcgtagtgctctttgctgcactgaagcgccagcgcaagaaagagccgcttatcatctctaaggatgatgtgagagacaacatcgtcacttataacgacgaggggggaggcgaggaggatacacaagccttcgatattgggacacttaggaacccagaagcaagggaggactccaagctgcgccgggacgtcatgccagagaccatcttccagatacgccggaccgtgccactttgggagaacatagatgtacaggatttcattcacaggcggttgaaggaaaatgacgcggaccctagcgcccccccgtatgactcactcgccacttatgcttacgaagggaacgacagcattgcggattcgctttccagcctcgagagtttgacagcggattgcaatcaagactatgattatctctccgattggggcccccgatttaagaagctcgccgacatgtacggcggagacgatagcgatcgagactag

SEQ ID NO: 26276 - DNA, 162 bp, synthetic construct
  misc_feature 1..162: note = Description of Artificial Sequence: Synthetic coding sequence
  source 1..162: mol_type = other DNA
atgcgggcctggatcttcttcctgctgtgcctggccggccgggccctcgctgctccccagcaagaggctctcccagacgaaacagaggtcgtggaggagacagtggcagaagtcacagaggtgtccgtgggcgcgaatccagtgcaagtcgaggtgggatag

SEQ ID NO: 26277 - DNA, 336 bp, synthetic construct
  misc_feature 1..336: note = Description of Artificial Sequence: Synthetic coding sequence
  source 1..336: mol_type = other DNA
atgcgggcctggatcttcttcctgctgtgcctggccggccgggccctggcagcaccccagcaggaggccctcccggatgaaactgaagtcgtggaggagacggtggcagaggtgactgaggtcagcgttggtgccaacccggtgcaagtagaagttggggaattcgacgacggcgctgaggagaccgaagaagaggtggttgccgaaaatccgtgccagaatcaccactgtaaacacggcaaggtctgtgagctcgatgaaaacaacacccccatgtgcgtgtgccaggatcctacaagttgtccagctcccatcggcgaatttgagaaagtgtag

SEQ ID NO: 26278 - DNA, 276 bp, synthetic construct
  misc_feature 1..276: note = Description of Artificial Sequence: Synthetic coding sequence
  source 1..276: mol_type = other DNA
atgaagctggccgtgaccctgaccctggtgaccctggccctgtgctgtagcagcgcaagcgcagagatatgcccttcctttcagagggtgatcgaaactctgcttatggatactccatcctcatacgaggctgccatggagctgttctctcctgatcaggacatgagggaggccggcgcacaattgaaaaagctggtcgatactcttccccagaagcccagagagagcataatcaaactgatggaaaaaatcgctcaatctagtctttgcaactag

SEQ ID NO: 26279 - DNA, 1380 bp, synthetic construct
  misc_feature 1..1380: note = Description of Artificial Sequence: Synthetic coding sequence
  source 1..1380: mol_type = other DNA
atgatcaagcggttcctggaggacaccaccgacgacggcgagctgtccaaatttgttaaggattttagcggcaatgcgtcctgtcaccccccagaagccaagacttgggcctcccgaccacaagtacctgaaccccgtccccaggcgccagacctgtatgatgacgatttggaattccggcccccatctcggccacaaagctctgacaatcagcagtatttttgcgccccagccccactctcacccagcgcgagacccagatctccgtgggggaagctagacccatatgacagctcggaggacgataaggaatacgtagggtttgcgacattgccaaatcaggtacaccgcaaatccgtaaagaagggttttgacttcacattgatggtcgccggcgagagcggtctggggaaatcgaccctggtcaattccctttttctgacggacctatacagagacagaaagttgctcggggccgaggaacggattatgcagacagttgagatcacaaagcacgccgtggacatcgaggaaaaaggcgtgcgtctgcggctgaccatcgtggatacccctggctttggtgacgccgtgaacaacaccgagtgctggaaaccagtcgctgaatacatagaccagcagttcgagcaatattttagagacgaaagcggactgaatcgaaaaaacattcaggacaaccgggtacactgctgcctgtatttcattagcccgtttggacacggcttgaggccactggacgttgagtttatgaaagcgctacaccaacgcgtaaacatcgtcccaatcttggcaaaggccgatacgttgacacctcctgaggttgatcataagaagagaaaaatcagagaggagatcgaacatttcgggatcaagatctaccaatttcctgattgcgattccgatgaagatgaagacttcaagctccaggatcaagcattaaaggaaagcattccatttgcagtcatcggctccaacacggtggtcgaggccagaggaagacgcgtgcgcggccgtctgtatccctggggcattgttgaagttgaaaacccaggacactgcgattttgtgaaactgcgtacaatgctcgtaaggacacacatgcaggatttgaaagacgtgaccagggaaacacattacgagaactaccgagcccagtgcatccaatccatgacccgattagttgtgaaagagcgcaatagaaacaagttaacccgtgagtccggcaccgacttccccatacccgcggttcccccgggcacggacccagagaccgaaaagctcatccgggagaaagacgaagaactgagacggatgcaggagatgctgcacaaaattcagaaacagatgaaggagaattattag

SEQ ID NO: 26280 - DNA, 1437 bp, synthetic construct
  misc_feature 1..1437: note = Description of Artificial Sequence: Synthetic coding sequence
  source 1..1437: mol_type = other DNA
atggaccggagcctgggctggcagggcaacagcgtgcccgaggacagaaccgaagctgggataaaacggtttctggaggatacaaccgacgacggcgagttgtcgaagtttgtcaaggacttcagcggcaatgcatcctgtcatccccctgaggcaaaaacctgggcctcgagacctcaagtgcccgaacctcgaccccaagcccctgacctatatgatgacgatctagaatttcgtccgccgagcagaccacaatcaagcgataatcagcagtacttttgtgctcctgctccactgtccccgtccgctcgcccgcgaagtccttggggtaaactcgacccctatgactcatcggaagatgacaaggaatacgtgggatttgcaacacttcctaaccaagtccaccgaaagtctgttaagaaaggctttgattttaccctcatggtggccggggaatccggcttgggcaagtcaacactcgtgaacagcctgttcctgaccgacctctacagggacagaaagctattaggcgctgaagaacggataatgcagactgtggaaattacaaagcatgccgttgacattgaagaaaagggtgtccggctgcgtctgaccattgttgataccccaggctttggcgacgcggtaaacaacactgagtgctggaagcctgttgcggaatatattgaccagcagtttgaacaatatttccgcgatgaaagtggcctgaaccgcaagaatattcaggataaccgcgtccactgctgcctgtactttattagtcccttcggtcacgggctcaggcccctagacgttgagttcatgaaggccttgcaccagcgggtgaacatagtgcccattctggccaaggccgataccctcacaccaccagaggtagaccacaagaagagaaaaatcagggaagagatagagcactttgggattaagatctatcagtttccggattgtgatagtgatgaggacgaggactttaaacttcaagaccaagctctgaaagagtctattccattcgcagtgattggctccaataccgtggtcgaggctcgaggccggagagttcgggggaggctgtacccttggggcatcgtcgaggtcgaaaatcctggacactgcgattttgtcaagttgaggacgatgctcgttcggacccacatgcaggacctgaaggatgtcaccagagaaacacactatgaaaattaccgggcccagtgcatacagtctatgacccgactggtggtgaaagagcggaatcgcaacaagctgacccgagagtcaggcaccgacttccctataccagctgtcccacctggcactgatccggaaaccgaaaaattgattcgcgagaaggacgaggagctgagaaggatgcaggagatgctgcataaaatccaaaagcagatgaaggagaactattag

SEQ ID NO: 26281 - DNA, 1380 bp, synthetic construct
  misc_feature 1..1380: note = Description of Artificial Sequence: Synthetic coding sequence
  source 1..1380: mol_type = other DNA
atgatcaagcggttcctggaggacaccaccgacgacggcgagctgagcaagttcgtaaaggatttctccgggaacgcatcatgtcaccccccggaagcaaaaacttgggcctcccgcccacaggtacccgaacctaggcctcaggctccagatctgtacgacgacgacctggagttcagacctcccagccgcccccagtctagcgacaaccagcagtatttttgcgcgcccgccccactctctcccagcgctcgacccagaagtccttggggcaaattggacccttatgactcttcagaagatgacaaggaatacgtaggtttcgctactttacctaatcaagtgcatagaaaaagtgtcaagaaaggattcgacttcacgctcatggtggctggcgagagtgggctggggaagagcactctggtgaatagtctgttcctcactgatttgtatcgcgacagaaaactcctgggagcagaggagaggattatgcagactgtcgaaataaccaagcatgccgtggacatcgaagagaagggggtcagactgcgactaacaatagttgacacacccggtttcggagacgcggtaaataatacagaatgctggaagcccgtggcagaatacattgaccagcagttcgaacagtatttccgcgatgagtcaggcctgaaccgcaagaacatccaggacaatcgcgtgcactgttgcctgtatttcatctctccatttggtcacggcctccggcccctggacgtagagttcatgaaagccctgcatcaacgcgtgaacattgtcccaatattggcgaaggctgatactctgacaccacctgaggtggaccacaagaaaagaaaaatcagggaagaaatcgaacactttggcattaaaatttaccagttcccggattgtgactccgatgaagacgaagatttcaaactccaagaccaagcacttaaagaaagtattccctttgccgtgatcggcagcaataccgtcgtagaagcacggggacgacgagttaggggtagactttacccttggggcatcgtggaggtggagaacccaggtcactgcgatttcgtcaaactgagaactatgcttgttcgcacgcacatgcaggatctcaaagacgtcacaagggagacacactacgaaaactatcgagcccagtgtattcagtccatgactcggcttgtggtgaaagagaggaacagaaataagctgacacgcgagtctggcaccgactttcctatcccagccgtgcctcccggcactgacccggagaccgagaaactgatcagggagaaggacgaggaactgaggagaatgcaagaaatgcttcataaaatccagaaacagatgaaggaaaattactag

SEQ ID NO: 26282 - DNA, 1413 bp, synthetic construct
  misc_feature 1..1413: note = Description of Artificial Sequence: Synthetic coding sequence
  source 1..1413: mol_type = other DNA
atgcccggcttctacagcgtgatgaccgacgaggagatcaagcggttcttagaagataccaccgacgatggggagctgtcaaaattcgtgaaagacttttcggggaacgcgagttgccaccccccggaggcaaaaacctgggcttcacgaccccaggtgcccgaacctagaccccaggcccccgatttgtatgatgatgatttagagtttagaccgccatcccgcccccaatcttctgataatcagcagtacttttgcgccccagcacctttatctccaagcgctcgcccccggtccccttggggaaaactcgatccttacgactcgagcgaagacgacaaagagtacgttggattcgcaaccctgccaaaccaggtacacagaaagtcagtcaagaagggattcgacttcacactcatggtagccggcgaaagtgggttaggaaagtccaccctagtgaacagtttattcctcaccgacctctaccgggaccgtaaactgctcggggccgaagaacgaatcatgcagacagttgagattacaaagcacgccgttgacattgaggagaagggagtgcggctgcgtcttaccattgtcgatacgcccggattcggagacgctgtgaacaatacagaatgttggaagccggtggcagaatatatcgatcagcaatttgaacagtacttcagggatgagtccggacttaaccgcaagaacatacaagacaatagggtgcattgttgtctgtactttattagcccttttgggcatggtctgagacccctcgatgtcgagttcatgaaagcgctccaccagcgcgtgaacattgtccccatcctcgctaaggccgataccttgacccctcccgaagtggatcacaaaaaacggaagattcgcgaggagatcgagcactttggcattaaaatataccagtttcccgactgcgactcagacgaagatgaagacttcaaactccaggaccaggctctcaaagagagcatccccttcgcagttatcgggagcaatacagttgtagaagccagagggagaagagtccgaggccgcttgtacccctggggaattgtggaggttgaaaaccctggacactgcgattttgtgaaactgaggaccatgcttgttcggacccatatgcaggatctgaaggatgtcacccgggagacacattacgagaactatcgcgcacagtgcattcagagcatgacacgcctcgtcgtaaaggaacgcaatcggaataagttgacccgcgaaagtggcaccgacttccctatccccgcggtgcccccggggacagaccccgaaaccgagaagctgatcagagaaaaggacgaggaacttcgacggatgcaggaaatgttacacaaaatccagaagcagatgaaagagaattattag

SEQ ID NO: 26283 - DNA, 825 bp, synthetic construct
  misc_feature 1..825: note = Description of Artificial Sequence: Synthetic coding sequence
  source 1..825: mol_type = other DNA
atgatcaagcggttcctggaggacaccaccgacgacggcgagctgagtaagttcgtgaaggattttagcggtaatgcctcatgccaccctccggaggcaaaaacctgggctagccgtcctcaggtgccagaaccacgaccccaggcccccgatctgtatgatgacgacctggaatttagacccccatcccgcccacaatcatccgacaaccagcagtacttttgtgcccctgcacctctgtccccctctgctcggccgagaagcccatggggaaagctggacccttacgacagcagcgaggatgataaagagtatgttggctttgcaacactcccgaaccaggtccacaggaagagcgtaaagaaaggatttgatttcacactcatggtggccggggaaagcggattgggaaagtccacactggtgaactcactattcttaacagacctttaccgtgatagaaagcttctgggtgcagaggagcgcattatgcaaaccgtcgaaatcactaaacacgctgtggacatcgaggaaaaaggggtgcgacttcgactcactatcgtcgatactcccggttttggggacgccgtgaacaataccgaatgctggaaacctgtggccgaatacatcgatcaacaattcgaacaatactttcgggatgaaagcggactcaatagaaaaaatatacaggacaacagagtccattgttgtttatactttatcagccctttcgggcacggatatggtccgagcctgcgcctgctcgcacctcccggcgccgtgaaggggaccggccaggagcaccaggggcagggatgccactag

SEQ ID NO: 26284 - DNA, 1479 bp, synthetic construct
  misc_feature 1..1479: note = Description of Artificial Sequence: Synthetic coding sequence
  source 1..1479: mol_type = other DNA
tacagcagccccgccctgttcagcagccgggccgccccccagaagccgaggaaagaaggcagccaggcggccggactgttggttttttctgactctctggagattaagaggttcctcgaagacaccaccgacgatggagagctgtctaagttcgtgaaggatttttcaggcaatgcctcttgccatccacccgaagcaaaaacctgggcctcccgcccccaggttcccgaaccccgcccacaggctccagacttgtacgatgatgatctggagttcagaccaccatcacgaccccagtcttctgataaccagcaatacttttgcgctcccgccccactgagtccgtccgctagaccccgcagcccctggggcaagttagacccctatgattcttctgaagacgacaaagaatatgtcggtttcgctaccctacccaatcaggttcatcgcaagtctgttaagaagggcttcgacttcacgctcatggtcgctggcgaatccgggctaggcaagagtactctggtaaacagcctgtttctcactgacctgtaccgagaccggaagttgttaggggcggaagaacggattatgcagacggtggaaatcaccaaacacgccgtcgacattgaagagaaaggggtgaggctgcgccttaccatcgtcgacacgccaggttttggagacgccgtgaataacacagaatgttggaagccagtggccgagtatatagaccaacagtttgagcaatattttagggacgagagtggactgaaccgcaagaatattcaggataaccgcgttcactgttgtctctatttcataagtccttttgggcatggcttgcgaccgctcgatgtggagtttatgaaagctttacatcagcgcgtgaacattgttcccatcttggccaaagccgataccctgacacctcctgaggtggatcacaagaaaaggaagatccgtgaggaaatcgagcatttcggcattaaaatatatcagtttccagactgtgactcagacgaggatgaagactttaagctgcaagaccaggctctgaaggaaagcatcccctttgcagttattgggtctaatacagttgtggaggctagagggaggcgcgtgcgggggagactgtatccgtggggaatcgtcgaagtggaaaacccaggacattgtgattttgtcaaactgcgtacaatgctcgtgaggacgcatatgcaggacttgaaggacgtgacgagggaaactcactacgaaaattatcgtgctcagtgcatccagagcatgacacggcttgtagtgaaggaaagaaatagaaacaagctaaccagggagagcggcacggatttcccaatccctgctgttccgcctggcactgaccccgaaactgaaaagctgatccgcgaaaaagacgaagaactgcgccgtatgcaggagatgctgcacaagattcagaagcagatgaaggagaactattag

SEQ ID NO: 26285 - DNA, 996 bp, synthetic construct
  misc_feature 1..996: note = Description of Artificial Sequence: Synthetic coding sequence
  source 1..996: mol_type = other DNA
atggtggccggcgagagcggcctgggcaagagcaccctggtgaactcactctttctgaccgacctatatcgagaccgcaagctgttgggtgctgaagaaaggataatgcagacagtagagattacaaaacacgcggtggacatcgaagagaaaggggttaggctccgcttgaccattgtggacacacctggatttggggatgcagttaacaatactgagtgctggaaaccggtggccgagtacatcgaccaacaattcgagcagtatttccgagacgaaagcggacttaaccggaagaacattcaagataatcgcgtgcactgttgtttgtatttcatttctcctttcggtcatgggttgagaccgctcgacgtcgagttcatgaaggcccttcaccaaagggtcaatatcgttcccattctggctaaagccgacaccctcaccccccccgaagtcgaccataaaaaacggaagatcagggaagagatcgaacactttggaataaagatatatcaattccccgactgcgacagtgatgaggacgaggattttaagctgcaagatcaggctttaaaggagtccatcccctttgccgtcatcggcagtaatactgtggtggaagcaagaggccggagggtgaggggccgactatatccatggggaattgtggaggtggaaaatcccggccattgcgatttcgttaaactgcgaactatgcttgttcggacgcacatgcaggacctaaaagatgtcacccgggagactcactatgagaactaccgcgcacagtgtatccaatctatgacccgcctggtggttaaagagcgaaacaggaataagttaacacgtgaatcgggcactgacttccccattcccgctgtgccgcccgggacagaccccgagacggaaaagctgataagagaaaaggatgaggagctgaggcgcatgcaggagatgctccacaagatacagaaacagatgaaggaaaattactag

SEQ ID NO: 26286 - DNA, 1311 bp, synthetic construct
  misc_feature 1..1311: note = Description of Artificial Sequence: Synthetic coding sequence
  source 1..1311: mol_type = other DNA
atgagcgtgagcgcccggagcgccgccgccgaggagcggagcgtgaacagtagcacgatggggcaacaaaaaaacctcgagggttatgtgggatttgctaatttacctaatcaggtttatagaaaatctgtaaaaagggggttcgaattcaccctaatggtggttggcgaaagcgggttgggcaagtcaacgctcattaattccctatttttgaccgacctttattcaccagagtatcctgggccatcacaccgaatcaagaagaccgttcaggtggagcagagcaaggtgctgatcaaggagggcggcgtgcagcttctcctgacgatcgtggacacacccgggtttggggacgctgtcgataattcaaattgctggcagcccgtgatcgactacattgacagcaagtttgaggactacctcaacgccgaaagcagagtgaatagacgacagatgcctgataatcgggtgcagtgttgtttgtacttcatcgcgccctccggtcatggcctgaaaccacttgacatcgaatttatgaagcgtcttcacgagaaagtaaacattatcccgctgatagccaaggccgataccctaacccctgaggaatgtcaacagtttaagaagcagattatgaaagagattcaggagcacaaaattaaaatctacgaatttcccgagacagacgatgaggaagagaacaagcttgttaagaaaatcaaggacaggcttcctctggccgttgtagggagcaacaccatcatcgaagtgaatggtaagagagtccgtgggaggcaatatccgtggggagtagccgaggtcgaaaacggcgaacactgtgacttcacaatccttcggaacatgctgatcaggactcacatgcaggatttgaaggatgttacaaataacgtgcactacgagaactataggtctcgcaaattggcagcggtgacctacaatggtgtggataacaacaagaacaaggggcaacttactaaatccccgctagcccagatggaggaggaacgtagagagcatgtagcgaagatgaaaaagatggagatggagatggagcaggttttcgagatgaaggtgaaggagaaggtccaaaaattgaaagactctgaagccgagctgcaacgcagacatgagcagatgaagaaaaacttggaggcacaacataaagaactcgaggaaaagagacgccagttcgaggacgagaaagcgaactgggaagctcagcagcggatactggagcagcagaactctagtcggactctggagaagaacaagaagaagggaaaaatcttctag

SEQ ID NO: 26287 - DNA, 1317 bp, synthetic construct
  misc_feature 1..1317: note = Description of Artificial Sequence: Synthetic coding sequence
  source 1..1317: mol_type = other DNA
atgagcgtgagcgcccggagcgccgccgccgaggagcggagcgtgaacagctctacaatggaggtggcccaacagaagaatctggagggttacgttggtttcgcaaatctgccaaatcaagtgtacaggaagtccgtcaagagaggcttcgagttcacattgatggtcgtaggggaatccggtctcgggaagagcaccctgattaatagcctgtttctcactgacctttactccccagaataccccggcccaagccaccgaatcaagaagactgtgcaggtggagcagtcaaaggtattaatcaaggaagggggagtacagctgcttctgaccattgtggatacccccggctttggggacgctgtagacaactccaattgttggcaaccagtgatcgactacatagatagcaaattcgaggattacctcaatgcagagtcacgggttaatcgacgtcaaatgccagataaccgggtccagtgttgcctgtactttatcgccccaagcgggcacggactcaagcccctcgacattgaattcatgaagcggctgcatgagaaggtgaacatcatcccactcatcgccaaagctgatactctgactccagaagaatgtcagcaattcaagaaacagatcatgaaggagatccaagagcacaagatcaaaatatatgagttccccgaaactgatgacgaagaagaaaacaaacttgtgaagaagataaaggatcgacttcccctagcagtggttggaagcaacaccataattgaagtcaatgggaaacgggtgcgcgggcgacagtatccttggggcgtagccgaagtcgagaacggagagcactgtgatttcaccatccttagaaacatgctaataaggacacacatgcaagaccttaaggatgttacgaacaacgttcactatgaaaactataggtcaagaaagctggcagcagtaacttacaacggcgtcgacaacaacaaaaacaagggacagctgaccaaatcacctctggcccagatggaggaagaacggcgggaacacgtggccaagatgaaaaaaatggaaatggaaatggaacaagtgttcgagatgaaggtgaaggaaaaagttcagaagcttaaggattcagaggcggaattacagcgccgccatgaacagatgaagaagaacctcgaggcccagcataaagagctcgaagaaaaacgccggcagtttgaggatgaaaaagcaaattgggaagcgcaacagagaatattggaacagcagaattcctcaaggaccctagaaaagaataagaaaaaagggaagatcttctag

SEQ ID NO: 26288 - DNA, 1311 bp, synthetic construct
  misc_feature 1..1311: note = Description of Artificial Sequence: Synthetic coding sequence
  source 1..1311: mol_type = other DNA
atgagcgtgagcgcccggagcgccgccgccgaggagcggagcgtgaattcatccaccatggtacagcaaaaaaacctagaaggctacgttggttttgcaaacctgcctaaccaggtttacaggaaatcagtgaagaggggatttgaattcaccttgatggtagtgggagagtccgggttggggaagtccaccctgataaatagtctattcctcaccgatctgtattcacctgagtacccagggccctcccaccggataaagaaaactgtgcaggttgagcagagcaaggttttgattaaagagggaggggtgcagctgttacttaccatagtcgataccccaggcttcggcgatgcagtggataatagtaactgttggcagcctgtgatagactatattgactctaagtttgaagattacctgaacgcagaaagtagagtgaaccgcagacagatgccggacaacagggtccagtgctgtctgtattttatagctccatcagggcacgggttgaaacccctggatatcgagttcatgaagcgattgcatgagaaagttaacatcattccccttattgccaaagcggatacgttgacaccagaggagtgccaacagtttaaaaaacaaattatgaaagaaatccaggaacataaaatcaagatttatgagttccctgagacggatgatgaagaggagaacaaactcgtgaagaaaattaaagacagactgccgcttgcagtggtggggtcaaacaccatcatcgaagttaatggaaagcgcgtgcgcggcagacaatacccgtggggagtcgccgaagtggaaaatggggagcactgtgacttcactattcttagaaatatgttgatacggactcacatgcaggatttaaaagacgttactaataacgtgcattacgaaaattacaggtcccgcaagctggccgccgtgacgtacaacggcgttgacaataataaaaataaaggtcagctgacaaagtcacccctggcccagatggaggaagagaggagggagcacgtggccaaaatgaaaaagatggagatggaaatggagcaggttttcgaaatgaaggtcaaggaaaaggtccagaaactcaaggattccgaggcagaactccagcgtagacatgagcaaatgaaaaaaaatctcgaggcgcagcataaagagttagaggagaagaggaggcaatttgaggatgaaaaggctaactgggaggcccagcaacgtattctcgagcagcagaattcaagtcggaccttagaaaagaataagaagaaagggaaaattttctag

SEQ ID NO: 26289 - DNA, 267 bp, synthetic construct
  misc_feature 1..267: note = Description of Artificial Sequence: Synthetic coding sequence
  source 1..267: mol_type = other DNA
atgaagaagatggagatggagatggagcaggtgttcgagatgaaggtaaaggaaaaggtgcaaaagctcaaagactctgaagcagagctgcagaggaggcatgagcagatgaaaaagaatctagaggctcagcataaagaactggaagaaaagaggcgccaattcgaggatgaaaaggcaaattgggaggcccagcagaggattctggaacaacagaactcctctaggacccttgagaagaacaaaaaaaaagggaaaattttttag

SEQ ID NO: 26290 - DNA, 1155 bp, synthetic construct
  misc_feature 1..1155: note = Description of Artificial Sequence: Synthetic coding sequence
  source 1..1155: mol_type = other DNA
atggtggtgggcgagagcggcctgggcaagagcaccctgatcaactcactctttctgaccgacctctacagtcccgagtatcctggtccctcccaccgcatcaagaagacagtgcaggtggagcaaagtaaggtgctgatcaaagaaggaggggtccaacttctgcttaccattgtggatacccctggatttggtgacgcggtggacaactccaactgctggcagcctgttattgattacattgattctaagttcgaggactatctcaacgcagagtccagggtaaataggagacaaatgccagacaaccgggtacaatgctgtctgtactttatcgctcccagcgggcatggcctaaagccgttagatatcgagttcatgaagaggttgcacgagaaggtaaacattattcctttgatcgcaaaagctgacactttaacccccgaggagtgccagcaatttaagaagcagatcatgaaggagatccaggagcacaaaattaaaatctatgagttcccagagaccgacgatgaggaggagaacaagctcgttaagaagatcaaggaccgattgcccctggcagtcgttggatccaatactattatcgaggtaaacgggaagcgtgttcggggcaggcagtacccttggggggtggctgaagtcgaaaatggcgagcattgtgacttcaccatcttgcgcaatatgttgattaggactcatatgcaggatcttaaggacgtgaccaacaacgtgcattacgagaattacagatctcggaagctggctgcagtgacatataacggagtggacaataacaaaaataaagggcaattgaccaagagtccactggcccagatggaggaggagagacgagaacacgtcgccaaaatgaagaaaatggagatggagatggagcaagtgtttgagatgaaggtgaaagagaaggtgcagaagctgaaagatagcgaggccgaacttcaacgccggcatgagcaaatgaaaaagaacctcgaagctcagcataaagaactcgaagagaagaggcggcagttcgaggatgagaaggccaactgggaggcccagcaacgcatcctcgaacagcagaactcctctcggacactcgaaaaaaacaaaaagaaggggaaaattttttag

SEQ ID NO: 26291 - DNA, 708 bp, synthetic construct
  misc_feature 1..708: note = Description of Artificial Sequence: Synthetic coding sequence
  source 1..708: mol_type = other DNA
atgagcgtgagcgcccggagcgccgccgccgaggagcggagcgtgaactcaagcacaatgggccagcagaagaatcttgagggatacgtcggttttgcaaacctcccaaatcaggtttacagaaaatcggtgaaacggggatttgagtttactcttatggttgtcggagaaagtggactcggaaagtccaccctgatcaactccctctttctgacggacctgtattcacctgagtaccccggtcccagtcaccggattaagaagaccgttcaggttgaacagtccaaggtgctgattaaggagggcggcgtgcagctgttgctgactatcgtagatacgccagggttcggcgatgcggttgacaactcaaactgttggcaaccagttattgattatattgactccaagtttgaggattacctgaatgcggaaagtcgcgtgaatcggagacaaatgcctgacaatcgtgtccagtgctgtttgtacttcattgcacccagcgggcacggcctgaaaccactcgatatcgagtttatgaagcgcctgcacgagaaggtgaacatcatccctctaattgcaaaagcagacacgctcacccccgaagagtgccagcaatttaagaagcagataatgaaagaaatccaagaacacaaaatcaaaatttacgaatttcccgagaccgcaaaaaaaaagaagaagaagaagtag

SEQ ID NO: 26292 - DNA, 1155 bp, synthetic construct
  misc_feature 1..1155: note = Description of Artificial Sequence: Synthetic coding sequence
  source 1..1155: mol_type = other DNA
atggtggtgggcgagagcggcctgggcaagagcaccctgatcaactctctgtttctcactgacctgtacagcccagaataccctggccctagccacagaatcaaaaagaccgtgcaggtcgaacagtctaaggtgcttataaaggagggcggagtgcaactcctgctcaccattgtcgatactcccggattcggagacgctgtggacaacagcaactgctggcagcctgtgattgattacattgactcaaaattcgaggactacttgaacgctgaatctcgagtgaataggaggcagatgcctgacaatagggtccagtgttgtctgtacttcattgcaccgagcggtcatggcctgaagcccttagatattgaatttatgaagcgtttgcatgagaaggtgaatatcatccctctgattgcgaaagctgataccctgaccccagaggaatgccagcagtttaagaagcaaatcatgaaagagattcaggaacataaaatcaaaatttatgaatttcctgaaactgacgacgaggaggagaataaactcgtgaagaagatcaaggaccggcttccgctggcggtcgtaggatcaaacacaatcatagaagtgaacggcaaacgtgtgcgggggagacaatacccttggggagttgcagaggtcgaaaacggcgaacattgcgacttcacaattctgcgcaacatgctcatacggacacacatgcaggacttaaaagatgtgactaacaacgtccattacgagaactaccggtctcgtaaactggcggcagtgacttacaacggtgtcgacaacaacaagaataagggtcagctgaccaaatcaccactggcacaaatggaggaggagcgccgcgagcatgtagcaaagatgaagaagatggagatggagatggaacaggtgtttgaaatgaaggtgaaggagaaagtacaaaagctgaaggacagcgaggctgaattgcagagaagacatgagcagatgaagaaaaacttagaagcgcagcacaaggagttggaggagaagcgccgccagtttgaagatgaaaaggcgaattgggaagctcagcagagaatactggaacaacagaattcaagtcgcacccttgaaaaaaacaaaaaaaaagggaagattttctag

SEQ ID NO: 26293 - DNA, 1146 bp, synthetic construct
  misc_feature 1..1146: note = Description of Artificial Sequence: Synthetic coding sequence
  source 1..1146: mol_type = other DNA
gtgacccacgagaccatcgtggagcagcagaagaacctggagggctacgtgggcttcgcgaacctgcccaatcaagtctacaggaaaagtgttaagcgcggcttcgaatttacattaatggtggtgggcgagagtggtctcggcaaaagtaccctgatcaacagtctttttttgactgacctttacagtcctgaatatcctgggcctagtcatcgaataaagaagactgttcaagtggaacagtcaaaggtgctcattaaagaaggaggtgtgcaactactgcttactatcgtcgacacaccaggcttcggagacgccgtggataattctaactgctggcaacctgtgatcgactacattgatagcaagtttgaggactacttaaatgccgaatctagggttaatcgccggcaaatgccggacaatcgagtccaatgctgcttgtactttattgccccctcggggcatggactgaagccattggatattgaattcatgaaacgactgcacgagaaagtgaatatcattcctctcattgcaaaggctgatacactgacacctgaggaatgccagcagtttaaaaagcagatcatgaaggagattcaggaacacaaaatcaaaatttacgaattccctgagactgacgatgaggaagagaacaaactcgtcaaaaaaataaaagacaggctaccgctcgccgtggttgggtcaaatactataatcgaagtaaatggcaagagagtgagaggacgtcagtacccttggggtgttgctgaggttgaaaacggcgagcattgcgatttcaccatcctgaggaacatgctgatcagaacccacatgcaggatcttaaagacgtcaccaacaatgtccactatgagaactatcgctctcgtaaactggcggctgtcacgtacaacggcgtcgataataataagaacaagggccagcttactaaatccccattggcccagatggaagaggagcgccgcgagcatgtcgccaagatgaaaaagatggaaatggagatggagcaggtattcgaaatgaaggtgaaggaaaaggttcagaagctgaaggactccgaagctgaagtcatctctttgatttcccatttgctagcagatattgtgttcctgttcaagtag

SEQ ID NO: 26294 - DNA, 1149 bp, synthetic construct
  misc_feature 1..1149: note = Description of Artificial Sequence: Synthetic coding sequence
  source 1..1149: mol_type = other DNA
atgggcgagagcggcctgggcaagagcaccctgatcaacagcctgttcctgaccgacttgtactcaccggaatatccagggccttcacatcggattaaaaagacagtgcaggtggagcaatccaaagtcctgattaaagaggggggagttcagctgctgcttacaatcgttgacacacccggctttggagacgcagtcgacaattcaaattgctggcagcctgtcattgattatattgatagcaaattcgaggactatctgaacgccgagtctcgcgtgaataggagacagatgcctgacaatagagttcagtgttgcctctattttatcgccccctccggccacggcctgaaaccactcgacattgaattcatgaaacgtctccacgaaaaggtgaatattatccccctgatagccaaggccgatactttgactcctgaggagtgtcagcagtttaagaaacagatcatgaaggaaattcaggagcataagatcaagatctatgagttcccggagaccgatgatgaagaagagaataagcttgtcaagaaaattaaagatcggctccctttggcagtggtaggctcaaatacaatcatcgaggttaatggtaagagagtgcgcggcagacaatacccatggggggtcgctgaagtggaaaatggggaacactgtgatttcaccatcttgcggaatatgcttattcgaacacacatgcaggatcttaaggatgtcactaacaacgtccactacgagaattatcggagtcggaagctagccgccgtcacttataatggtgttgacaataacaagaacaagggacagctgaccaagtcacctctggcacaaatggaggaagagcggagagagcatgttgcaaaaatgaaaaagatggaaatggaaatggagcaggttttcgagatgaaagtcaaggaaaaggttcaaaaattgaaagactccgaagcagagctgcagcgtcgccatgagcagatgaaaaagaatctggaagcccaacacaaagagcttgaggaaaaacgaaggcagtttgaggacgagaaagctaactgggaagctcagcagcgaatactggagcagcagaacagtagtaggaccctggaaaagaacaagaagaaagggaaaatcttctag

SEQ ID NO: 26295 - DNA, 1302 bp, synthetic construct
  misc_feature 1..1302: note = Description of Artificial Sequence: Synthetic coding sequence
  source 1..1302: mol_type = other DNA
atggaggtggtggacccccagcagctgggcatgttcaccgagggcgagttgatgagcgttggtatggacacattcatccaccgtatagatagcactgaggttatctaccaacctcgcagaaaacgcgctaaactgatcggcaaatatctcatgggcgaccttctgggggaggggagttatggcaaggtgaaagaagttctggactctgaaacactctgtaggcgtgcagtgaagattcttaaaaagaagaagctgagacgcattccgaacggcgaggccaacgtgaagaaggaaatccaattactgcgcagactgcgtcacaaaaatgttattcagttggtggatgtgctgtacaatgaggagaaacagaagatgtacatggtcatggagtattgcgtgtgcggaatgcaagagatgttggattcggttccagagaaaaggttccccgtttgccaggcccatggatacttttgtcaactgatagatggtctcgagtatctccacagccaggggattgtccacaaggatatcaagcctgggaatctgttactcacgacaggaggaacactgaagatatctgacctgggggtggccgaagctttgcatccattcgccgccgacgatacctgtcggacctcacagggcagcccggcatttcagcctcctgaaattgctaacggactagacaccttttctggcttcaaggtcgacatatggtcagccggggtcacactgtacaatattactactgggctgtatcccttcgagggcgacaacatctacaaactcttcgagaacataggaaagggtagttatgccatacccggagattgcggtccacccctgtccgatttgttgaaaggtatgcttgaatatgagcctgcaaaaaggttttccattcggcagatccggcaacacagctggttccgaaaaaagcacccaccagctgaggccccggttcctatacccccgagtcccgacactaaggataggtggagatctatgacggtggtcccatatctcgaggacctacatggagcagacgaggatgaagacctcttcgatatcgaagacgacatcatctacacacaagactttacggtgcctggacaagtgcctgaggaggaagcatctcataatggccagcggcgcgggcttccaaaggccgtgtgtatgaacggaacagaagctgctcagctgagtaccaagagccgggccgagggtcgagctcctaatcctgctagaaaagcatgctctgcttccagcaaaattcgcaggctgtcagcctgtaagcagcagtag

SEQ ID NO: 26296 - DNA, 1299 bp, synthetic construct
  misc_feature 1..1299: note = Description of Artificial Sequence: Synthetic coding sequence
  source 1..1299: mol_type = other DNA
atggaggtggtggacccccagcagctgggcatgttcaccgagggcgaattgatgtccgtggggatggacacattcattcaccgcatcgactcaacggaagtgatctaccaaccccgacggaagcgcgctaagctgataggaaaatatcttatgggcgatctgctcggtgaaggcagttatggaaaagtgaaggaggtcctcgatagcgaaacactctgccgccgggcagtgaaaatactaaagaaaaaaaaattgagaagaatccctaacggagaggccaatgtgaagaaggagattcaacttctgcgcagactcaggcataaaaacgtcattcaactagtcgacgttctgtataatgaagaaaaacagaaaatgtatatggtgatggagtattgcgtgtgcggtatgcaggagatgctcgattcagtgcctgagaaacgtttccctgtgtgtcaagcacatggttacttctgtcagctcatcgacgggctggagtacctccactcacaggggatcgttcacaaagacataaaaccgggaaacctgctccttaccacaggagggactttgaaaattagtgatctaggagtggccgaggcacttcacccattcgcggccgacgatacgtgtcgcaccagccagggtagccctgcttttcaaccccctgagatcgctaacgggttagatacctttagcggctttaaggttgacatctggagcgccggtgtgacactatacaatataactaccggtctgtatcccttcgaaggggacaacatttacaagctgttcgagaacattgggaaagggagctatgccattccaggcgattgcgggccccctctgtctgatctactaaaggggatgttggagtacgagcccgctaagagattctccattcgacagatacggcagcacagctggtttcggaagaaacacccccctgcagaggcgccagtcccaattccccccagcccggacactaaagatagatggcgcagcatgactgtcgttccttacttggaagatttgcatggagcagatgaggacgaagacctctttgacattgaggatgacattatctacacacaggactttacagtgcctggtcaggtccccgaagaggaggcatcgcacaacggccagcggcgagggctcccaaaggctgtctgcatgaacggcacagaggccgctcaacttagcactaaaagccgtgccgaggccggacctcccactctgcctgcacggcccgccgcgagttctaaaatccggcggctgagtgcctgcaaacagcagtag

SEQ ID NO: 26297 - DNA, 1248 bp, synthetic construct
  misc_feature 1..1248: note = Description of Artificial Sequence: Synthetic coding sequence
  source 1..1248: mol_type = other DNA
atggaggacctgtgcgtggccaacaccctgttcgccctgaacctgttcaaacaccttgcaaaggccagccccacccaaaacctgtttctgtctccatggtccattagctccactatggcaatggtctatatgggcagtaggggcagtaccgaggaccagatggctaaagtgctgcaatttaacgaggtgggtgctaacgccgtcacccccatgactcccgaaaactttacaagttgcggctttatgcagcagatccagaaagggtcataccctgacgctatcctccaggcacaagctgcagacaagattcactcatcatttagaagtctttcaagcgccatcaatgcatccaccggcaattacttactggaaagcgttaacaagttgtttggggaaaagtccgcatcgttccgcgaagaatacatccggctatgccagaagtactactcgtccgaacctcaggctgtggacttcctcgaatgtgccgaggaagcccgaaagaagatcaattcatgggttaagacacagaccaaggggaagatccccaacctcctccccgagggctccgtggacggtgatacaaggatggtcctggttaacgcggtgtattttaagggaaagtggaagaccccttttgagaagaagctcaacggcctctacccctttcgagttaactcggctcagaggacccccgtgcagatgatgtatttacgggaaaagctcaacatcggctatatagaggatctgaaagcacagatcttggagctgccttacgccggcgacgtaagcatgttcctgctactcccggacgaaatagccgacgtgagcaccggccttgaactcctggaatccgaaattacctacgataaactcaataaatggacatccaaggataaaatggccgaagatgaagtggaggtctacattccgcagttcaaactggaggagcattatgagctccgaagtattttgcggtccatgggtatggaggacgccttcaacaaaggtcgggccaactttagcggaatgtctgagagaaacgatctatttctgtctgaggtcttccaccaggctatggtcgacgtgaatgaagaaggcacagaggccgccgcgggtaccggaggagtgatgaccggcagaacgggccacggcggacctcagttcgtcgccgatcatccattcctgttccttatcatgcataagatcactaattgcatcctattctttggaaggttctcatcaccttag

SEQ ID NO: 26298 - DNA, 342 bp, synthetic construct
  misc_feature 1..342: note = Description of Artificial Sequence: Synthetic coding sequence
  source 1..342: mol_type = other DNA
atggaggacctgtgcgtggccaacaccctgttcgccctgaacctgtttaaacaccttgctaaagcctcacccacacagaacctgttcttatccccatggagcatctccagtacaatggcaatggtctatatgggatcaagaggcagtactgaggatcagatggccaaggtcctgcaatttaatgaagtaggggcgaatgcagtgacccctatgactcctgaaaactttacgagttgtgggtttatgcagcagatccaaaaggggtcctaccccgatgcgatccttcaagcgcaggctgccgacaagatccatagctctttccggtccctgtcctctgcctag

SEQ ID NO: 26299 - DNA, 486 bp, synthetic construct
  misc_feature 1..486: note = Description of Artificial Sequence: Synthetic coding sequence
  source 1..486: mol_type = other DNA
atggaggacctgtgcgtggccaacaccctgttcgccctgaacctgttcaagcacctggccaaggcctcccctacacaaaatctcttcctgagcccttggtctatctccagtactatggcaatggtgtacatgggttctcggggctccactgaagatcagatggccaaagtgcttcaatttaacgaagtcggcgccaatgccgtgacccccatgacgccagagaacttcacctcctgcggattcatgcagcaaattcagaaaggctcgtatcccgacgctattctccaggcgcaagctgcagataaaatccactcctccttcaggtctctctcttcagccattaacgcatccactgggaactacctgctagagagcgtcaataaactttttggcgagaaatctgcaagcttcagggaggaatacatacgtctgtgtcagaaatactattcctccgagcctcaggccgtggactttcttgaatgttag

SEQ ID NO: 26300 - DNA, 399 bp, synthetic construct
  misc_feature 1..399: note = Description of Artificial Sequence: Synthetic coding sequence
  source 1..399: mol_type = other DNA
atggaggacctgtgcgtggccaacaccctgttcgccctgaacctgttcaagcaccttgcgaaggccagccccacacagaatttgtttctgtctccctggtctataagttcaactatggctatggtgtacatgggctctcgcggatcaaccgaggatcagatggccaaggtgctgcagttcaacgaggtaggggcgaatgcagtcaccccaatgacccccgaaaatttcacatcctgcggattcatgcagcagattcagaagggctcttacccggatgccatcttacaagctcaggccgctgacaagatccattcctctttcaggagcctctctagtgcgatcaacgcatccactggaaactaccttctggaaagcgtgaacaaacttttcggtgaatag

SEQ ID NO: 26301 - DNA, 1248 bp, synthetic construct
  misc_feature 1..1248: note = Description of Artificial Sequence: Synthetic coding sequence
  source 1..1248: mol_type = other DNA
atggaggacctgtgcgtggccaacaccctgttcgccctgaacctgttcaagcatcttgccaaagcatctccgacacagaatctatttttatcaccgtggtcaatctcttccacaatggccatggtgtatatgggtagtcggggcagcacagaggaccagatggctaaggtgcttcagttcaatgaggtgggggccaacgccgttactcccatgacacccgagaatttcaccagctgtgggtttatgcagcaaattcagaagggaagctatccagatgcgatcttgcaggcacaggcagcggacaaaattcattcatcatttcggtccctgagctccgcaatcaacgcttccacaggaaattacttattggagtcagtcaacaagctgttcggggaaaagtctgcgtcattcagagaggaatacattcgactctgccaaaagtattattcttctgaacctcaggctgttgactttctggagtgtgctgaggaggcgcggaagaagattaactcttgggttaagacgcagaccaaggggaaaatcccaaatctgttacctgaaggatctgtggatggggacacacgaatggtgttagtcaatgcagtctatttcaaaggtaaatggaaaaccccttttgagaagaaactcaatggcctgtacccatttcgcgtgaattcagctcaaagaacacctgtgcagatgatgtacctgagggaaaagctgaacattggttacatcgaggatctcaaagctcaaatcctcgaactaccttatgctggagatgtttctatgtttttgcttctgcctgacgaaatcgccgacgtttctacaggattggagctactagaatctgagatcacctatgataagcttaacaaatggacgtcaaaagataagatggcagaggacgaggttgaagtatacattccccagttcaagctggaagaacactatgagctaaggtcaattttgcgatctatgggtatggaagatgcctttaataaaggcagagccaacttttccggtatgagtgagaggaatgatctttttctctcggaagttttccatcaggccatggttgacgtaaatgaggaggggactgaagcggccgcaggaactggcggggtgatgacgggcaggacaggccacggggggccccagttcgtggctgatcatccctttttgtttctgatcatgcataaaattactaactgtatcctcttcttcggtcggtttagtagcccatag

SEQ ID NO: 26302 - DNA, 2280 bp, synthetic construct
  misc_feature 1..2280: note = Description of Artificial Sequence: Synthetic coding sequence
  source 1..2280: mol_type = other DNA
atggccggcctgaccctgttcgtgggccggctgccccccagcgcccggtcagagcagcttgaagagttgttttcccaagtcggacctgtcaagcagtgctttgtggtgacggaaaaggggagtaaggcgtgtagaggattcgggtatgtgaccttttctatgcttgaggatgttcagcgggcgctgaaagagatcactacctttgagggatgcaagatcaatgtaacagtcgctaaaaaaaaactccgtaacaaaactaaagagaagggcaagaacgaaaattcagaatgtcctaaaaaagagccaaaagccaagaaggctaaggttgccgacaagaaggcccgactgatcatcaggaacctaagcttcaagtgctcggaagacgatctaaaaactgtgttcgcacagttcggggcagtgctggaggttaatattccacgtaaacccgacggcaagatgcgtggattcgggtttgtgcagtttaagaatctattagaagccggcaaagctctgaaaggtatgaatatgaaggagatcaaagggagaacagttgccgtcgactgggcggtcgctaaagataaatataaagatacccagtccgttagcgctattggtgaagaaaagagccacgagtcgaaacaccaggaaagcgtcaaaaagaagggaagagaggaggaggacatggaagaggaggaaaacgacgacgatgacgatgacgacgatgaggaagatggagtcttcgatgatgaagacgaggaagaggagaatattgagagcaaagtcacaaagcctgtacagattcagaaacgcgccgtaaaacggcctgcacctgctaagtcgtctgaccattccgaggaggacagcgacttagaagaaagtgacagtattgacgatggtgaggagctagcacagtctgacacgagcacggaagaacaggaagacaaggctgtccaggtgagcaacaaaaaaaagcgaaagctgcccagtgacgtcaatgagggcaagacagtgtttattcgcaatctgtcatttgactcagaggaagaagagcttggagaactgctgcagcagttcggggaactgaagtacgtgcgaattgtcctccatcccgacaccgaacattctaaaggctgtgctttcgctcagttcatgacacaggaggccgctcagaaatgcctgctcgccgctagtcctgagaatgaggcaggtggactgaagttagatgggagacagcttaaagttgatctagcggtcacacgtgacgaagcagcaaagcttcagacgacgaaggtcaagaagccgacaggcacccggaacctataccttgctcgcgaaggattgatccgggcgggcacaaaggcagctgagggcgtgtcagccgctgacatggcaaagcgagagcgctttgagctcctcaaacatcaaaagctgaaggatcaaaacatctttgtctcccgcacccgcttgtgcttgcataatctgcccaaggccgtcgatgacaagcaactcagaaagctgctattaagcgcaacaagcggcgagaagggggtgaggatcaaagaatgcagagttatgagagacctgaaaggagttcacggtaatatgaaggggcaatctctcggatacgcctttgccgaattccaagaacatgagcacgcactgaaggctctccgtctaatcaataacaacccagagatatttggtcccctcaagagacccatcgtggaattttccctcgaagatcggaggaaactcaaaatgaaagagctcaggatccagaggtcgttgcagaagatgcgctctaaacccgcgaccggggaaccgcaaaaagggcagcctgagccagctaaggaccagcagcaaaaagccgcccagcaccacacagaagaacagtccaaagtccctccggagcagaaacggaaagccggctcaactagctggaccgggtttcaaacaaaagccgaagtcgagcaggtcgaactgcctgatggcaagaagaggaggaaagttctagccctcccctctcaccgggggccgaaaattcggttgagagataaggggaaggttaaacccgtccacccaaaaaaaccaaaaccccagattaaccagtggaaacaagagaagcagcagttgtcatcggaacaggtgagtcggaaaaaggcaaaagggaacaagaccgagactcgttttaaccagcttgtggaacaatacaagcagaagctactgggaccctccaagggagccccgctagccaagaggagtaaatggttcgattcatag

SEQ ID NO: 26303 - DNA, 1164 bp, synthetic construct
  misc_feature 1..1164: note = Description of Artificial Sequence: Synthetic coding sequence
  source 1..1164: mol_type = other DNA
atgcagatgagccccgccctgacctgcctggtgctgggcctggccctggtgttcggtgagggaagcgccgtgcaccacccaccctcttatgtggcacaggcaagcaaggaccggaacgttgtattttccccatacggagtggcatccgtcctggcgatgctgcagctgaccaccggtggagaaacccagcaacagatccaggccgccatgggctttaaaatagatgacaaagggatggccccggcccttcgacacctgtataaggagcttatgggcccatggaataaggatgaaatctccaccacggacgcgatttttgttcagcgagaccttaagctagtacaaggtttcatgccccatttctttagactgtttagatcaaccgtgaagcaagtggacttttctgaggtggaacgggcgagattcatcataaacgactgggtcaagacccacactaaagggatgatatccaatctgctcggcaaaggagcagtggatcaattgaccaggttggttttagtgaacgccttgtacttcaatggacagtggaagacacccttccccgacagtagcacccatcgcaggctgttccacaaaagcgacggttccacggtgagcgttccgatgatggcacagactaataagttcaactatacagagtttaccactccagacggccattattatgacatcttggaactcccataccatggggacacactaagcatgttcatcgctgccccatatgagaaagaggtccccctatctgccttaactaacatcctttccgcacagttaatttcacactggaagggcaacatgactagactacctcggctgctggtactcccaaagttttcccttgaaactgaagtcgatttacggaagccacttgaaaacttggggatgacagatatgttccggcagtttcaggcagattttacatcgctgtccgatcaagagccactgcacgtcgcccaggcccttcagaaagtgaagatcgaagttaatgagtcgggcacagtggcaagttcttccaccgccgtaattgtctcagctaggatggctccagaagaaatcatcatggacagaccctttcttttcgtcgtgcggcataaccctaccggtaccgtactgttcatggggcaagttatggagccatag

SEQ ID NO: 26304 - DNA, 540 bp, synthetic construct
  misc_feature 1..540: note = Description of Artificial Sequence: Synthetic coding sequence
  source 1..540: mol_type = other DNA
atgatggcccagaccaacaagttcaactacaccgagttcaccacccccgatgggcattattacgacattctggagctgccctatcacggcgataccctgtccatgtttatcgctgcaccatacgagaaagaggtgccgctctctgccttaaccaacattctgtccgcacagctgatatcacattggaagggcaacatgactcgtttacctaggctgctggtgctaccaaagttttcacttgaaactgaagtcgatctgcggaagcctcttgaaaacctgggcatgactgatatgtttcgacagtttcaggcagactttacgagcttgtcagaccaggagcctctgcacgtggcccaggctcttcaaaaagtgaaaatcgaggtaaatgagtcgggtacagttgcatcgagttccacagcagtaattgtgtcagcccggatggcgccagaggagattattatggaccgcccattccttttcgtcgttcgccacaacccaaccgggaccgtgctttttatggggcaggtgatggagccctag

SEQ ID NO: 26305 - DNA, 711 bp, synthetic construct
  misc_feature 1..711: note = Description of Artificial Sequence: Synthetic coding sequence
  source 1..711: mol_type = other DNA
atgctgagcaagggcctgaagcggaagcgggaggaggaggaggagaaagaaccactggctgtggattcttggtggctagatccagggcatactgcagtcgcacaggcgcctccagcagtggcaagtagttcactgtttgatctgtcagtgcttaaattgcaccactctctgcagcagtctgaacctgacctcagacatctggtgctggtcgtgaacaccttgcgccgaatccaggctagcatggcccctgctgcagccctgccgcccgtcccatcaccacccgctgccccatcagtggccgacaaccttctcgctagctccgacgctgccctgagtgcaagcatggccagcctgttggaagacttgagccacatcgaaggattgtctcaggccccccagccccttgcagatgaaggcccccccgggcggtctataggtggcgccgccccaagcctgggagccttagacctgctggggcccgccaccggttgtttacttgacgacggcctggagggcctttttgaagatatagataccagcatgtacgataacgaattatgggcacccgctagtgaagggcttaagcccggccccgaagatgggcccggcaaggaggaggctcctgagcttgacgaggccgaacttgattacctcatggatgtcctcgtgggcacacaggccctggagcgccccccagggccaggccgctag

SEQ ID NO: 26306 - DNA, 1527 bp, synthetic construct
  misc_feature 1..1527: note = Description of Artificial Sequence: Synthetic coding sequence
  source 1..1527: mol_type = other DNA
atgctgcccacccaggccggcgccgccgccgccctgggccggggcagcgcactcggcggtagccttaatcgtactcctaccggacgcccaggcggaggtggagggacgcgaggtgcaaatgggggtagagtgcctggtaacggtgcaggcctcggccctgggcgcctggagcgtgaggccgcagccgctgctgcaacaactccggctcccaccgcaggcgctctgtactccggtagcgaaggtgactccgagtcaggagaagaggaggaactgggtgctgagagaaggggcctgaagcgaagtctctccgagatggagattggcatggtcgtgggtggtcccgaagccagtgcagctgccaccgggggttatgggccagttagtggcgctgtatcgggggccaaaccgggaaagaagactcgtgggcgtgtcaaaattaagatggagttcatcgacaacaaactgagacggtataccacctttagcaagcgaaagactgggatcatgaaaaaagcctatgagcttagtactctgacagggacacaggtgcttctgctagtcgctagcgagacaggccacgtatacacttttgccactcggaaactgcagccaatgataacttccgaaaccgggaaagccctcatccaaacctgcctgaacagccccgattcaccgcctcgatcagatcccaccactgatcaaaggatgtccgcaactggattcgaggaaacagacttaacataccaggtatccgagtcagactctagtggcgaaaccaaggacacactcaagcctgcattcacagtgacaaatttaccagggactacaagcacgatccagacagccccctctacctcaacaaccatgcaggtgtcctcaggtccttcatttcccatcaccaactatctcgctcctgtctccgcttcagtgagccccagtgcggtatcttccgcaaacggaactgtccttaaatcaaccggctcgggacccgtgtccagcggtggattaatgcagctcccaacttcttttacactgatgcccgggggtgctgtggcacaacaagtgccggtccaagctatacaggtacaccaagccccacagcaagcgagcccctctagggactcatctactgacctgacacaaacttcctcaagcggaacggtgaccctacccgctactatcatgacatcgagcgttcccacgactgtcgggggtcacatgatgtatccatccccacacgcggtcatgtatgcgcctacctcaggtttgggagacggatcactgacagttctcaatgcgtttagtcaggctccttctacaatgcaagtgtcacactcccaagttcaggagccggggggggttcctcaggtgtttctcacagcttcatctggcacagttcagatacccgtctccgccgtgcaattacatcaaatggcagtcataggccaacaggcgggcagcagcagtaacttgaccgagctgcaggtggttaacctggatacagcacattctacaaaaagtgagtag

SEQ ID NO: 26307 - DNA, 915 bp, synthetic construct
  misc_feature 1..915: note = Description of Artificial Sequence: Synthetic coding sequence
  source 1..915: mol_type = other DNA
atgatcaccagcgagaccggcaaggccctgatccagacctgcctgaactcacccgactcaccgccacgctccgacccaaccactgaccagcgaatgtcagccacagggtttgaggaaacagacctaacctatcaggtgagcgagagtgatagttctggcgaaacaaaggataccctgaagccagcctttactgtcaccaacttaccgggaactacatctaccattcaaacagccccaagcacatctaccacaatgcaggtttcctcgggtccaagcttccccattaccaactacctggcgccggtgtccgctagtgtcagtccctccgctgtgtctagcgccaacggaaccgtcctcaaaagcacgggtagcggacctgtgtcttccggaggtcttatgcagttgcctacctcattcacgctcatgccagggggcgcagtggcacagcaggtgccagtccaggctatccaggtccaccaggccccacagcaagcttcgcccagtagagatagttcaacagacctaacacagacgtcttcatcaggaactgtcacactccccgcaaccattatgacctcttcagtgcctactaccgtgggtgggcacatgatgtacccctctccccatgctgtgatgtatgctccaacctcagggttaggggacggtagtctaaccgttcttaatgccttctcccaagccccttccaccatgcaggtttcccactcccaggtgcaagagcccggaggcgtcccccaagtttttctcaccgcatcctccggtaccgtgcagattccagtgtccgcagtccagttacaccagatggccgtgatcgggcaacaggcaggatcctcaagcaatctaactgagctccaggtggtcaacttagataccgctcattcaacaaagtctgagtag

SEQ ID NO: 26308 - DNA, 834 bp, synthetic construct
  misc_feature 1..834: note = Description of Artificial Sequence: Synthetic coding sequence
  source 1..834: mol_type = other DNA
atgagcgcccccgccgccaaggtgagcaagaaggagctgaacagcaatcatgacggagctgacgaaaccagcgaaaaggagcagcaagaggccattgagcacattgacgaggtccaaaatgaaatagacagacttaacgaacaagctagcgaggaaatacttaaagttgaacaaaagtacaataagttgcggcagcccttctttcagaagaggagtgagctgatagcaaagattccaaatttctgggtgaccacctttgtgaatcaccctcaagtgagcgcactcttaggcgaggaagacgaagaggcactgcactacctaaccagagtggaagtcactgagtttgaggatatcaagagtggctatagaatcgatttctacttcgatgaaaacccctatttcgaaaataaggtcctgtcaaaggagtttcatctgaatgagtccggcgatccatcatccaaaagcaccgaaataaaatggaagtcaggcaaagaccttaccaaacggtcaagtcaaacccagaacaaggcctctaggaaaagacagcacgaggaacctgagtccttcttcacatggttcaccgaccactccgatgccggagccgacgaactcggtgaagtcattaaggatgacatctggccgaacccgctccagtattatctggtccctgatatggatgatgaggagggggaaggggaagaagatgacgatgacgacgaggaagaagagggtctggaagacatcgacgaggagggcgatgaagatgagggtgaagaagatgaggatgatgatgagggagaagagggagaggaggatgaaggggaagatgattag

SEQ ID NO: 26309 - DNA, 798 bp, synthetic construct
  misc_feature 1..798: note = Description of Artificial Sequence: Synthetic coding sequence
  source 1..798: mol_type = other DNA
atgccccggagccaccagccccccccccccccccacgagaaggagcagcaggaagctattgaacatatcgacgaagtacagaatgaaatcgacaggttgaacgagcaagccagtgaagagatcctaaaagttgagcagaagtacaacaaactccgccaaccatttttccagaagcggagcgagttaatcgccaaaatacccaacttctgggtgacaacattcgtgaatcatccccaggtctcagcgctcttgggtgaggaagatgaagaggcactacattacctgacgcgagtcgaagttaccgaattcgaagacataaaaagcggataccgcattgacttctactttgatgagaatccctattttgagaataaggtcctcagtaaagagtttcatctcaacgaatcaggggatccgagttccaaaagcactgagataaagtggaagtcaggaaaggatctgacaaaaagatcctcccaaacacagaacaaggcaagccggaagagacaacacgaagagcccgaaagcttcttcacctggtttacagaccactctgacgcgggcgcagatgaactgggagaagtgatcaaggatgatatctggcctaatccactccagtattacctggtgccggacatggatgacgaggagggcgaaggagaggaggatgatgacgacgacgaggaggaagaaggtctcgaggatatcgatgaggaaggagatgaggatgaaggggaggaagacgaagatgatgacgaaggggaggagggcgaggaggatgagggagaagacgactag

SEQ ID NO: 26310 - DNA, 801 bp, synthetic construct
  misc_feature 1..801: note = Description of Artificial Sequence: Synthetic coding sequence
  source 1..801: mol_type = other DNA
atgatgccccggagccaccagccccccccccccccccacgagaaggaacagcaggaggctatagagcatattgatgaggttcaaaacgagattgatcgactaaatgaacaggctagcgaggagatcctgaaggtggaacagaagtataacaagctgcggcagccgtttttccagaaacggtccgaactgatcgccaagatacctaacttttgggtaacaaccttcgtgaatcatccccaggtcagcgcactgttgggcgaggaggatgaagaagccctgcactacctgactagagttgaggttactgagttcgaggatatcaaatctggatataggatcgacttttatttcgatgaaaatccgtactttgaaaacaaggtgctttccaaagagtttcacctgaacgagtccggagatcccagtagtaagtcaacagagataaaatggaaatcaggaaaggatctgacaaaaagatcctcacagactcagaacaaagcgtcaagaaagcgtcagcacgaagaaccagagtccttttttacttggtttacagaccatagcgacgctggtgctgacgagcttggcgaagtaattaaggatgatatctggcctaacccgttgcagtactacctggtgcctgatatggacgacgaggagggggaaggggaggaagacgacgacgatgacgaggaggaagaggggctggaagatattgacgaagaaggcgatgaggacgagggagaggaggacgaggatgacgatgaaggcgaggaaggggaagaagatgaaggcgaggatgactag

SEQ ID NO: 26311 - DNA, 873 bp, synthetic construct
  misc_feature 1..873: note = Description of Artificial Sequence: Synthetic coding sequence
  source 1..873: mol_type = other DNA
atggcccccaagcggcagagccccctgcccccccagaagaagaagcctcgcccgcctccagcactcggccccgaggagacctcagcaagcgccggcctcccgaagaaaggcgagaaagagcagcaggaggcgattgagcatatcgacgaagtccaaaatgaaatcgaccggctcaacgagcaagcttcggaggaaatcctcaaggtcgagcagaagtataacaaattaaggcagcctttttttcagaagcggagcgagctgatcgccaagatcccaaatttttgggtaactaccttcgtaaaccacccacaggtgagcgcactgcttggagaggaggatgaggaagccctgcactacctaactcgagtggaggtcacggagttcgaggacataaagtccggctacaggatcgacttctatttcgacgaaaatccatatttcgagaacaaagtactttctaaggagttccatcttaatgaaagtggtgacccctcctctaaatcaaccgaaattaaatggaagtccgggaaggacctgacgaagcgttcctctcaaacacagaataaggcttcaagaaaaagacaacatgaagagcccgagtccttctttacttggtttacagaccatagcgatgcaggggctgatgagctcggcgaagttataaaggacgacatctggcctaacccccttcaatactacttggtgccagacatggacgatgaagagggagaaggagaagaagacgacgatgatgacgaagaggaagagggtctagaggatattgatgaggagggcgacgaggacgagggagaggaggacgaggatgatgacgagggagaggagggtgaagaggatgaaggtgaggacgactag

SEQ ID NO: 26312 - DNA, 807 bp, synthetic construct
  misc_feature 1..807: note = Description of Artificial Sequence: Synthetic coding sequence
  source 1..807: mol_type = other DNA
atgggctgccgggacctgctgcccagcctgaagcccaccctgctggaaaaggagcagcaggaagccatcgaacacatcgacgaggtccagaatgagatcgatagactgaatgaacaggctagcgaggagatcctgaaagtggagcaaaaatataataaactgcgccagcctttcttccagaaaagatcggaactgatcgccaagatcccgaacttctgggtaactaccttcgttaaccaccctcaggtgagtgcactattaggtgaagaagatgaggaggcgctgcactatcttactcgcgttgaggttaccgaattcgaggacatcaagtctgggtatcgcattgacttttattttgatgaaaacccatatttcgagaacaaggtcctgagcaaggagttccatttgaacgagtccggagacccatctagtaagtcaactgagattaaatggaaatcagggaaagatctgacgaaacggtccagccagactcaaaataaggcaagcagaaaacgccaacacgaggaaccagagtctttctttacgtggttcaccgaccatagcgacgccggggccgacgagctgggcgaagtgatcaaagacgacatatggcccaatccactgcagtattacctggtgcctgacatggatgacgaggaaggggagggggaagaagatgacgatgacgacgaggaggaggagggcttggaggacatcgatgaggagggcgatgaggatgaaggggaggaggacgaggatgatgatgaaggtgaggaaggagaagaggacgagggggaagatgattag

SEQ ID NO: 26313 - DNA, 99 bp, synthetic construct
  misc_feature 1..99: note = Description of Artificial Sequence: Synthetic coding sequence
  source 1..99: mol_type = other DNA
atggcccccaagcggcagagccccctgcccccccagaagaagaagcctaggccaccaccagccctaggtccagaagaaactagcgcaagtgccggatag

SEQ ID NO: 26314 - DNA, 942 bp, synthetic construct
  misc_feature 1..942: note = Description of Artificial Sequence: Synthetic coding sequence
  source 1..942: mol_type = other DNA
atgaccggcaaggccaccccccccagcctgtacagctggcggggcgtgcttttcacatgtctacctgcagctagaacccgcaaaaggaaggagatgtcccgtcaaactgctacagcattgccaacaggtacttcaaaatgcccaccaagccagagggtccccgctctgacgggaacaaccgcatccaataacgacttggcgagccttttcgaatgcccggtgtgttttgactatgttctgccgcctatcttgcagtgccagtctggacatctagtttgttcaaattgccgacccaagctaacctgctgtccaacctgcagaggcccactgggatctatcaggaatctggcaatggagaaagtggctaacagtgtcctgtttccctgcaaatatgcctctagcggatgcgaaatcactctgccacacaccgaaaaagcagaccacgaggagctgtgtgagttccgcccttattcttgcccatgtccaggggcatcttgtaagtggcagggatccctggacgctgtcatgccccacctgatgcatcagcataaaagcatcaccaccttgcaaggggaggacatagtgtttctcgccacggacatcaatctccccggcgctgtggactgggtgatgatgcagtcttgtttcgggtttcactttatgctcgtgctggaaaaacaggagaagtacgatggccaccagcagtttttcgcaatagtgcagctaatcgggacaagaaaacaggcagaaaattttgcctacagactggagctcaacggacatcggcgaagacttacctgggaggctacgccccggtctattcatgaaggcatcgcaactgctatcatgaattctgattgcctagtattcgacacttccattgcccagctgttcgccgagaacgggaatctgggtatcaatgtcaccatatctatgtgctag

SEQ ID NO: 26315 - DNA, 897 bp, synthetic construct
  misc_feature 1..897: note = Description of Artificial Sequence: Synthetic coding sequence
  source 1..897: mol_type = other DNA
atggtgatcatcatcttcctgctgcccccctacgtgttcatcagcgagatgtctagacaaacggccaccgcgcttcctacgggtacctccaaatgtcctccatcccagcgcgtgcctgcactcaccgggaccacagcaagtaacaatgatctggctagtctgtttgaatgtccagtctgcttcgattatgtcctcccaccaatcctgcagtgccagtccggccacctcgtttgctccaattgccgacccaaactaacctgttgtccaacttgtcgcgggccattaggttcgatccgaaaccttgccatggaaaaggtggccaactccgtgttgtttccatgcaaatatgcctctagcggttgtgaaatcactcttccccatacggagaaggcagatcacgaggaattgtgtgaattccggccctactcttgcccgtgtccaggtgcatcatgcaaatggcaagggagcctcgacgctgtgatgccgcacctcatgcaccagcataaatcaatcacaaccctgcagggggaggatatcgtgtttctagctaccgatattaacctgcctggggccgtggactgggtgatgatgcagtcctgttttggctttcacttcatgcttgtgcttgaaaaacaagagaagtacgacggccatcagcagttctttgccattgtgcagttgatcggcactcgcaaacaggccgagaatttcgcatacaggctggaattgaatgggcatcgccggcgactcacttgggaagccacaccgcgcagtatccatgaggggatcgctactgccatcatgaattccgattgcctagtgtttgatacatctatcgcccagttgtttgcagagaatggtaatctgggtataaatgtgactataagtatgtgctag

SEQ ID NO: 26316 - DNA, 849 bp, synthetic construct
  misc_feature 1..849: note = Description of Artificial Sequence: Synthetic coding sequence
  source 1..849: mol_type = other DNA
atgagccggcagaccgccaccgccctgcccaccggcaccagcaagtgccctcctagccagagggtcccggccttgacagggactaccgcaagcaataatgacttggcctcgctttttgagtgtcctgtatgcttcgattacgtcttgcccccgatcctgcaatgccagagcggtcatcttgtgtgttccaactgtcggccaaagctgacttgctgccccacatgtaggggacctttgggcagtatccggaaccttgctatggaaaaggtagcaaattctgttctctttccgtgcaagtatgcaagctccggctgcgaaataaccctaccccatactgagaaagcagatcacgaagagttgtgcgaatttaggccttactcttgtccatgtcctggagccagctgcaaatggcaaggtagccttgatgccgtcatgccacatctgatgcaccagcataaaagcataaccaccttacaaggcgaggatatagtgttcctagcgacagacattaacctgccgggggctgtggattgggtgatgatgcagtcctgtttcgggttccacttcatgctggtgttagaaaagcaggaaaagtacgacggacatcaacagtttttcgccatagtccaacttatcggaacccgaaaacaagcggagaacttcgcctaccgacttgagctaaacggtcacaggcggcgcctgacttgggaggcaacaccacgatctattcacgaaggcatcgctaccgcaatcatgaatagtgattgtttagtgtttgacacttccatagctcagttgttcgcggaaaacggcaacctgggaataaatgtcactatctccatgtgttag

SEQ ID NO: 26317 - DNA, 708 bp, synthetic construct
  misc_feature 1..708: note = Description of Artificial Sequence: Synthetic coding sequence
  source 1..708: mol_type = other DNA
atgaccttcgacctgaccaagatcaccaagaccagcagcagcttcgaagtaaggacatgggacccagagggcgtgatcttctacggggataccaatccaaaggatgactggttcatgctgggactgcgggacgggagaccagagattcagctgcataaccattgggcccagctcacagtgggcgccggtcctcgcctggatgatggtcggtggcatcaggttgaggtgaaaatggaaggggactcagtattactggaggtggacggtgaggaggtcctaagactgagacaggtctctggcccgctgacctccaagaggcatcctataatgcgcatcgcactcggcggtctcctgtttcctgcatctaacctcagactgcctttagttccagctctggatggctgcctgaggcgtgactcctggctggacaaacaggcagaaataagcgcatcggcgcccacctcgttacgcagctgcgatgtcgagtctaatccaggaatctttctaccgcctggcacccaggcggaatttaatctacgggatattccccagccacacgctgagccctgggccttttcattggacctgggactgaaacaggctgccgggagcggccatctgctcgcgctgggcacacccgagaaccccagctggctgagtctgcacctgcaggatcaggagaagacactacccccactctttgcctag

SEQ ID NO: 26318 - DNA, 1209 bp, synthetic construct
  misc_feature 1..1209: note = Description of Artificial Sequence: Synthetic coding sequence
  source 1..1209: mol_type = other DNA
atggagagccggggccccctggccaccagccggctgctgctgctgctgctcttgcttctcctgcgtcatacccgtcaagggtgggcattgagacccgtgttgcccacacaatcagctcacgaccctccggcggtgcacctcagtaatggccccggccaggaacctatagccgtcatgactttcgatctaactaagatcaccaaaacctcatcctcattcgaagttagaacgtgggaccccgaaggggttatattctatggggacaccaatccgaaggacgattggtttatgcttgggctgagggatgggcgccccgagatccagcttcataatcactgggcccaattaactgtgggagcaggacctcgtcttgatgatggcaggtggcatcaagtggaagtgaaaatggaaggcgatagtgtgcttctggaggtcgatggagaggaagtgcttagacttcgccaggtgagcggccctctcacaagtaagaggcaccctatcatgcgaattgcactaggtggattactgttccctgcaagcaatctccgtctcccacttgtccccgcacttgacggttgtctgagacgggactcttggcttgataaacaggccgaaattagcgcttcagcacccacaagtctgagatcctgcgatgtcgagtctaatcccggtatctttttgccccctggaactcaagctgagttcaacctccgggatattccccaaccacacgcagagccttgggcattctctctggacctcgggctgaagcaggccgcaggctcaggccatcttctcgcgctgggcaccccagagaatccatcttggctgagcctccatcttcaagatcaaaaggttgtgctgtctagcgggtctggccccggcctggacctgcctctggtgttaggcctccctttacagctgaagctcagcatgtctagagtcgtcctatcacaaggtagcaaaatgaaggcactggccctgccacccctagggctcgcgccgttgctaaatctgtgggcaaagccacaaggacggctgtttttaggggcactgcctggtgaagatagttccacttccttttgcctcaatggtctctgggcacagggccaacgcttagacgtcgaccaggctctgaacaggagccatgaaatctggacccattcatgtccacagtcaccggggaacggaactgacgccagccactag

SEQ ID NO: 26319 - DNA, 882 bp, synthetic construct
  misc_feature 1..882: note = Description of Artificial Sequence: Synthetic coding sequence
  source 1..882: mol_type = other DNA
atggagagccggggccccctggccaccagccggctgctgctgctgctgctgctactccttctgcgccacaccaggcagggctgggccctgcggccagtgctgcccacacaatccgcccacgacccacctgctgtccatctcagcaacggacctggccaggagcctatcgcggtcatgacatttgacttgactaagattactaagacaagctcgtcctttgaggtacgtacatgggatcccgagggcgttatcttctacggagatactaatcctaaggacgattggttcatgctcggcctgcgggacggtcgccctgaaatccagttacataatcattgggcgcaactcacagttggagccggcccgaggctcgacgatgggcgctggcaccaagtcgaggtgaagatggagggagactctgtgctgctggaggttgacggcgaggaggtgctccgcctcagacaggtaagtggcccactcacatccaagaggcatcctatcatgaggattgcactgggcggtctgttgttccccgcctcgaacctgaggttaccgctggtgccggcgcttgatggctgccttcgcagggattcctggctggacaagcaagccgaaattagtgcgagcgctcctacttcactgaggtcttgtgatgtagagtcgaaccccggcatatttttgccacccggcacacaagcggaatttaacttgcgagatatcccacagcctcacgccgagccatgggctttctcactggacctcgggctgaagcaggcggcaggctcagggcatctcttggctctcgggaccccagaaaacccaagctggttgagtctgcacctgcaggaccaggagaagactctgcctcccctcttcgcctag

SEQ ID NO: 26320 - DNA, 720 bp, synthetic construct
  misc_feature 1..720: note = Description of Artificial Sequence: Synthetic coding sequence
  source 1..720: mol_type = other DNA
atggagagccggggccccctggccaccagccggctgctgctgctgctgctgctcctgctgctccggcataccagacaggggtgggccctgagaccagtattgcccactcaaagcgcacatgatcccccagctgtccatctgagcaacggccctgggcaggaaccaatcgccgtgatgacttttgacctgaccaagattacgaagacctcctccagtttcgaggtccgcacatgggacccagagggcgtcatcttttatggtgatacaaatcccaaggacgattggttcatgctaggtctgagggatggacgcccagaaatccagttgcacaaccattgggcacagctgaccgtgggcgcaggacctcgcttagatgatggacgctggcaccaacttgtgcctgcactggacggatgcctgcgcagggatagctggctggacaagcaggccgagatctctgcgtccgctccgacttcacttaggtcatgcgatgtcgaaagtaaccccggaatctttctcccccccgggacacaggctgaattcaacttgcgcgatatcccacagccccacgcggagccgtgggcattttcactggacctgggcttgaagcaggcggcaggctctggccatctgctcgctctcgggactccagagaatcccagttggctgagcctccacctccaagatcaagagaagaccctgcctcccctgttcgcatag

SEQ ID NO: 26321 - DNA, 864 bp, synthetic construct
  misc_feature 1..864: note = Description of Artificial Sequence: Synthetic coding sequence
  source 1..864: mol_type = other DNA
atggagagccggggccccctggccaccagccggctgctgctgctgctcttgctgttgttgcttcgccacactcgacagggctgggccctccgccccgtgttgccaactcagagcgcccacgacccacccgcagtccacctgagcaatggcccaggccaggagcctatagcagtcatgacattcgaccttaccaaaattactaagactagtagttcttttgaggtcagaacgtgggaccccgagggagtcattttttacggggacacaaaccctaaggacgattggtttatgctcggactgcgggatggccgtcccgagattcagctgcataatcactgggctcagctgactgtgggtgccgggccgaggttggatgatggcagatggcaccaggttgaagttaaaatggagggcgatagtgtactccttgaggtggatggggaagaagtactccggttaagacaggtgtcggggcccctgacttcaaagcgccacccaatcatgagaattgcactaggcggactcctcttccctgccagcaacctgcgtttgcctctggtccctgccttggacggatgtttgaggcgagactcctggctggataagcaggcagagataagcgcgtctgcccctacaagcctgagatcatgtgacgttgagtctaatccaggcatattcttgcctccgggaactcaagcagaattcaatctgagaggtgaggacagtagtacctcattctgtctgaacggattatgggcccaggggcagagactggatgtggaccaggcactaaatagatcccacgaaatctggactcactcatgcccccagagtcccggcaacgggaccgacgcctcccattag

SEQ ID NO: 26322 - DNA, 423 bp, synthetic construct
  misc_feature 1..423: note = Description of Artificial Sequence: Synthetic coding sequence
  source 1..423: mol_type = other DNA
atggagagccggggccccctggccaccagccggctgctgctgctgctcttattgctccttctgcgccatacgcggcagggatgggctctccgacccgtgctgcccacccagtctgcccacgacccccccgcggtgcacctgagcaacggacctggccaggagcccatcgccgtcatgacgttcgacctgactaagattacaaagacgtcctcctccttcgaggtccgcacctgggatcctgaaggtgttatcttttatggtgacaccaacccaaaagatgactggtttatgcttggtttgcgtgacgggagacccgagatccaactccataatcactgggctcagctgaccgtaggggccggacctagactggacgatggacggtggcaccaggagaaaaccttaccgcccctgtttgcctag

SEQ ID NO: 26323 - DNA, 1155 bp, synthetic construct
  misc_feature 1..1155: note = Description of Artificial Sequence: Synthetic coding sequence
  source 1..1155: mol_type = other DNA
atggagagccggggccccctggccaccagccggctgctgctgctgcttctgctccttctgttgcgacacactaggcagggatgggctctgcgccctgtgctaccaacacagtccgcccacgatcctccagcagtacacctgagtaatggccccggtcaggagccgatagccgtgatgactttcgatttgactaagattaccaagacctcatcttccttcgaggtccgcacttgggatcctgagggcgttatcttttacggggatacaaaccctaaggacgattggttcatgttaggactgagagatggcagacccgaaatccagctacataaccactgggcccaattgacagtgggcgctggcccgcgacttgacgatggacggtggcaccaggtggaagtgaagatggagggggatagtgtcctgctggaggtggatggggaagaagtgctccgactcaggcaggtgagcggtccactcacctcaaagaggcaccccatcatgcgaattgcgctcggcggcctgctcttcccagcgtctaatcttaggctgcctgctgaaatatcagcatccgctccaaccagtttaagaagttgtgacgttgagtctaatccgggaatcttcctccctcctgggacacaggctgagttcaaccttcgcgatattcctcaaccccatgctgaaccgtgggcgttttctctggacttgggccttaaacaagcagccggatcaggtcatcttttggcgctcggcacccccgagaatccctcttggctctcgttgcatttacaagatcagaaggtcgtcctgtcaagtggctccggcccaggcctggacctgcctttagtgctgggcttgcctctccagctcaagctgagcatgtctcgggtggtcctgtcacaggggtcaaagatgaaggctctggcccttcctcccttgggccttgcgcctctcctcaacctttgggctaaaccacagggccggctgtttctaggggcacttcctggcgaggatagttctaccagcttctgtttaaacggactgtgggcacaaggtcagagactggacgtggaccaagctctcaacaggagccacgagatctggactcactcgtgccctcaatctcctggcaatggaaccgatgcctctcactag

SEQ ID NO: 26324 - DNA, 1116 bp, synthetic construct
  misc_feature 1..1116: note = Description of Artificial Sequence: Synthetic coding sequence
  source 1..1116: mol_type = other DNA
atgagccccagcaccttccagatcaccgacatgacccggcggagctgccagaatttgggttacacagcagcttcgcctcaggcgcccgaggcagcatccaataccggtaacgctgagcgggcggaggaggtgccgggagaagggtcgctcttcttacaggctgaaacaagagcttggtttcagaagacccaagcccattggttgctgcagcatggcgcagcccctgcctggttccacggattcataacgaggcgcgaagccgagagattgctggaaccaaaacctcagggctgctaccttgttagattttcagagtctgctgttacttttgtgctgacatatcggagcagaacatgctgcaggcacttcctgttggcccagcttagggatggccgccatgtggttctgggagaggatagcgcacacgcacgcctgcaggacctactgctccactacacagcgcaccccctctctccatacggcgaaaccttgacagaacctctggcacgacagacgcctgagccagccgggcttagtttacgcacagaggaaagtaattttggaagcaagagccaggaccctaatccacagtattctcccattatcaaacagggccaagcccctgtccctatgcagaaggagggcgccggcgaaaaggaacccagccagctactccgccctaaaccacctatccctgcaaagcctcaacttcctcctgaagtgtacaccatacccgtgccaaggcataggccagcccccagaccaaaaccaagcaatccgatttataacgagcctgacgaaccaattgcgttctatgcaatgggcagaggctctccaggtgaggcaccctctaacatctacgtcgaagtagaagacgaaggactgccagccaccctgggccatccagtgttaaggaaatcctggagccgtcccgttccaggtggccaaaatacggggggctctcagctgcattctgaaaattccgtgatcggacagggccctcccctgccccatcaacctcctcccgcttggcgacacacgctgccccacaacttgtcaagacaggtgctccaggatcggggacaggcctggcttccactggggccacctcagtag

SEQ ID NO: 26325 - DNA, 1170 bp, synthetic construct
  misc_feature 1..1170: note = Description of Artificial Sequence: Synthetic coding sequence
  source 1..1170: mol_type = other DNA
atggagttccccctggcccagatctgcccccagggcagccacgaggcaccaattccaacgttcagcacgtttcagattacagacatgacccggcggagctgtcagaatctaggttataccgcagctagccctcaagcccccgaagctgcatctaacaccggcaatgctgagcgcgccgaagaggtacctggagagggaagcttattcctccaagccgaaacgcgcgcgtggtttcagaagactcaggcacactggctcctgcagcatggcgcagctccagcttggtttcacggtttcattaccaggagggaggcagaaagattgctggaacctaaaccacagggctgctacttagtgaggttcagcgagtctgccgttaccttcgtcctcacttaccggtctaggacatgctgcagacattttttgttggctcagctcagagatgggcgtcatgttgtgcttggggaagattctgcacacgctcgtcttcaggatctgcttctgcattacactgcccatccattatcgccctacggcgaaaccctgacagaacccctggcgcgccaaactcctgaacctgcaggcctatcgctgcgcacagaggagtctaatttcggcagcaagagccaagacccaaatcctcaatatagtcctatcatcaagcagggtcaagctcctgtcccgatgcaaaaggaaggtgccggcgaaaaagagccctcacagttgctccggcctaaaccccccatcccagcaaagcctcagctgcccccagaagtgtacaccatccccgtcccccgacatagacctgctcctcgtccaaaacccagcaatccaatctataacgaacctgacgaacctattgccttttacgctatgggtagggggtcccccggcgaggccccaagcaacatatatgtggaagtcgaggacgaaggcctgcccgccacactggggcatccggtgttacggaagtcgtggagcaggccagttccaggaggtcagaatactggggggtctcagctgcattccgagaacagcgtgatcggtcaggggcccccgcttccacatcagccaccacccgcttggaggcacaccttacctcataacttgagtcgccaggtactgcaggaccgcggtcaggcctggcttcctctggggccccctcagtag

SEQ ID NO: 26326 - DNA, 1200 bp, synthetic construct
  misc_feature 1..1200: note = Description of Artificial Sequence: Synthetic coding sequence
  source 1..1200: mol_type = other DNA
atggagttccccctggcccagatctgcccccagggcagccacgaggctcccattcctaccttcagtaccttccaaattacggacatgacgcgccggagttgtcaaaacctcggatacaccgctgcatccccccaagcccccgaggcagcaagcaatacaggtaatgcagagcgagcggaagaggtacccggagaaggcagcctttttttgcaagccgagactcgcgcatggttccagaaaacccaggcccactggctgctgcagcatggggctgcgcccgcctggtttcacggcttcatcacaaggagagttcgaccacccctctctgtgacacaccgagaggccgagcggctgcttgagcccaaaccccagggatgctatctggtccgtttcagtgagtctgctgtcaccttcgtgctgacctacagaagtcgaacatgctgcagacactttctcctcgcccaactgagggatggcagacatgtggtgttaggtgaggattccgcacacgcacgcctgcaagatcttttactgcattacacagctcaccctttgagtccctatggtgagaccctgactgaaccactggcccgacaaacaccagagccggcaggtctgtccttgcggaccgaagagtctaattttgggtcaaagtcccaagaccctaacccccaatactcacctatcatcaaacagggccaggcccctgtccctatgcagaaagagggtgcaggcgagaaggagccgtcgcagctgctgcggcccaaaccaccaattccggctaagccacaattgcctcctgaagtttacaccattcccgtccctcgacatagaccagcgccccggccaaagccttctaatcccatatataatgagcctgacgagcctattgctttttatgctatggggcgaggttcaccgggcgaagccccaagcaacatttacgtggaggtagaggatgaggggctgccagccactctcgggcaccccgtgcttcggaagagttggtctagaccggtccctggggggcagaacacaggcggctctcagctccacagcgagaatagcgtcattgggcagggcccccccctaccgcatcaaccccctcccgcttggaggcacaccttgccacacaacttaagccgccaggtcctgcaagatagaggacaggcgtggcttcccctgggacccccacaatag

SEQ ID NO: 26327 - DNA, 2823 bp, synthetic construct
  misc_feature 1..2823: note = Description of Artificial Sequence: Synthetic coding sequence
  source 1..2823: mol_type = other DNA
atgatcctggagcagtacgtggtggtgagcaactacaagaagcaggagaatagtgagctgtcactgcaggcaggggaagttgtcgatgtgattgaaaagaatgagagtggctggtggttcgttagcacgagcgaggagcagggatgggtgcccgctacctaccttgaggcgcagaatgggacgagggatgacagtgatatcaacacctcgaagacaggcgaagaagagaaatatgttactgtgcagccctataccagtcagtccaaagacgagatcggttttgagaagggtgtgacagtggaggttatcaggaagaatctcgaggggtggtggtacattcgatatcttgggaaggaggggtgggcgcccgccagctacctgaagaaggccaaagacgatcttcccacacggaaaaagaacctggctgggcccgtggaaattataggaaatatcatggagattagcaatctgctgaacaagaaggcaagtggagacaaagagacccctcccgccgaaggggaaggacacgaagcccccatagcgaaaaaagaaattagcctcccgatcctgtgtaatgcctccaacggttccgcagttggcgtaccagaccggactgtaagccggctcgcacagggttctcctgccgtggcacggatcgcaccccagcgggctcagatctcaagtccaaatctaaggacacgcccaccaccgagaagagagtcttctcttgggtttcaactgcctaaaccccccgagccgcccagcgtggaggtggaatattacactattgccgaattccagtcctgtatttctgatgggatctctttccggggaggacaaaaagctgaagtgatcgacaaaaatagcggagggtggtggtatgtgcagatcggcgagaaggagggttgggcaccagccagctacatagacaagcgaaaaaagcctaatcttagccgccggacctccacccttactcgacccaaagtgcccccaccagctccaccatctaagccaaaggaggcagaagaaggacctacgggagccagcgaatcccaggacagtccaagaaagctgaaatacgaggaacccgagtatgatatccccgcgtttggattcgactccgagcccgaactatccgaagagcctgtggaagacagggcttcaggggagcggaggcccgctcagcctcacaggcccagccccgcctcctccctccaaagggcccgctttaaggtcggcgaatctagcgaagacgttgcgctcgaagaggagactatctatgagaacgaaggatttaggccatacgctgaggacactctctccgctcgtgggtcgtctggggactctgactccccagggtcctccagcctgagcctgacaagaaaaaatagtcccaaatctggctctcccaagagttcaagcctcctgaagcttaaagccgaaaagaacgctcaggccgaaatggggaaaaaccactcctctgcctcattctcaagttctatcacaattaacacaacctgctgtagttcctcatcgtctagttctagcagtctgtctaaaacatccggtgaccttaagccccgctcagcctcagatgccgggattagagggactcccaaagtacgagccaagaaggatgcagacgctaacgctgggttgactagttgcccccgggcaaagccctccgtgcggccgaagccctttctgaatagagccgagtcgcagtcccaggaaaagatggatatttccaccctgagacggcagctgaggccgacaggccaactgagaggcggcttgaagggctctaaaagtgaagacagcgagctccctccacaaacggctagcgaggctccctctgaaggctcacgcagaagcagtagcgacctgattaccttacctgcaactaccccaccctgtccaaccaaaaaggaatgggaagggcctgcaacgtcctatatgacctgctccgcttatcagaaagttcaagactcagaaatctctttccccgcaggggtggaggtccaggtgctggagaagcaggagtcagggtggtggtatgtgcgctttggggagcttgaagggtgggcccccagccattacctggtgctcgatgaaaacgaacaaccagatccctctgggaaggaattagacaccgtccccgctaagggaagacaaaatgagggcaagtctgatagtcttgagaaaatcgaacgccgcgtccaagcgctgaacacagtaaatcaatccaagaaggcaactccccccattccaagcaaaccaccaggcgggttcgggaagacctctggaactcctgcagtgaagatgcgcaatggcgttcggcaggtagcagttaggccccagagcgtgtttgtatcgcctccccctaaggacaataatctcagttgtgcactgcgtagaaatgaatcactgaccgcaaccgacggcctaaggggcgtccgtaggaactcttcattctccaccgctaggtcagcagctgccgaagcgaagggcagattagcggagcgagcagcctctcagggctctgactctccccttcttccggctcagaggaattccattcccgtctctccagtgaggcctaaaccaatcgagaagagccagtttattcataataacctcaaagatgtctatgtgagcattgccgattacgaaggcgatgaggagaccgccggattccaggagggggtatccatggaggtattggagcggaatccaaacggctggtggtactgtcagatcctcgatggcgtgaaacccttcaaaggctgggtccccagcaattacctggagaaaaagaactag

SEQ ID NO: 26328 - DNA, 3318 bp, synthetic construct
  misc_feature 1..3318: note = Description of Artificial Sequence: Synthetic coding sequence
  source 1..3318: mol_type = other DNA
atgctggcctactgcgtgcaggacgccaccgtggtggacgtggagaagcgacggaacccatctaaacactacgtgtacatcataaacgttacttggagcgactccaccagtcagacgatttatcgcaggtacagcaaattcttcgacctgcaaatgcagttgcttgataagtttccaatcgagggggggcagaaagatccgaaacaaagaattataccttttctgccagggaagattttattcagacggagtcatatcagagacgtcgctgtcaaacgactcaagcccattgatgagtactgtcgcgcattagtgcggctacctccgcatattagccagtgcgatgaggtgtttagattttttgaggcccgaccagaagatgtgaatcccccaaaagaggactacggatccagcaagagaaagagcgtctggctctcaagttgggccgagtcacctaaaaaggacgtcacgggagccgacgcaaccgcagagccaatgatcctggagcaatacgtcgtggtgtcgaactacaagaagcaggaaaactctgagctgtcgttgcaggccggcgaggtggtggatgtaattgagaagaatgagagtggctggtggtttgtgtcaacctccgaagagcagggctgggttcctgccacatacttagaagcccagaacgggactcgcgacgatagcgatatcaacacgagtaaaacaggggaggaggagaagtacgtgactgttcagccctacaccagccagtctaaggatgaaatcggtttcgagaagggcgttaccgtagaagttattaggaagaatctggaggggtggtggtacatacgctaccttggcaaagaaggctgggcccccgctagctacctgaaaaaagcgaaggacgacttgccaacccggaagaaaaacctcgctgggcctgtggaaattattggcaatattatggaaattagtaatttgctgaataaaaaggcgagtggtgacaaggagacgccccctgccgagggcgagggtcacgaggctcctattgccaaaaaggaaatctcgctgcccattctgtgcaacgcttcgaatggctctgccgtgggagtccctgatcggacagtgagcagactagctcagggcagtccggcagtggccaggatcgcgccgcagcgggctcaaattagtagccctaatctgcgcaccaggcctccaccccgccgggaaagttcactcggcttccagctgcctaagcccccggaaccccccagcgtggaggtagaatattacaccattgctgagtttcaaagttgtatttcagacggaatctctttccggggagggcagaaagcggaggtgatagataaaaattccggaggctggtggtatgtgcagatcggcgagaaggaaggatgggcccccgcctcttacatcgataagagaaagaagcctaacctcagcaggagaaccagcacactcacgaggcccaaggtccccccccccgcgccccctagcaaacccaaagaggctgaggagggccccacgggagcgtcagaaagtcaggactctccccgcaagttaaagtatgaagaacccgagtatgatatccctgcctttgggttcgacagcgaaccagaactctccgaggagcctgttgaggatagagcctctggagaaaggaggccagcacaaccccaccggccctctcccgcatcttcattgcagcgagcccgttttaaggtgggagaaagttccgaggacgtggcactcgaggaagagaccatttacgaaaacgagggcttcaggccttatgccgaggacaccctgtcagccaggggctcgtcaggggactccgattcccctggctcctcttcactgtccctgactcgaaagaattcccctaaatcaggctcccccaaatcttcttctttacttaaactgaaagccgaaaagaatgctcaggccgagatgggcaagaatcatagcagcgcatcatttagcagttctataaccattaatacgacctgttgttcaagcagtagcagctcaagttcgagcttatcgaaaacaagcggggatctgaaacctagaagcgcttcagatgctggtatccgcggaacacctaaggtcagggccaagaaggatgcggatgccaacgcgggactgacgagctgtccccgtgccaaaccaagcgtaagacctaagcctttcctcaatagggcagagagtcagtctcaagaaaaaatggacatcagcactttgagaagacagttaagaccaaccggccagctccgcgggggtctgaaaggctcaaagtccgaggacagtgagttacccccccagactgcatcagaagcaccttccgaaggaagtagacgttcttcaagcgacctgatcacattgcctgcgacaacaccgccatgccccaccaaaaaggagtgggagggcccggccactagctacatgacatgcagcgcataccagaaggtccaagatagtgagatttctttccccgccggtgtcgaagtgcaagtactcgagaaacaggagagtggttggtggtatgtgcgatttggagagctggaagggtgggccccgtcacactatctggtgttggatgaaaatgaacagcctgatccctccggaaaggaactcgatactgtccctgcgaaggggcggcagaacgaaggaaagagtgatagccttgagaaaatcgagcgcagggtacaggccctcaacactgtcaaccagtctaagaaagccacacctccaattccctctaaacccccagggggcttcggcaaaactagtgggacgcctgctgtcaaaatgcggaatggagttcgtcaagtggccgtcagaccacagagtgtgtttgttagtccaccacccaaagataataacctatcatgtgccctacggaggaacgaatctctgaccgccacggacgggttgagaggcgtgaggcgaaatagcagttttagcacagcgagatccgccgctgcagaggccaaaggacgcctagccgaacgggctgcatcacagggatcagattcaccactgttgccagcccaaagaaatagtattcccgtatctccagtgaggcccaagccaattgagaagtctcagtttatccacaacaatctcaaggacgtgtatgtttccatagccgactatgaaggtgacgaagagacggccgggttccaggaaggcgtaagtatggaggtcctcgagcggaatcccaacggatggtggtactgtcaaatcttagatggtgtaaagcctttcaagggctgggtcccatctaactacctggaaaaaaagaactag

SEQ ID NO: 26329 - DNA, 3402 bp, synthetic construct
  misc_feature 1..3402: note = Description of Artificial Sequence: Synthetic coding sequence
  source 1..3402: mol_type = other DNA
atgctggcctactgcgtgcaggacgccaccgtggtggacgtggagaagaggcgcaatcccagtaagcactatgtttacatcatcaatgtgacctggagcgacagcacgtctcagacaatttatagaaggtatagcaaattttttgatttacagatgcagctgctcgataaatttcctatcgaaggggggcaaaaggatcccaaacagagaataattcccttcctcccaggtaagatcctattccggcggtcccatatcagggacgtcgcagtgaagcgtctcaagcccatagacgagtactgtcgcgccctcgtacgtctaccccctcatatctcccaatgcgatgaagtgttccgcttctttgaggccagaccagaggacgtcaaccctcccaaggaggattacggttcatctaaaagaaagagcgtttggctgagttcctgggccgaatctccaaagaaggatgtgaccggggctgacgccacagctgagcccatgattctcgagcaatacgtagtggtctcaaactacaagaagcaagagaattctgaactgagcctccaagcaggtgaggttgtggatgtcattgagaagaatgaaagtgggtggtggtttgtttcaacatccgaggagcaagggtgggtgcctgccacatacctggaagcgcaaaatggaactagggacgacagcgatatcaatacgtccaaaaccggggaagtttccaaaagaagaaaagctcacctgcgaagactggatagacgatggacactggggggtatggtgaaccgccaacatagcagagaagaaaagtacgtcacagtccaaccatacacttcacagtcaaaagacgagatcgggtttgaaaaaggggttaccgtagaggtcattagaaagaacctggagggttggtggtatataagataccttggaaaagagggctgggcacctgcgagttatctgaaaaaagcaaaggatgacttaccgacccgtaagaaaaatctagccggtcccgtggagattatcggtaatatcatggaaatctctaacttgctgaacaagaaagcatcaggggataaggaaacacctcccgccgagggcgaggggcacgaggcacccattgcgaaaaaggaaatcagtctgcccatcttgtgtaacgcctcgaatggttcggcagtcggggtccctgatagaaccgtgtcacgactggcccagggaagccccgctgttgcacgcatcgctcctcagcgagctcagatttcctctccgaacctacgcacccgcccacctcctcgtcgtgagtcttcattggggtttcagctgcctaaaccacccgaacctccaagcgtcgaagtggaatactatacaattgccgagtttcagtcctgcatatctgatggcatatcgttcaggggcggtcagaaggcagaagtgatcgacaagaactctgggggatggtggtacgtacaaataggtgaaaaagagggctgggcccctgcctcttacatcgataagcggaagaagccaaacctcagccgacggacaagtactctaacacggccgaaggtgccgcctcctgctccaccctccaagcccaaagaggctgaggagggacccacgggagcctcagagtctcaagattcgccccgaaaacttaaatatgaggaaccggaatacgacatcccagcctttggtttcgacagcgaaccagagttgtctgaggagccagtggaggacagggcctccggcgagaggaggcctgcccaacctcaccggccttccccagctagctcactgcagcgggctagattcaaggtaggcgaatctagtgaggacgtcgccctcgaagaagaaaccatctacgaaaacgaggggttccgcccctacgctgaagacactttgagcgctcggggcagttctggagattccgacagtcctggcagtagcagcctatctttaactagaaaaaattccccgaagagcggatcacctaagagttccagcctgctcaaactcaaagctgaaaagaatgctcaggcagagatgggtaagaatcacagctccgccagttttagctcttctatcactattaatacaacttgctgctcatcttcttcgtctagcagctcatctttgtcaaaaacttcgggtgacctaaagcctcgcagcgccagcgatgccggcatccgcggtacccccaaggtgcgggccaagaaagacgccgatgccaatgctggactgacttcctgcccccgtgctaaaccgtctgtgaggccaaagccattccttaatagggctgaatctcagtctcaggaaaaaatggacattagcacgctgcgtaggcagcttcgccctactgggcaactgcgcggcggactgaaaggctccaaatccgaagatagtgaattacctcctcagacggcctccgaggcaccctcagagggcagcagacggtcaagtagtgacctaattacactgccagccactacaccaccctgtcctactaaaaaagaatgggagggacctgccacatcttacatgacctgtagtgcatatcagaaagtgcaggatagcgagatttcttttccagctggcgtcgaagttcaggtgctcgaaaaacaggaaagtggatggtggtacgtgaggttcggggaactggagggctgggccccaagccactatctggtgctggatgaaaatgaacagcccgacccttccggaaaggaactggacacggtgcccgcgaaaggacgccagaatgagggcaaaagtgattcactggaaaaaatcgagaggagggtacaggcacttaacacggtgaaccagagtaaaaaggccaccccaccaataccctccaaaccccctggggggttcggcaagacctccggcacgcccgccgtgaaaatgagaaatggggttaggcaggtggccgtccggccccagtctgttttcgttagccctccaccaaaggacaataacctcagctgtgccctgcgacgtaacgagtccctcacagccaccgacggcctgcgaggagtgaggaggaattcaagctttagcacagctcgtagcgcggctgcagaggctaagggtagactggctgaacgggccgcatctcagggttctgactcaccactgctgcctgcacagcgaaacagcattcctgtctcaccagtaagacccaaacccatcgaaaagtcccagtttatccataacaacctgaaagacgtatacgtgagcatcgctgattacgagggcgatgaggagactgctggattccaggagggggtgagcatggaagtgcttgagcgcaacccaaacggttggtggtattgtcagattctggatggcgtgaaaccatttaaaggctgggtcccctccaactacctagaaaaaaaaaattag

SEQ ID NO: 26330 - DNA, 3183 bp, synthetic construct
  misc_feature 1..3183: note = Description of Artificial Sequence: Synthetic coding sequence
  source 1..3183: mol_type = other DNA
tgattcttcgacctgcagatgcagctgctggacaagttccccatcgaaggcggccaaaaagatcctaagcagcgaatcattccctttttgcccggcaaaattctcttcagaaggtcccacattagagatgtagcagtgaagaggctgaagccaattgacgaatattgtcgggccctagtgagactgccacctcacatctcccagtgtgacgaagtgttccggttcttcgaagcaaggcctgaggatgtgaaccctcctaaggaagactacggttcgtccaagagaaaaagcgtgtggctcagctcttgggcggaatcacccaaaaaagatgttaccggagcagatgccacagccgagcccatgatcctcgagcagtacgtcgtggtttcaaattataagaagcaggagaacagcgaactctccttacaggctggcgaggtggtcgatgtcatcgaaaagaatgaaagcggatggtggttcgtctctacaagtgaagagcaaggctgggtacccgccacttatttagaagctcagaatgggacccgagatgattctgacattaacactagcaaaactggtgaggaagagaagtatgtgaccgtccagccttacacttcacaatcaaaagacgaaatcggattcgaaaaaggagtgaccgtagaggtcattaggaagaacctggagggatggtggtacattcgatacctcggcaaagaaggctgggcccccgctagttacctgaaaaaggcaaaagacgacctgccgacacggaaaaaaaatttggccggccccgtcgagataatcggcaatataatggagatcagcaatctcctgaacaagaaagcttcaggagataaagaaacacctcctgcagaaggagaaggccatgaagcgccaattgcaaagaaggagatctcacttccaatcctgtgcaatgccagtaacgggtctgccgtcggcgtccctgaccgcaccgtttcccgtctggcacaggggtcacccgcggtcgctagaattgccccacagcgggcccagatttcaagtcccaatcttaggacgagaccacctcctcgccgggagtccagcctgggttttcagctcccaaaacccccagagccacccagcgtggaagttgagtattacacgattgccgaatttcagtcatgtatttccgatggaatctctttcagaggtggtcaaaaagcagaggtgatcgataaaaatagtggtggttggtggtatgtacagatcggggaaaaagaagggtgggccccagctagctatatcgataagaggaagaaacctaacctcagcagaaggacatctactcttactcgtccaaaagtgccccctcctgcccctccgtcaaaaccaaaggaggccgaggagggccccactggtgcgtccgaaagtcaggactccccgcgcaagcttaagtacgaggaacccgagtacgatatccccgcttttggctttgactcagaaccggagctcagtgaggagcctgtggaagatagggcctccggagaacgtcggccggcccagccacaccgcccaagccctgctagctcccttcagcgtgcgcgattcaaggtgggagagtccagcgaggacgtggctttagaggaagaaacaatctacgaaaatgaagggtttagaccttacgcagaagacaccctctctgcccgcggctccagtggagacagcgattcacctggtagttcttctctgtcactgacccgcaagaactcaccaaagagcggatcacctaagagcagcagccttcttaagctgaaagccgaaaaaaatgcccaggctgagatgggtaaaaaccatagctccgcgtcattcagcagcagcattaccattaataccacgtgctgctcaagcagctcctccagctcatcgagcctttctaagacctccggggacctgaagccacgttctgccagtgacgcgggcattagaggaactcctaaggtcagagctaaaaaagatgccgacgcaaacgccggactcacgtcttgcccccgtgcaaagccttcagtgcggcctaagccctttctgaatcgggccgagtcgcaatcacaagagaagatggatatctcgaccctgcgccggcagttacgccccacaggtcaacttaggggcggtctaaagggatccaaatcagaagacagcgagcttcccccccaaaccgcttcagaagctccctcagagggatcgcgaaggtccagcagcgacttgattactctacccgccacaaccccgccttgtcccaccaaaaaggaatgggaagggccagctacatcctatatgacctgcagcgcctaccagaaggtgcaagactccgagatcagttttcctgccggtgttgaagtccaagtactggaaaagcaggaaagtggctggtggtatgtgagattcggcgagctagaaggatgggccccaagtcactacctggtgctggacgagaacgagcagcccgatccatctggcaaggaactggacacagtgcctgctaaaggtcgccagaatgaggggaagagcgactcactggagaaaattgagcggcgcgtgcaggcactgaacacagttaatcaaagcaaaaaagcaactcctcccattccaagcaaacctccaggaggatttggcaaaacatccgggacgcccgctgtgaagatgcgcaacggcgtgcggcaggtagctgtgcgtccacagtcggtgtttgtatcccctccaccaaaggacaataacctgtcttgcgcccttcgccgtaatgaatcactgactgccaccgacgggctgaggggagtgcgcagaaactcatctttctccaccgcacggtccgccgcggccgaagccaaaggccgcctcgccgaacgggccgcttctcaggggagtgactcgccacttttgcctgcccagcggaacagcattcctgtgagccccgttcggcccaaaccaatcgaaaagagtcaatttatacataacaacctgaaagacgtttacgttagtattgcagattacgaaggggacgaagagacggctgggttccaggaaggggtgtccatggaagtactggagagaaatcctaatggttggtggtattgccagattctcgatggagtgaagccatttaaaggctgggtacccagcaactacctcgaaaaaaaaaactag

SEQ ID NO: 26331 - DNA, 1110 bp, synthetic construct
  misc_feature 1..1110: note = Description of Artificial Sequence: Synthetic coding sequence
  source 1..1110: mol_type = other DNA
atgagcatctgctgctgcttcttcttccgggactacggcagcagcaaaaggaaatccggggccgatgccactgctgagccaatgatcttagagcagtacgtggttgtgagtaactataaaaagcaggaaaattctgaactctccctgcaggccggcgaagtggtagacgtgatcgagaagaatgagagtgggtggtggtttgtctctacatccgaagagcagggatgggtaccagcaacctatttagaggcccaaaacggcaccagggatgatagcgacatcaacacctctaaaacaggcgaggtgtccaaacggcgaaaggcccacctgcgcagactggatagacgctggacactaggggggatggtgaatcggcaacactccagagaagaaaagtacgttactgtccagccatatacctctcagtctaaggacgaaattgggtttgagaaaggtgtgaccgtcgaggtcatcagaaagaatctcgagggctggtggtatatcaggtacctgggaaaagaaggttgggccccggcttcatatctgaagaaggccaaggacgacctcccaacaagaaaaaagaacctcgccggcccggtggagatcattggaaacattatggagatcagcaatctgctgaataagaaggcaagcggggacaaggagacaccccccgctgagggagagggccatgaagctccaatcgctaagaaagagatttcattaccaatcctttgtaacgcatccaatggctctgctgttggagtaccagacaggacagtgtcacggcttgcccaggggtccccagccgtggctaggattgcccctcagagagcccagattagctctccaaatctccgaacacgccctccaccgcggcgcgaatcctccctcacggagtccagatgccggcaggcgggggtgcagtggcatgacttgggctctcttcagtctccacatcctcgattcaaaagatttagctgtctatccctcctgtcttcctgggatcaccgccacatgccaccgcacccagccaactttctgatttttttgattgaaaccggctttcaccacgtagggcaggacgggctgcatttgctgacctcttag

SEQ ID NO: 26332 - DNA, 2898 bp, synthetic construct
  misc_feature 1..2898: note = Description of Artificial Sequence: Synthetic coding sequence
  source 1..2898: mol_type = other DNA
atgcccgtgaccgccaccggcaagatcctgttccggcggagccacatccgagacgtggccgtcaagaggctgaagcccatagacgaatattgccgggcactggtccggctccccccccatataagccagtgcgatgaggtgttcaggttcttcgaggctcgccctgaagacgtcaacccccccaaagaggattacgggagttccaagcggaaaagcggagctgatgcaaccgcggagccgatgatcctggagcagtacgtggtggtctccaactataaaaagcaggagaactccgaactttcgctccaggccggggaggtggtggatgtgattgagaaaaatgagagcggctggtggtttgtctccacatccgaggaacagggatgggtcccagccacgtatctggaagcccaaaacggtacacgagacgattctgatataaacacttccaaaacaggtgaagtctcaaagcggaggaaggcccaccttagacgacttgatcgacgctggaccctcggagggatggtgaacagacagcacagcagagaggaaaaatatgtcaccgtgcagccgtatacttcacagagcaaggacgaaatcgggtttgagaagggagttaccgtggaggtcattcgtaagaaccttgaggggtggtggtacatccggtacttggggaaagagggatgggctcctgcctcttatctgaaaaaggccaaggacgacctgcccacacgaaagaagaacttggcaggccccgttgaaattatcggcaacattatggagatcagtaatctgttgaacaaaaaggcgtcaggcgataaggagacaccccctgctgaaggggaaggtcacgaagctcccatcgccaaaaaggaaatctccctgcccattctctgtaacgctagcaacggatcagccgtgggtgtgccagacagaactgtctcacgactggcccagggtagccccgcagttgcacggatagcgccgcagcgggcccagatctctagtcccaatttacggacccgaccgccgcctcggcgagaatcgtctttaggattccagctgcccaaacctcctgagccaccatctgtcgaagtcgagtactacactatcgccgagttccaatcttgcattagcgatggaatctcatttaggggcggacagaaggccgaggtgatcgacaagaacagcgggggctggtggtatgtgcagatcggtgagaaagagggctgggcccctgctagttatatagacaagcgcaagaaacccaacctttcgcgccggacctcaacactgactcggccaaaagtgccaccacccgcccctcccagtaaaccaaaagaggccgaagaggggccaaccggggcgtccgaatctcaggactcccccaggaaactcaaatatgaagaacccgagtacgatattcccgcttttggattcgattcagaacccgagctcagcgaagagcccgttgaggatcgcgctagtggagagcgaagacccgcccagccacatagaccaagtcccgcgtcatcactacagcgagcacggtttaaggtgggcgaatcttccgaggatgtggccctggaagaagaaactatttatgaaaatgaggggtttaggccctatgccgaggacaccctatccgcgcgtggaagctctggagatagcgattccccagggagctcttctctctcgctaactcggaagaattccccaaaaagtggctctcccaagtcatccagtctgttaaagttaaaagcagagaagaacgcccaggccgagatgggtaagaaccacagctcggcatctttttcatctagtatcaccataaatacaacatgctgtagcagcagctcaagctccagtagctccctgtctaagacaagcggcgatctaaagcccaggtctgcgagcgacgctggaatccggggaaccccaaaagtcagagctaagaaggatgctgatgctaacgctggcctgacttcctgccccagggcgaaaccaagcgtcagacccaagccgttcctgaaccgagccgagagtcagagccaggaaaaaatggacattagcacgctgagacgccagctcaggcccaccgggcagctcaggggcggcttaaagggtagtaaaagcgaagattccgagctcccaccccagactgcgtccgaagctccgtcagaaggctcaagacgcagcagttccgatttgattacccttcctgcgaccacccccccctgtcctaccaaaaaagaatgggagggcccagcaacctcatacatgacatgcagcgcatatcaaaaggtgcaggactctgaaatcagctttcccgcaggtgtggaagtgcaagttctggaaaagcaggaaagcgggtggtggtatgtgaggtttggcgaacttgagggttgggccccaagccactatctggtacttgatgaaaatgagcagcccgacccgtctgggaaagagcttgacaccgtgcctgctaaagggcggcagaatgaggggaaatctgattcactggagaaaattgaaagacgggtccaggctttgaacactgtgaaccaatccaagaaggctacgcccccaattccatctaagcctcccggaggtttcggtaaaacgtccgggaccccagccgttaaaatgcgcaatggggttcgtcaggtggcggttaggcccatcgaaaaatcccagttcatccacaataatcttaaggacgtctacgtgtccatcgctgactacgagggcgatgaagaaacggccgggtttcaagagggagtttctatggaagtgctggagcggaatcccaatgggtggtggtattgccagattctggatggagtgaagccgttcaagggatgggttccaagtaactatctggagaagaagaactag

SEQ ID NO: 26333 - DNA, 2907 bp, synthetic construct
  misc_feature 1..2907: note = Description of Artificial Sequence: Synthetic coding sequence
  source 1..2907: mol_type = other DNA
atgatcctggagcagtacgtggtggtgagcaactacaagaagcaggagaactccgaattgagtctgcaggccggcgaagtggtagatgttatcgagaagaacgaatccggatggtggtttgtgagtacatcagaggagcaggggtgggtgccagctacctaccttgaagctcagaacggcaccagggacgatagcgacattaatacaagtaaaacaggggaagtgagcaaacggcgaaaagcgcatcttagacgtctggacagacggtggacgctcggaggaatggtgaataggcagcacagcagggaagaaaaatacgtcaccgttcagccctacactagccaaagtaaggacgagattggatttgagaaaggcgtaacagtggaggtgattcgaaaaaatctggaagggtggtggtacattagatacctcgggaaggagggatgggcccccgcctcttacctaaaaaaggcaaaagacgacctccccacacgcaagaaaaacctcgcgggcccggtggaaattatcgggaacatcatggaaattagcaaccttttgaataaaaaggcttctggggacaaagaaacgcccccagcagaaggcgaaggtcatgaggctcccatagccaaaaaagagatttccttgccgatcctctgtaatgcatcaaatggctcagccgtcggggtgccggaccgcacggtgagccgtttagctcaggggagtcctgccgtggctcgcatagcacctcagcgcgctcagatctcttctcctaacctgaggactcgccccccaccaagacgtgaaagttctcttggtttccaactgcctaagcccccggaaccacctagcgtagaagtggaatattataccatcgctgagtttcagagctgtatttctgatggaatcagctttaggggagggcagaaggcagaggtaatcgataagaattctggaggctggtggtatgtccaaattggagaaaaggagggatgggcccccgcaagttatattgataaacgcaaaaagccaaacctgtctcgccgtacttcgaccttaacccgccctaaggtgcctcctcccgcccccccctcgaagcctaaagaggcggaggaagggccaactggagcttcggagagccaggatagcccacggaaacttaagtacgaggagccagaatatgacattccagcctttggatttgattcagaaccggagttgtctgaagaaccagtagaagatcgcgcttccggagagcgccggccagcacagccgcaccgcccatctccagcgtcttccctccagagagctagattcaaggtgggcgagtcgtccgaggacgtcgctcttgaggaggaaactatctacgagaacgagggatttcgaccttatgctgaagatactttaagcgcgcgggggagcagcggtgatagcgattcacctgggagttcttctctgagcctgacccgaaaaaattcccccaagtctggatccccaaagagcagctctttgctcaagcttaaggcagaaaagaacgcacaggccgaaatgggcaaaaatcattcttctgcatcattctcatcttctattacaataaacacaacttgttgctcgagcagctcctcctcatctagcagcctctctaaaacatctggagatcttaaaccaagatccgccagcgacgccggcatccgtgggacacctaaggttagggcgaaaaaggacgccgatgctaacgcggggcttactagttgcccacgggcgaagccatccgtccggcctaaaccctttctaaatagagcagaatcgcagtctcaggaaaaaatggatatcagcactctacgccggcagttgcgcccgaccggacagctcaggggtggtctcaaggggtctaagtccgaggactccgagctaccacctcagactgcctcagaagctccctccgaggggtctcgtcgaagctcatctgatctgattacgcttccagctacaactccaccctgtccgaccaaaaaggaatgggagggccccgccacaagctatatgacgtgtagtgcctaccagaaggtgcaggatagcgaaatcagtttcccagctggtgtggaagtgcaggtgctggagaagcaggaaagtggctggtggtacgttcgctttggcgaactagaaggatgggccccctctcactacctggttctggatgagaatgaacagccagatcccagtggaaaggagctcgacaccgtgccagcaaagggacgacagaatgaaggcaagtccgattctctcgagaagattgagagacgggtacaagctctgaacacggtgaatcagagcaaaaaagctacgcctcccatcccttcaaaaccacccggggggtttggtaaaacatccggcaccccagcggtcaaaatgagaaacggagtacgtcaggtcgctgtgcggccacagtcagtgttcgtcagtcccccacccaaagacaacaacctgtcttgtgcgctacgaaggaacgagagcttgactgctactgatggcctccgcggggtccgccgcaattcgagcttcagtactgcccgctccgccgcagctgaagccaaggggcggctcgccgagagagctgcctctcagggcagcgatagccccctgctgcccgctcaacgaaatagtattccggtttcccctgttagacccaaaccgatcgagaagagccagtttatccacaacaatctcaaggacgtctatgtatcaatcgcggactacgagggagatgaggagacggccggattccaggaaggcgtttcgatggaggttcttgaaagaaatccaaacggctggtggtactgccagatcttggacggtgtcaagccctttaaaggatgggtgccatccaactacctcgagaagaagaactag

SEQ ID NO: 26334 - DNA, 3003 bp, synthetic construct
  misc_feature 1..3003: note = Description of Artificial Sequence: Synthetic coding sequence
  source 1..3003: mol_type = other DNA
atgaacggcagcttcctgctgcggctgctgttccccgtggccagcatcttgcctgaaacggtgttgctacgcggcgccgacgccactgcagagccaatgattttggagcagtatgtggtcgtgagcaactataagaagcaggaaaattctgaactgtccctgcaggcgggagaagttgtggatgtaattgaaaaaaatgagagtgggtggtggttcgtgtctacaagcgaagaacaaggctgggtccccgctacctatttagaggctcagaatgggactcgggatgactcagatatcaatacatcaaagactggcgaagtctcgaagcgcaggaaagcccaccttagaagactggatcggaggtggaccctcggcggtatggtcaatcgccagcatagtagggaagaaaagtacgtgactgtgcaaccttacacctcccagagcaaagatgaaataggcttcgagaagggcgttacagttgaagtgataagaaagaatctggaaggatggtggtacatccgttatctgggcaaagaaggctgggctcccgcctcatacttgaagaaagctaaggatgaccttcctacccggaagaagaatctcgccggcccggtcgagatcatcggtaacatcatggaaatcagcaatctgctgaataagaaggcaagtggcgacaaggaaactccgcccgctgaaggagaaggccacgaagcccccatagccaaaaaggaaattagcttaccgatcctatgcaacgcttccaacgggagcgccgtcggtgtcccggataggactgtctcaaggctcgcccagggaagtccggccgtggctagaatcgcgccccaaagagctcagatctcctccccaaacctgcgcacacggcccccaccaagacgggagagttctctcggtttccagctgccgaagccaccagagcccccttcagtggaagtagagtactatactatagccgaattccaaagttgcatctccgatgggatcagtttcaggggcggccagaaggccgaggtgattgacaaaaattccggaggctggtggtacgtgcaaattggcgaaaaagagggatgggcgccagctagctatatagacaagagaaagaaaccaaacttatcacgccgcaccagcacccttacaagaccaaaggtgcctccgcctgcccccccatcaaagccaaaagaagccgaagaaggtccaacaggagcttccgagagccaggactcccccagaaagttgaagtacgaagagccagagtacgacattcccgcctttggattcgatagcgaacccgaactctctgaggagcctgtggaggacagagccagtggcgaacggagaccagcccagcctcacagacctagcccagcaagctccctccagcgcgcccggtttaaggtgggagagagttcggaggatgtggctctggaagaagagacgatttacgagaatgaagggtttaggccctacgctgaggacaccctgagtgcccgggggtctagcggggattctgattcgcctggatcatcttctttgtcgctgacccggaagaacagcccaaaaagtggctctccaaagagcagcagccttttgaaactgaaagcagaaaagaacgcccaggccgagatggggaagaaccatagcagcgcttccttctcttctagcattaccattaacactacctgctgcagtagtagctccagctcgtcttcctcactttccaaaacctccggcgacctgaaaccaaggagcgcatcagatgccggcattagaggcactccaaaagttcgcgccaagaaagatgccgacgctaatgcaggattaactagctgtccacgcgccaagccttctgtgcggcctaaacccttcctcaaccgagccgagagccaatcacaagaaaagatggatatttctactctgcggaggcagctcaggcccacaggccagctgcgcgggggtctgaagggttcaaaaagcgaagactcagagcttcctccacagacagcctccgaggcaccgagtgagggaagccggcggagtagctccgacctgataactctgccagctacgactcctccttgccctacaaagaaggaatgggaagggccagctactagttatatgacttgtagcgcatatcagaaagtacaggacagcgaaataagttttccggccggtgtggaagtccaggtactcgagaagcaggaatccggttggtggtacgtccggtttggtgaattagaggggtgggcccctagtcattatctcgtgctggacgagaacgagcagccagatccgagcggcaaggagctggacaccgtgccagctaaaggccggcagaacgagggtaaaagcgattctcttgaaaagatcgagagaagagtccaggcgcttaatactgttaatcagtccaaaaaggctaccccccccatcccttccaagccgcccggcggcttcgggaagaccagcggcacaccagccgtgaaaatgagaaacggtgtgcggcaggtagctgtccggccccagtccgtgtttgtgagccctccgcctaaggataataatctgtcctgtgcactacgccgcaatgagtccttgacagccactgatgggctccgcggagtgcggcgcaactcctctttctctacagcacgcagcgcggcggcggaggccaaaggcagactcgcggagcgtgcggcatcccagggttcagattccccactcctgccagcccaacggaacagcattccagtgtcccccgtgcgtcccaagccgatcgagaaaagtcagttcatccataacaatctcaaggacgtctatgtgtccatcgccgactacgaaggggacgaggaaactgccggtttccaggaaggggtgtctatggaagtgctggagcgaaaccctaatggctggtggtactgtcagatactggatggcgtcaaacccttcaagggctgggtccccagcaattacctcgagaaaaagaattag

SEQ ID NO: 26335 - DNA, 414 bp, synthetic construct
  misc_feature 1..414: note = Description of Artificial Sequence: Synthetic coding sequence
  source 1..414: mol_type = other DNA
atgaacaagctgagcggcggcggcggccggcggacccgggtggagggcgggcaactcggaggtgaagaatggacgagacacggctcttttgttaataaacctacgcgagggtggcttcacccaaacgacaaagtaatggggcccggcgtcagttatctggttagatatatgggctgtgtcgaagtgctccagtctatgcgtgccctggatttcaacactcggacacaggtgacgcgagaagctataagcctggtctgcgaagccgtgccaggggccaaaggtgccacaaggcgtcgcaaaccatgttccagacccctaagtagcattctgggtagatcgaatctgaagttcgcaggaatgcccatcaccctaactgtcagcaccagttctctgaacctaatggccgcggactag

SEQ ID NO: 26336 - DNA, 918 bp, synthetic construct
  misc_feature 1..918: note = Description of Artificial Sequence: Synthetic coding sequence
  source 1..918: mol_type = other DNA
atggccggcttcgacggcagcgcctgggacgaggaggaggaggagcctccagaccaccagtattataatgatttcccaggcaaagaaccccccctgggtggagtggttgatatgagactcagggagggcgctgcccctggagctgccagaccaaccgctcctaacgcccagacccctagccacctgggcgccaccctccccgtgggccagcccgtcggaggagatcctgaggtgaggaagcagatgcccccaccccctccctgccccggccgcgaactgtttgatgacccatcttacgtgaacgtgcagaacctggataaagctaggcaggctgttggaggagcaggccccccaaatccagccatcaacgggagtgccccacgcgatctgttcgatatgaaacctttcgaagatgccctgcgcgttcctccaccccctcagagtgtgtcaatggcagagcagctcagaggcgagccatggtttcacgggaagctatcgcgaagagaggcagaggcactgctgcagctgaatggagacttcctggtccgagagtccacgaccacgccaggacaatacgtgctgacgggcttgcagtctggccagcctaaacaccttttgcttgtggaccccgagggggtgcgatggggcttcgccatgttacccaaactctttctgaatagccgtgcccaggtgatccgtctgcctcgtcctccaagggtgttgggcctccaggcaagaactactatgccgtctctgcacatttttttctgtactgtctatacgctgctgcgacacgctaacttcctgcaggtcaaaaagggcgtctattcaagtcaactgcacagctttcgagcagacgtagcatttgcttttagccatttcaccgatctgtccatacctacaaccgtgtctttttag

SEQ ID NO: 26337 - DNA, 1563 bp, synthetic construct
  misc_feature 1..1563: note = Description of Artificial Sequence: Synthetic coding sequence
  source 1..1563: mol_type = other DNA
atgagcaacctgcggctggccaaccccgccggcggccggcccggcagtaaaggtgaaccaggcagggccgccgacgacggggaaggcatcgttggtgcggctatgcctgattctggtccactgccgctgttacaggacatgaacaagctctccggagggggtggacgacggactagggttgaaggtggtcaactgggcggagaggagtggacaaggcacggctcgtttgtaaacaaaccaactcgtgggtggttgcatcccaacgacaaggtgatgggacccggcgtgagctatcttgtgcgctacatgggctgcgtcgaggtgctgcagtccatgcgggccttggattttaatactagaactcaagtgacccgagaggcaataagtctcgtgtgtgaggccgttcccggcgcaaaaggcgccacccgccgtcggaaaccctgttcacgcccgctcagttccatcctggggcgcagtaatttgaagttcgctggcatgcctattacactgactgttagcacatcttctctcaatctgatggcagccgactgtaaacagatcattgctaatcatcacatgcagtctatttctttcgcttccgggggcgatcctgatactgctgagtacgtagcttatgttgctaaggacccagtgaaccagagggcttgtcatattcttgagtgccctgagggccttgcacaggatgtaattagcacaatcggacaagcctttgagctgcgatttaaacagtacctgaggaacccacccaaactggtgactccccacgataggatggccggattcgacggcagtgcctgggatgaggaggaggaggagccgcctgaccaccagtactacaacgattttccaggcaaggagccgccactaggcggggtggtggacatgcgtctcagggagggcgctgcccccggtgctgcacggcccacagccccaaacgctcagacaccaagccacttaggcgccacccttcctgtcggccagcctgtaggtggcgatccagaagtgcgcaagcaaatgcctccacctcctccatgtcctgctgggagagagctgttcgacgatcccagttacgtcaatgttcaaaacctggacaaggctcgacaggcggttgggggggctgggcctcccaacccagccattaatggcagtgcccctagagatctattcgatatgaaacccttcgaggacgcactgagggttcccccccctcctcaaagtgtctcaatggccgaacaattgcgcggcgagccatggttccatggcaaattgtcaagaagagaagccgaagccttactccagctgaatggtgatttcctggtgcgagagagtaccactacacccggccagtacgtgctgacaggcctgcaatcaggccagcctaaacatttactcttggtggaccccgagggcgtcgtgaggacaaaagatcaccggtttgaatcggtgagtcacctgataagctaccacatggataaccatttgccgattattagcgcaggtagcgaactttgtcttcaacagccagttgagcggaagctttag

SEQ ID NO: 26338 - DNA, 1752 bp, synthetic construct
  misc_feature 1..1752: note = Description of Artificial Sequence: Synthetic coding sequence
  source 1..1752: mol_type = other DNA
atggacctgctgccccccaagcccaagtacaaccccctgcggaacgaatcgctgagctctctagaggagggtgcgtccggttctacccccccagaagagctgccttctccttctgcgagttctctcggaccaattttgcctcccttgcccggtgatgacagccctaccactctttgttcgttcttcccacgcatgagcaatctccgcttggcaaatccagcgggaggccggcccggttctaagggcgagccgggcagggcagccgatgatggtgaggggatcgttggcgccgccatgccagatagcggtcccctgccacttttgcaagatatgaataaacttagcggcggcggtgggcggaggactcgggtggagggagggcagctagggggtgaagagtggacccgtcatggttctttcgttaacaagcccacacgcggttggctgcacccaaatgataaggtgatgggccccggagtgagctacctggttaggtatatgggttgtgtggaagtactccaaagcatgagagctctcgactttaacaccaggacacaagttacccgggaggcgatctctcttgtctgtgaagccgtgcccggggccaaaggagccacccgaagaaggaagccatgtagcaggcctctctcttcaatcctggggaggagtaatctgaaatttgcgggcatgcccattacactcaccgtgagtacatcttcactgaatctgatggctgcagactgtaagcagattatagccaatcaccacatgcagtcaatctcctttgcctctgggggggaccccgataccgccgaatatgtagcctatgttgcaaaggaccctgtgaaccagcgagcctgtcacatccttgagtgtcctgaggggctggcacaagacgtgatcagcactatcggacaggcatttgagctgaggtttaagcagtatcttagaaatccgccaaagctcgtcactccccacgatagaatggccggattcgacggcagcgcctgggatgaggaggaggaggagccccccgatcaccagtattacaacgattttcccggcaaggagccccccctggggggggttgtagatatgagacttagggagggagctgctcccggcgctgcacggcccactgcccccaatgcccagaccccgagccacctcggagctacactgccagtgggccagcctgttggtggtgaccccgaagtgcgaaagcagatgccgcccccgcccccatgtcccgggcgtgagctgttcgatgatccttcttacgtgaacgtacagaacttggacaaggccaggcaggccgtgggtggggcgggtcctcctaaccctgccattaatggctccgccccgcgggacttgttcgacatgaagccatttgaggatgccctgagggtgccaccccctccgcagtcagtcagcatggcagagcagctgcgtggtgaaccatggtttcacgggaagctgagccggcgggaggctgaagcgcttcttcagctgaacggagacttcctagtgagagaatcgactactactcctgggcagtatgtgctcactggcctccagtcagggcagcctaagcacctgctactcgtggaccccgagggtgtggtgcgcactaaagatcaccggttcgaatcagtgagtcatctgatttcttaccatatggacaaccacctacccattatatccgcggggtcagaattgtgcctgcagcagcccgtggaacgaaaactatag

SEQ ID NO: 26339 - DNA, 1155 bp, synthetic construct
  misc_feature 1..1155: note = Description of Artificial Sequence: Synthetic coding sequence
  source 1..1155: mol_type = other DNA
atggacctgctgccccccaagcccaagtacaaccccctgcggaacgagtcattgagcatccttgggaggtccaaccttaagttcgcaggaatgccaattactctgactgtatccacctcttcgctgaacctgatggcggccgattgtaaacagataatcgccaatcatcatatgcaatcaattagtttcgcaagtggtggcgaccccgatacagcagaatatgtagcatatgtggccaaagatccagtcaaccagagggcctgccatattctggagtgtccagaaggcctggcccaggatgttattagcaccattggacaggctttcgagctgaggtttaaacagtatctcaggaaccctcccaagctggtgaccccccatgatcgcatggcaggtttcgacggcagtgcttgggacgaggaggaggaggaaccccctgatcaccagtactataatgatttccctggcaaagagcctcctctgggaggcgtcgttgacatgaggcttcgtgaaggcgccgcccctggtgctgcccggccaacggccccaaatgctcaaacaccatcccacctgggcgcaacactacccgtggggcaacctgttggaggcgaccccgaagtgagaaagcagatgccccctccgcctccttgtcctggtcgcgagttgttcgacgaccccagctatgtcaatgtgcagaacctggataaagcccgacaagcagtgggtggagcaggcccacccaatcccgcaatcaacggatcagcccccagagacctgtttgatatgaagccctttgaggatgctctgcgagttccacctcccccccagtctgtgagcatggccgagcagctacgcggcgagccatggttccacgggaaactgagcagacgggaggccgaagcattgttacagttaaacggtgactttctcgtaagagagagcaccacaacacccggccagtacgttctcacaggccttcaaagcggccagcccaagcacctgttgctggtggaccccgaaggcgtagtgagaactaaagatcataggttcgaaagcgtgagtcacctcatttcataccatatggataatcacctacctattattagcgccggttctgagttgtgtctacagcagcctgtggaaagaaaactgtag

SEQ ID NO: 26340 - DNA, 1422 bp, synthetic construct
  misc_feature 1..1422: note = Description of Artificial Sequence: Synthetic coding sequence
  source 1..1422: mol_type = other DNA
atgaacaagctgagcggcggcggcggccggcggacccgggtggaggggggccaactggggggagaagagtggacccgccatgggtcttttgttaacaagcccactagagggtggcttcatcctaatgacaaggtgatgggccctggggtcagctacctggtacggtacatgggctgcgttgaggtccttcaatccatgagggcgctcgacttcaatacgcggacccaagtgacacgggaagcaatctctctcgtttgcgaggctgtgccaggggctaagggtgccacgcggaggcgaaagccttgttccaggccacttagcagcattctagggcgttcgaacttaaaattcgccggcatgccgatcaccctgaccgtcagtacttcaagcttgaatctcatggccgcagattgtaaacaaattatcgcaaatcaccacatgcagtcaatttcgttcgctagcggtggggaccctgacaccgccgaatatgtagcatacgtggcaaaagatcccgtcaatcaaagagcatgccacattctagaatgcccagagggactcgcacaggacgtaatctccactatcggccaggcgtttgaattacgtttcaagcaatatctgcgaaaccctcctaaattggtaaccccccatgataggatggccgggtttgacgggagcgcatgggacgaagaggaggaagaaccacctgatcaccagtactataatgattttccggggaaagaacccccgctggggggcgtcgttgacatgcgactgagggaaggcgccgcccccggagctgcacgaccaacagccccgaacgctcagacgcccagtcacctcggtgccaccctccctgtgggtcaaccagtgggaggagacccagaagtacggaaacagatgcccccgccacccccttgtcctgggcgagaactgttcgatgacccctcttacgtgaatgtccaaaatctcgataaagcccgacaggctgtgggcggagccggccctcctaatcctgctataaacgggagtgcccctcgtgatctctttgatatgaagccatttgaggacgctttacgggtaccgcctcccccacagtccgtgtctatggcagaacaattacggggcgagccgtggttccacggaaagttaagtcggagggaggccgaggctctgctacagctgaacggggattttctcgtgcgagaatctaccactaccccaggacagtacgtccttactggactacagtcagggcagcccaaacatctcctgttggtggaccccgagggagtggtgcgaaccaaagatcacaggttcgaaagcgtgagccatttaatctcgtatcacatggataaccatttgccaatcatatctgccgggagcgagctgtgccttcagcagcctgtggagcgtaaactgtag

SEQ ID NO: 26341 - DNA, 1425 bp, synthetic construct
  misc_feature 1..1425: note = Description of Artificial Sequence: Synthetic coding sequence
  source 1..1425: mol_type = other DNA
atgaacaagctgagcggcggcggcggccggcggacccgggtggagggaggacaactgggcggagaggagtggactcgccacggatcctttgtgaacaagcctactaggggatggttacacccgaatgataaagtgatgggaccgggcgtgagttacttggtccggtacatgggctgcgtggaggtgttacaaagcatgcgagccctggatttcaatacccggactcaggtcactcgcgaggccatcagtctcgtgtgcgaagccgttcccggggccaaaggcgccactagacgtcggaaaccatgcagccgcccactgagttcaatcctggggcgctcaaacctgaagttcgccggtatgcccatcaccctgaccgttagcacctcctccctcaacctcatggctgcggattgcaagcagataatcgcaaaccaccatatgcagtctataagcttcgctagcggaggggatccggacactgctgagtacgtggcctatgtggccaaagatccggtaaatcagcgggcatgccacatcctcgagtgtccagagggactggcacaggatgtaatttcaacaattggccaggcgtttgaactacgcttcaagcagtatctgagaaacccccccaaacttgttacacctcatgaccggatggcaggatttgacggttcggcttgggacgaagaagaagaggagccccccgaccaccagtattataatgacttccccggaaaggagccccctctgggaggcgttgttgatatgcgcttgcgagaaggtgctgctccgggcgcagctcgccctacagcccccaacgcgcagacaccaagccatctgggggccacactccccgtcggacagcccgtcgggggcgatcctgaggtacgcaaacagatgcctcctccccctccatgtcccgcgggaagggagttgttcgatgatcccagctacgtgaatgttcagaatctggacaaagcgaggcaggcggtggggggcgccggacctcctaaccccgctatcaacggctcggctccccgcgacttgtttgatatgaaacccttcgaggacgctcttcgtgtgcctcccccaccccagtctgtctctatggctgagcaactcagaggcgaaccttggtttcacgggaagcttagtaggcgcgaagctgaagccttacttcaattgaacggagatttcctcgtgagagaatctaccacaacccctggtcaatacgtcctcacgggactccagagcggacagcccaagcatctgctgctggtggaccctgagggcgtcgtgcgtaccaaggaccacaggtttgagtccgttagccacctaatttcttatcacatggataatcatctccctatcatttctgcgggcagcgaactctgtcttcagcaaccagttgagcggaaactgtag

SEQ ID NO: 26342 - DNA, 603 bp, synthetic construct
  misc_feature 1..603: note = Description of Artificial Sequence: Synthetic coding sequence
  source 1..603: mol_type = other DNA
atgaacaagctgagcggcggcggcggccggcggacccgggtggagggaggccaactgggcggggaagagtggacacgtcatggctcttttgtaaataagcccacaagggggtggctgcacccaaacgataaggtgatgggcccaggggtctcttatctggtgcgatacatgggctgtgtggaggtattacaaagtatgcgcgcactggatttcaacacgcggactcaggtaacgcgcgaagccatcagtctggtctgcgaggccgtgcctggtgccaagggtgcaaccaggaggcgtaagccatgctcgcggcctctctcctctattttgggccggagtaatctgaaattcgccggcatgcccattacactgaccgtatccacaagctcccttaacctgatggccgcggactgcaagcaagatacagctgaatacgttgcttatgtcgcaaaggatccggtaaaccagagagcctgtcacatcttggaatgtcccgaaggtctcgctcaggacgtcatctccactattggccaagcttttgaactgcggtttaagcagtacctgcgcaacccacccaaactcgtcactccccacgacagatag

SEQ ID NO: 26343 - DNA, 603 bp, synthetic construct
  misc_feature 1..603: note = Description of Artificial Sequence: Synthetic coding sequence
  source 1..603: mol_type = other DNA
atgcccatcaccctgaccgtgagcaccagcagcctgaacctgatggcagctgattgtaagcaggatacggctgagtacgttgcctatgtggccaaggatccggtcaatcagagggcctgtcacatactggagtgtcctgaaggacttgcacaagatgtgatctctacaatcggacaggcctttgaactgcgtttcaaacagtatctgagaaatccacccaaactggttactccgcacgaccgaatggccggcttcgatggatccgcttgggatgaagaggaggaagagccccctgatcatcaatactataacgatttccctggtaaggagcccccccttggtggtgtggtagacatgaggttacgtgagggagccgctccgggtgcagctcggcctaccgctccgaacgcacagacgccctcccatcttggagctactctgcccgtgggacaacccgtgggaggagacccagaggtacggaagcagatgcccccgccaccaccatgccccgcaggcagagagttgtttgacgaccccagttatgtgaacgttcagaacctggacaaggcacgccaagccgttggcggcgctgggcccccgtag

SEQ ID NO: 26344 - DNA, 393 bp, synthetic construct
  misc_feature 1..393: note = Description of Artificial Sequence: Synthetic coding sequence
  source 1..393: mol_type = other DNA
atgcccatcaccctgaccgtgagcaccagcagcctgaacctgatggcggctgattgtaaacaaatcatagcaaatcatcacatgcagtcaattagcttcgcatctggcggtgatcccgacaccgctgagtatgtggcctacgtcgcaaaggatccagtgaatcagcgggcttgccatatcctggaatgccccgaaggccttgctcaggacgttattagcacaatcggccaagctttcgagcttagattcaagcagtatctgcgcaacccccctaaactcgtgacgcctcacgatagaatggcaggcttcgatggatctgcttgggatgaggaggaggaggagccccctgatcatcaatattacaacgattttccgggaaaggagcctccatag

SEQ ID NO: 26345 - DNA, 894 bp, synthetic construct
  misc_feature 1..894: note = Description of Artificial Sequence: Synthetic coding sequence
  source 1..894: mol_type = other DNA
tgagacgaggaggaggaggagccccccgaccaccagtactacaacgacttccccggaaaagagccaccactcggcggcgtcgtggatatgcgccttcgtgaaggagctgcccctggggcagccaggcccactgctcctaacgcacagactcctagccacctgggggctacactcccggtgggtcagcccgttgggggggatcctgaagtccgcaagcagatgcctccaccacctccatgccctgggcgagaacttttcgatgacccgagctatgttaacgtgcagaacctggacaaggctaggcaggccgtggggggagcaggtccgccaaacccagctattaatgggagtgctccgcgcgatctcttcgacatgaaaccattcgaggacgcactccgcgttccccctccgcctcaatctgtaagtatggcggagcagctgcgcggggaaccatggttccatggaaagctatcccgccgcgaagctgaggccctccttcagctgaacggtgattttctagtacgggagagcaccactacaccgggccagtatgtgctcacaggactccagtctgggcagccaaagcacctgttactggtagatccagagggcgttaggtggggattcgctatgcttcctaaactctttctcaactccagggctcaagtaatccgtctaccgcgccccccccgcgtactgggactgcaggctcgtacaacgatgccttctttgcacattttcttttgcaccgtatacactctgctgaggcacgccaacttccttcaggtgaaaaaaggcgtgtatagctcacaactgcacagctttagagcggacgtcgctttcgccttcagtcactttacagacctgagcatccccacgacagtctcattttag

SEQ ID NO: 26346 - DNA, 1755 bp, synthetic construct
  misc_feature 1..1755: note = Description of Artificial Sequence: Synthetic coding sequence
  source 1..1755: mol_type = other DNA
atggacctgctgccccccaagcccaagtacaaccccctgcggaacgaatctctgagtagcctcgaggaaggggcctcagggtcgacccccccagaggaactcccatcgccaagtgcgtcttccctgggcccgatattgccaccgttaccaggtgacgacagccctaccactctttgctcattcttccctaggatgtccaatctgcggctcgccaaccctgcaggggggaggccagggagcaagggtgagcccggccgtgctgccgacgacggcgaaggcatcgtcggagcagcaatgcccgattctggcccactcccactattacaggatatgaacaaattgtcaggaggagggggtcgtcggacgcgggtcgaaggcggacagctggggggggaggaatggacgagacatggctcatttgtaaacaagccgacgcgcggctggctgcaccctaacgacaaagttatgggacccggagtgagctacctggttagatacatggggtgtgtcgaagtcctgcagagtatgagggctctcgatttcaatacgcgcacccaggttacccgggaggccatatcgctggtctgtgaggcagtccctggggccaaaggggcaactcgacgtcgtaagccctgtagccggcccctgagttcaatcctcggcaggtctaacctgaaattcgccggcatgcccattactctgactgttagcactagtagtcttaatttgatggcggccgactgtaaacaaatcatagcgaaccatcacatgcagagtatatctttcgcttcagggggtgaccctgatactgcggagtatgttgcttatgtcgcgaaagaccccgtgaatcagcgggcgtgtcacatattggagtgcccagagggcctggcccaggatgtgatttccaccattggccaggcttttgagctaagatttaaacaatacctgcgaaatcctccaaaacttgtcaccccccatgaccgaatggccgggtttgacgggtccgcctgggatgaagaggaagaggaaccaccagaccatcaatattacaacgactttcctggcaaggaaccccctctgggcggagtcgttgatatgaggctgcgcgaaggggccgcccctggggcagccagaccaacagctcccaacgcccaaaccccttcccatctgggagccaccctgcctgttggtcagccggtcggaggagaccctgaggtgcgcaagcagatgcccccgccacccccttgcccggccggacgggagttattcgacgacccttcttacgttaacgtgcagaacctggataaggctcgccaggcagtcggcggtgccggaccacccaatccagcaattaatgggtctgctccccgagaccttttcgacatgaagccatttgaggacgccctccgggtgccaccacccccacagtctgtgtccatggcggagcagttgcgtggggaaccttggtttcatggaaagctgtccagaagggaggccgaagcacttctccaattaaacggtgacttcctggtccgggagagtaccaccacgcccgggcagtacgttctgacaggtctccaatctgggcagcctaagcatctactgctcgtggacccagagggggtcgtccggacaaaggatcacagatttgagtccgtgagccacttaatctcctatcacatggacaatcaccttcctatcatcagcgctggcagcgagctctgtctccagcagcctgtcgaacgaaagctgtag

SEQ ID NO: 26347 - DNA, 1749 bp, synthetic construct
  misc_feature 1..1749: note = Description of Artificial Sequence: Synthetic coding sequence
  source 1..1749: mol_type = other DNA
atgacccagggccccggcggccgggccccccccgccccccccgcccctcctgaacctgaagcacccacaacgttctgcgccttactaccccgtatgccacaatggaagttcgcagcacctgggggctttctggggcgcggtcctgcagcagcacgggccgccggtgcatcgggcggagccgatcctcagcccgagcccgccgggcccggaggagtccctgccttggcagcagccgtattaggagcgtgcgaaccccgttgcgccgccccttgccccctgccagccctgtcacgttgtaggggagctgggtctaggggctctcgggggggcagaggagccgcggggtctggggacgccgcagcagcagcggagtggattagaaagggaagtttcattcacaaacctgctcacggatggttacatcccgacgcaagggtactgggacccggagtcagctacgttgtccgctatatgggatgcattgaggtgttacggtctatgaggtctctggacttcaacacgaggacacaggtcactagagaggccataaatcgtctgcatgaagcggtgccaggggtgagaggttcctggaaaaaaaaggctcctaataaggccctggcatcggtcctagggaaatccaatttgcgtttcgcgggcatgagtattagcattcatatttctaccgacggactgtccctgagcgttcctgccacgaggcaagtgatcgctaaccatcacatgccatctataagttttgcttcgggtggcgacaccgacatgactgactacgtggcgtacgtggccaaggatcctattaaccagcgggcctgccatatattagagtgctgtgaaggccttgctcagagcataatttccaccgtggggcaggcctttgaattaaggttcaagcagtatctgcattccccccctaaggttgcattgccacccgagcggctcgccggccctgaagaatctgcgtggggagatgaggaagattcactggagcacaactactacaattcgattcctggtaaagagcctcctttagggggtctcgtggactccagacttgcgcttacacagccttgtgccctgacggccctcgaccagggcccatctccttcattacgcgacgcctgctccctcccttgggatgtgggcagcaccggaacagctccacccggagacggctatgtgcaggcagacgcccgtggaccacctgatcacgaagaacacctatacgtgaacacccaaggcctcgatgcacctgaacctgaagactccccaaaaaaggacctgtttgatatgcgacctttcgaggacgcactcaaactgcacgaatgctccgttgcggccggagtcactgcggcccctctccctctggaggatcaatggccgtccccacccactaggcgggctcccgtggcccccaccgaggagcaactgcgacaggagccatggtatcacggtaggatgtctaggcgcgctgctgagagaatgttaagggcagacggagactttctggttcgagactctgttactaaccctgggcaatacgttctcaccgggatgcacgcaggccaaccaaaacacctccttctggtcgaccctgagggggtcgtacgtacaaaagacgtcttgttcgagagcatctcgcacttgattgatcaccatctgcagaatgggcaaccaatcgtagcagctgagtccgaactacatctccggggggtggtcagcagagagccttag

SEQ ID NO: 26348 - DNA, 1833 bp, synthetic construct
  misc_feature 1..1833: note = Description of Artificial Sequence: Synthetic coding sequence
  source 1..1833: mol_type = other DNA
atgctggacttcttcaccatcttcagcaagggcggcctggtgctgtggtgcttccagggtgtgagcgacagctgtacaggccctgtgaatgccctgatccgaagtgtgttactccaggttgggtttcagaaaatactaactctcacctatgttgacaaactcattgatgacgtacataggctgtttcgtgataagtaccgcaccgagatccaacaacaaagtgcattaagccttctcaacggcaccttcgatttccagaatgacttcttacggctgctccgcgaggccgaggagtcaagtaaaattcgggcacccactactatgaaaaagttcgaggactccgagaaggcgaaaaaacccgtgcggtcgatgattgagacccgcggtgagaaacccaaagagaaagctaagaattctaagaagaagggcgctaaaaaagaaggcagtgatggaccgcttgccacaagcaagccagtacccgctgagaaatctggcctgcccgtcggcccggaaaacggagtggaattaagcaaagaggaattgatccggaggaagagagaggaattcatacagaaacacgggagggggatggaaaagtctaataagtcaaccaagtcggatgcgccgaaggagaaaggaaaaaaggccccccgagtatgggagctgggcggctgcgctaataaagaggtgctagattacagcacacctacgacgaatggtacacccgaagctgccctctctgaagatatcaatctgatcagaggcacaggatcaggagggcagctgcaggatctggactgttcatcatctgatgatgagggggcagcgcagaattcaaccaagcccagcgcaacaaaagggactcttggcgggatgtttggaatgctcaaaggtctggtgggcagcaagagcctgagccgcgaagatatggagtccgtgctggacaagatgagggaccatctgatcgctaagaacgttgccgccgatatcgccgtgcaactttgcgagtctgtggccaacaagttggagggaaaggtcatgggtactttctctacggttacatctacagtgaaacaggccctgcaagaatccctggtccagattctgcagccccaacgacgggttgatatgctgagagatattatggacgctcagaggagacaacggccctacgttgtaactttttgtggagtcaacggggttggaaagagcaccaatctggcaaaaatttctttttggttgcttgagaatggcttttccgtgctcattgcagcctgcgacactttcagagccggggctgttgagcagttacgtacacatactaggaggctgtccgccttgcaccctcctgagaagcacgggggcaggaccatggtccagcttttcgagaaaggatacggaaaagacgcagcaggcatcgctatggaagccatcgcgtttgcgcgaaaccagggattcgacgtcgttctagtcgacaccgccggccgcatgcaggacaatgccccactgatgacagcccttgctaaactgatcacagttaacacgcccgatttggtattgtttgtgggcgaggcactagtgggcaacgaggccgtggatcagcttgttaagttcaaccgagcattggcagaccactcaatggcccagacacccaggctcatcgacggaatcgtcctgacgaagttcgacacaatcgacgataaggttggcgccgcaatttccatgacttatatcaccagcaagcccatcgtgttcgttggaaccggacagacttattgcgacctgagaagcctgaacgcgaaggccgtcgtggctgccctcatgaaggcctag

SEQ ID NO: 26349 - DNA, 2253 bp, synthetic construct
  misc_feature 1..2253: note = Description of Artificial Sequence: Synthetic coding sequence
  source 1..2253: mol_type = other DNA
atgagccagtggtacgagctgcagcagctggacagcaagttcctggagcaggtgcaccagttatacgatgactcattccccatggaaatccggcaatatctggcccaatggctcgagaaacaagattgggaacacgccgctaacgacgtttccttcgccacaatacggtttcacgatctgctcagccagcttgatgaccagtattcccgattttctctggagaacaactttttgctacagcacaacattcggaagtccaagcgcaatctgcaggacaattttcaagaggatccgatccagatgagcatgattatctactcctgtctgaaagaggaacgcaaaattttggagaatgcccagcgctttaaccaggcacagtccggcaatattcaatcaactgtaatgctggataaacagaaagagctggattctaaggtaagaaatgtaaaagacaaggttatgtgcatcgagcacgagatcaagagcctcgaagacctgcaggatgaatacgattttaagtgtaaaacgcttcagaaccgggagcacgaaaccaatggggtggccaagagtgatcaaaagcaggaacaactgctgctgaaaaaaatgtacctgatgctcgataacaagcggaaggaagtggtacataagatcatcgaacttctgaatgtcacggaactaacccagaacgccctcataaacgatgaactggttgagtggaagaggaggcagcaaagcgcctgtataggggggcctccaaacgcctgtctggaccaactgcagaactggtttactatcgtggcagaatccctccagcaggtgaggcagcagttaaaaaaactggaggagctcgagcagaaatacacgtatgagcacgatccgatcacgaaaaataagcaagtgctgtgggatcgaactttctccttatttcagcagctgatccagtctagctttgtcgtagagcgtcagccttgtatgcccacacaccctcagcgacctctggtgctaaagaccggcgtccagtttactgtaaagcttcggctcctggtgaaactgcaggagctcaattacaatctcaaagtcaaagttctgtttgacaaggacgtcaatgagagaaacactgttaaaggatttaggaaatttaacatcctggggacacacactaaggtgatgaacatggaggagtcaacaaatggatctttggcggcagagttccggcacttacagctgaaagagcagaaaaacgccggtacgagaactaacgagggacctcttattgtcacagaagagctgcacagcctgtcatttgagacccaactgtgccagccagggctggttattgacctggaaaccactagtctgcctgtggtggtgattagtaacgtttctcaattaccttcaggatgggcctctatcctctggtacaacatgctggttgccgaaccccggaatctcagtttttttctcacccccccatgcgcgagatgggcccaactgagtgaagtcctatcttggcagttcagtagcgttacaaagaggggattaaatgttgaccagttaaacatgctgggggagaagctgttgggacccaatgcaagccccgacgggctgattccctggacgcgcttctgtaaggaaaacataaatgacaagaatttccccttctggctgtggatcgagtctatcctcgaactgatcaaaaagcacctcctcccgttgtggaatgacggatgcattatgggctttatttcaaaggaaagagaacgagctttgttaaaggaccaacagcctggcacatttctgctgcgtttttcagagtcgagcagagaaggcgctataacatttacatgggtagagagatcccagaatgggggggagcctgactttcacgctgtcgagccctatactaagaaggaactcagcgccgttacctttcccgacatcatccgcaactacaaggtgatggccgccgaaaatattccggagaacccacttaaatatctgtaccctaacatcgacaaagaccatgctttcggcaagtactactctagaccaaaagaagcacccgaaccgatggagctagacggccccaaaggaaccggctacattaagaccgagctgatttcggtgtcagaggtccacccttccaggctacagacaactgacaatctccttcctatgtcaccagaagaatttgacgaggtgtcgaggatagtcggatctgttgaatttgactctatgatgaacaccgtctag

SEQ ID NO: 26350 - DNA, 2139 bp, synthetic construct
  misc_feature 1..2139: note = Description of Artificial Sequence: Synthetic coding sequence
  source 1..2139: mol_type = other DNA
atgagccagtggtacgagctgcagcagctggacagcaagttcctggaacaggttcaccagctatatgacgactcattccctatggagatccgccagtacctagcacaatggttggaaaagcaagattgggagcatgccgcaaacgatgtttcctttgctacaataaggttccacgatctactgtctcagttggatgaccagtacagccggttttccctagagaacaatttcctgctgcagcacaacatccggaaatctaaaagaaatctgcaggataatttccaagaagatccaatccaaatgtcaatgattatctatagttgcctaaaggaggaacgcaaaatcctggagaacgcacagagattcaatcaggcacagtcaggaaatattcaatcgactgtaatgttggataaacagaaagagcttgactcaaaggttcgcaacgtgaaagacaaggttatgtgtatcgagcacgagattaagagcctggaagacctacaagacgagtacgattttaagtgtaaaaccctgcagaatagagaacatgagaccaatggcgtggccaagtctgaccagaagcaggagcagctgctgctcaagaaaatgtacctgatgctggacaacaaacgaaaagaagtagtacataaaatcatcgagttgctgaatgtcacggaactgactcagaacgctctaattaacgatgaactggtggaatggaagcgtaggcaacaaagcgcttgtattggcggcccgcccaacgcgtgtctggaccagttacaaaactggttcaccatcgtggccgagagtctgcagcaggtgcggcaacagcttaagaagttggaggaacttgaacagaaatatacatacgaacacgaccctatcacaaaaaacaagcaggtcttgtgggatcgcactttcagcttgtttcagcagctgattcagagctcttttgtggtggagagacaaccctgcatgcctacccacccgcagcggccactggtgctcaagactggcgtgcagtttactgtgaaactgaggcttctggtcaagctccaggagctcaactataacctgaaggtgaaagtcctttttgacaaggacgttaacgaaagaaacacggtcaagggttttcgcaaatttaacatcctgggtacccacacgaaggtcatgaatatggaggaaagcacaaacgggtctttggctgctgagtttaggcatctacagttgaaagaacagaagaacgccggcacgcgcaccaacgagggtcctctcatcgtgactgaagagctgcactctttgtcattcgaaacgcagctgtgtcagccaggcctcgttatcgacctggagaccacttctctacctgtggtggtgataagcaacgtatcccaactccctagcggttgggcaagcatcctctggtataatatgttagttgccgagcctagaaacctcagcttcttcctgacgcctccttgcgcccgttgggcccaattgtccgaagttctgtcctggcaattttcttccgttacaaaacgcggcctgaacgtggatcaactaaatatgttgggcgaaaagctactggggcccaatgcctccccagacgggctgataccctggacgaggttttgtaaggaaaacattaatgataaaaactttcctttctggttgtggatcgaatcaatcctcgagttgataaagaaacatctcctgcccttatggaacgatggttgtatcatgggctttatatcaaaagaaagagagagagctttgctaaaggaccagcagcccggcacatttctgctacggttcagtgaaagtagccgtgaaggcgctattaccttcacctgggttgagcggagccagaacggcggtgagccagatttccacgctgtcgaaccctacacaaaaaaggaattgtccgcagtgacattcccagacatcattcgaaattacaaggtgatggcggctgagaacatcccagagaaccccctgaagtatctgtatccaaatatagacaaagaccacgcctttggaaaatattattccaggccaaaggaggcacctgaaccaatggagttggacggcccgaagggcacagggtatattaaaacggagttgatctctgtgtctgaggtgtag

SEQ ID NO: 26351 - DNA, 2145 bp, synthetic construct
  misc_feature 1..2145: note = Description of Artificial Sequence: Synthetic coding sequence
  source 1..2145: mol_type = other DNA
atgtggatgagccagtggtacgagctgcagcagctggacagcaagtttctggaacaagtgcaccaactgtatgacgacagttttcctatggaaatccggcagtatctggcacagtggctcgagaagcaggactgggagcatgccgcaaatgacgtgtctttcgcaactatcagattccacgacttgctgtcacaactggacgaccagtacagcaggttttccttggaaaataattttctgctgcagcacaatattcggaaatctaagcgcaatctccaggacaatttccaggaggatcctatccagatgagtatgatcatctacagttgcctgaaggaggagaggaagatccttgagaatgcccaacgattcaaccaggctcaatctgggaacatccaaagcactgtcatgctcgataaacaaaaagagcttgatagcaaggtgagaaatgtaaaggacaaggtcatgtgtatcgaacacgagatcaaaagtctcgaagacttacaagatgagtatgacttcaagtgtaaaaccctgcaaaaccgggaacacgaaacgaatggcgtagctaagagcgatcaaaaacaggagcagctgctgcttaagaagatgtaccttatgctggataataaacgcaaggaagttgtccacaaaattatcgaacttcttaacgtgaccgaactgacccagaatgcactcattaatgacgaactggttgaatggaaaaggcggcagcagagcgcatgtattggcggtccaccgaatgcatgcctggatcagctgcaaaattggtttaccatagtggccgagtctctccagcaggtacgccaacagctgaaaaagctggaagagttggaacaaaaatatacgtatgaacatgaccccattacgaaaaataaacaggtgctatgggacaggactttcagcctcttccagcagctgatccaaagttccttcgtggttgaacggcagccatgcatgcctactcatcctcaacggcctctcgtcttaaagactggagtgcagtttacggttaagctccgactcctggtcaaactccaagaactcaactataatcttaaggtgaaggtcctttttgataaggatgtgaacgagaggaatacagtcaagggctttcggaaattcaacatcctggggacccacaccaaggtgatgaacatggaagaatctacgaacggtagcctggccgccgaatttcgacacttacaactcaaagaacagaagaatgccggaacgagaaccaacgaaggaccgcttattgttaccgaggagttacattccctctcattcgagacgcagctttgccagccaggactggtgattgacctggagacgacttctttacccgtggttgtgatttccaatgtgtcgcagttgcccagcggctgggcctccattctctggtataacatgctcgtagctgaacccaggaacttgtcctttttcttgacacccccctgtgctcgttgggcacagctttccgaagtactcagttggcagttctccagcgttacaaagcgtggcttgaatgtcgaccagctgaacatgctgggcgagaaactgcttggtccaaatgcttctcccgatgggctcattccatggacgcgcttctgcaaggaaaatatcaatgataaaaacttcccgttctggttgtggattgaaagcattctcgaattgattaagaagcacttacttccgttgtggaacgacgggtgcatcatgggcttcataagcaaagagcgagagagagccttgcttaaagaccagcagcccggcacttttctgcttcggttctccgagtctagcagagagggcgcaataaccttcacgtgggtggagcgctcgcagaacgggggcgaaccagactttcatgcagttgaaccttatactaagaaagaattatccgctgttacgtttcctgatatcatcagaaattacaaagttatggcagcagaaaacatacccgagaaccccttgaaatatctatacccaaatatcgataaggaccacgccttcgggaagtattattctcgccccaaggaggcacctgaaccaatggagctcgatggccccaagggtaccggatacatcaagaccgaactgatctcagtgtccgaagtgtag

SEQ ID NO: 26352 - DNA, 2253 bp, synthetic construct
  misc_feature 1..2253: note = Description of Artificial Sequence: Synthetic coding sequence
  source 1..2253: mol_type = other DNA
atgagccagtggtacgagctgcagcagctggacagcaagttcctggaacaggtgcatcagctttacgatgacagcttcccaatggaaattcgccaatatctggcacaatggcttgagaaacaagattgggaacacgctgccaacgatgtctctttcgcaactattaggtttcacgacctactgtcacagcttgatgaccagtattcacgtttttccttggagaacaacttccttttgcagcataacattaggaaatcaaagcgcaatctgcaggataatttccaggaggaccccatccagatgagcatgataatatacagctgcctcaaagaggaaagaaagatcttagagaatgcccagagattcaaccaggcacagagcggtaatatccagtccacagtgatgcttgacaaacagaaggaacttgacagcaaagtccggaacgttaaagacaaggtgatgtgcatcgagcatgagatcaaatccttggaggacttgcaagacgaatatgatttcaaatgtaaaacgttacagaatcgggagcacgagacaaacggggtagccaaatcggaccagaagcaggagcagttgctgctgaagaagatgtacttgatgcttgacaacaaacgcaaagaggttgtccacaaaataattgagctgctgaatgttactgaacttacacaaaacgcactcatcaatgatgagctggtggagtggaagcgcaggcagcagtcagcgtgtatagggggacctcctaatgcttgcctggatcaactgcagaattggtttactatcgtggcggaatccctgcaacaggtacgccaacagctgaagaagttggaagagctcgaacagaagtacacatacgagcatgatcccattacaaagaataagcaggtgctttgggacaggaccttttcgctattccagcagttgatccagagctctttcgtggtggagaggcagccatgcatgccgacgcatcctcagagacctctcgtgctgaagactggtgtgcagttcaccgtaaagctgaggctactggtaaaacttcaggagctgaactataacctgaaggtgaaagtcctttttgataaagatgtcaacgaacggaatactgtcaagggatttagaaaatttaacatattggggacgcatacaaaagtcatgaacatggaggaatcaactaacggaagtttggccgctgagtttcgccacctgcaacttaaggaacagaaaaatgctgggactaggaccaacgaggggcccctcatagtgaccgaagaactgcattccctttcctttgaaacccagttgtgtcaaccgggtctagtgattgacctggaaacaacaagtctccccgtagttgtaatcagcaacgtgagccaactaccatcgggatgggccagtatactgtggtataacatgctcgtcgccgagccgcggaacctgtcattttttctgactcccccctgcgccaggtgggcccagttatctgaggtactctcttggcagttcagttccgtaactaagagaggcctgaatgtggatcaattgaacatgctcggagaaaaactgctgggccccaatgcctcacccgatgggcttataccatggacgagattttgtaaagagaacatcaacgacaaaaactttcccttctggttatggatagaatccatccttgaactgatcaagaagcatttgctgcctctttggaatgatgggtgcattatgggctttatctccaaggaacgtgagagggccctgctcaaagaccagcagcctgggacatttctgctccggttctccgagagttccagagagggagctataacatttacgtgggttgaaaggtcacaaaacggaggggagccggacttccatgccgtcgagccatacactaagaaagaactgtccgcggtgactttccctgacataattagaaattataaggtcatggcagccgagaatattcccgagaaccccctgaaatacttgtatccaaatatagacaaggatcatgctttcggcaagtactacagccgtcctaaggaagcaccagaaccaatggagctcgacggaccgaaaggaaccggatacattaagactgagctgatttctgtcagtgaggtacacccttctaggttgcaaaccaccgacaacttattgccaatgtcccctgaggaatttgatgaggtgagtcggattgttggaagtgtcgaattcgatagcatgatgaacaccgtgtag

SEQ ID NO: 26353 - DNA, 543 bp, synthetic construct
  misc_feature 1..543: note = Description of Artificial Sequence: Synthetic coding sequence
  source 1..543: mol_type = other DNA
atgagccagtggtacgagctgcagcagctggacagcaagttcctggagcaagtgcaccagctctacgacgattctttcccaatggagatccggcaatacctagcacaatggctggagaagcaggactgggagcacgccgctaacgacgtgtccttcgcgaccatcagatttcacgatttgctctctcaactggacgaccaatatagccggttcagtctggagaataactttctgctgcaacataacatcaggaagagcaaacgaaatttgcaggacaattttcaggaggatcccatccagatgagcatgattatttattcatgtctgaaagaggaacgaaagatcctggagaatgcccaacggttcaaccaggcacagtctgggaatattcagtccactgtgatgctcgacaagcagaaggagctcgactctaaagtgcggaacgtcaaagacaaagtgatgtgtatcgaacacgagattaagtccctcgaggacctgcaggacgagtacgacttcaagtgcaaaacgctccaaaacagatag

SEQ ID NO: 26354 - DNA, 213 bp, synthetic construct
  misc_feature 1..213: note = Description of Artificial Sequence: Synthetic coding sequence
  source 1..213: mol_type = other DNA
atgagccagtggtacgagctgcagcagctggacagcaagttcctggaacaggtccatcagctgtacgatgactcattccccatggagatccgccagtacctggctcagtggcttgagaagcaggattgggagcacgccgcgaacgacgttagctttgctaccatccgattccacgacctgttatcacagctggatgatcagtatagtcgttag

SEQ ID NO: 26355 - DNA, 582 bp, synthetic construct
  misc_feature 1..582: note = Description of Artificial Sequence: Synthetic coding sequence
  source 1..582: mol_type = other DNA
atgagccagtggtacgagctgcagcagctggacagcaagttcctggaacaagtgcaccaactgtacgatgattcatttcccatggagattcggcagtatcttgctcagtggctggagaaacaggactgggagcacgctgcgaatgacgtttccttcgcaaccatacgttttcacgacttgctttcccagcttgacgaccagtacagccgcttctcattagagaataattttctgctgcaacataatatcaggaagtccaaaaggaatctgcaggacaactttcaggaggaccccatccaaatgtctatgattatttacagctgcctaaaagaagagcgaaaaatacttgaaaacgcccagcgcttcaatcaagcccagtccggtaacatccaatcaaccgtcatgctcgataagcagaaggaactggacagtaaggtcaggaatgtgaaggacaaagttatgtgtattgaacatgagattaagtccctggaggaccttcaggatgaatatgatttcaagtgcaagactctgcaaaaccgcggctcctcgagccagaacaatcgcgtagcggaatgccactag

SEQ ID NO: 26356 - DNA, 453 bp, synthetic construct
  misc_feature 1..453: note = Description of Artificial Sequence: Synthetic coding sequence
  source 1..453: mol_type = other DNA
atgagccagtggtacgagctgcagcagctggacagcaagttcctggaacaggtccaccagctgtacgacgatagcttcccaatggaaattagacagtatttggcccagtggctcgaaaaacaggactgggaacacgcggcaaacgatgtctcgtttgcaacaatcaggttccatgatctgctttctcagcttgacgaccagtattcccggttctcgctggaaaacaacttcttgctccagcacaatatacgaaaaagcaagcgcaacttacaggacaacttccaggaggaccccattcagatgagcatgatcatctattcttgtctgaaggaagagagaaaaatcttagaaaatgctcagaggttcaaccaggcccagagcggcaatatacagtctacagtgatgttggacaagcagaaggagctagacagcaaggtgcggaatgttaaatag

SEQ ID NO: 26357 - DNA, 582 bp, synthetic construct
  misc_feature 1..582: note = Description of Artificial Sequence: Synthetic coding sequence
  source 1..582: mol_type = other DNA
atgagccagtggtacgagctgcagcagctggacagcaagttcctggaacaagttcaccaactgtatgacgattcttttccaatggaaatccgccagtatttggcacagtggttggaaaagcaggattgggagcacgctgcaaatgatgtttccttcgcaaccattaggttccatgacctactgagccagctcgatgatcagtattccaggttcagtctcgaaaacaatttcttactccagcataatattaggaagtcaaaaaggaacctgcaagacaacttccaagaggatccaatccagatgtctatgataatctatagctgccttaaagaagagagaaaaattctcgagaacgcccagaggttcaaccaggcccagtcggggaacattcaatccacagtcatgctcgacaaacagaaagagctcgactcaaaggtgagaaacgtcaaagataaagtgatgtgtatcgaacacgagatcaagtcactcgaagatttgcaggatgaatatgattttaagtgcaaaactttgcaaaaccgaggatcgagctcgcagaacaatagggtggctgaatgtcactag

SEQ ID NO: 26358 - DNA, 483 bp, synthetic construct
  misc_feature 1..483: note = Description of Artificial Sequence: Synthetic coding sequence
  source 1..483: mol_type = other DNA
gagtgccacgaggaccccatccagatgagcatgatcatctacagctgcctgaaggaggagcgcaagatcctggaaaatgcacaacgcttcaatcaagcccagtctggaaacattcaaagcacggtcatgctcgataagcagaaggagctggactcaaaggtgcgaaacgtgaaggacaaagttatgtgcatcgaacacgagatcaagtccctggaggatctgcaggacgagtacgactttaaatgcaagactctgcagaacagggagcatgagaccaatggagtcgctaaatccgatcaaaaacaagagcagctgctccttaagaaaatgtaccttatgctcgacaataaacgaaaggaggtggtgcacaagataatagaactcctgaatgtcaccgaactgacacagaatgcactgattaatgatgaactggtcgaatggaaacgcaggcaacagtctgcctgtatcggggggcctccctag

SEQ ID NO: 26359 - DNA, 2556 bp, synthetic construct
  misc_feature 1..2556: note = Description of Artificial Sequence: Synthetic coding sequence
  source 1..2556: mol_type = other DNA
atggcccagtgggagatgctgcagaacctggacagccccttccaggaccagctccatcagctgtattcacattctctactgccggtggacatacggcagtacttggctgtgtggatagaagaccagaactggcaagaggctgcattgggtagcgatgattccaaggccacaatgctcttctttcatttcctggatcagctaaattatgagtgcggaaggtgctcacaagaccccgaatctctgcttctgcagcataatctgagaaagttttgtagggatatccagccattctcccaggatcctacacagcttgcagagatgatcttcaatctgcttttggaagagaagcggatcctgatccaagcacagagggctcagctggaacaaggagagccggtgctcgaaactccagtagaatcacaacagcacgaaattgagtctaggatcctggatctcagagccatgatggaaaaactggtgaagtccatatcacagctgaaggaccagcaggacgtgttctgctttcgttataagatacaggccaagggtaaaacccctagtctcgatcctcaccagacaaaggaacagaagatcctccaggaaactctcaatgaactagataagcgtcggaaagaagtgcttgacgcatcaaaagcactcctgggccgccttaccactcttattgaacttctgcttcccaagttggaggaatggaaggcacaacaacaaaaagcctgtatccgagctcccatcgaccacggactggaacagctggagacgtggtttacggccggtgccaagctgctgttccacctgcggcagttgctcaaggagctgaagggcctaagctgtcttgtgagctaccaggacgatcccctaacaaaaggggtcgatctaaggaacgcccaggtaaccgagctgctgcagagactcctccaccgagccttcgtggtcgaaacccaaccgtgtatgccacaaaccccacatcggccactcatccttaagacaggctctaaatttacggtgagaactcgcctactcgtccggctccaagaggggaatgaaagtttgaccgtggaggtcagtatcgacaggaacccgccacagctccagggcttccgtaagtttaacattttgacgtccaaccaaaaaacactaacccctgaaaaaggacagagccagggactcatatgggatttcggctatctgaccctggtggaacagcgatcagggggctcaggaaagggatccaacaaggggcccctgggcgtgaccgaggaactacacattataagcttcacagttaaatacacatatcaggggctaaagcaggagctcaagaccgacacccttcccgttgttatcatctctaatatgaatcagctctcaatagcctgggcatctgtcctgtggttcaacctgctgtcgcctaatctgcagaatcagcagttctttagcaacccacccaaagcaccttggagtcttctggggccagctctctcctggcaattctccagttacgtaggacgaggacttaattccgatcaactatcgatgctccggaacaaactcttcggacaaaattgcaggacagaagatccactcttaagctgggcagactttacgaagagggagagcccacctggcaagctgcctttctggacgtggctggataagattctagaactggtgcacgatcaccttaaagacctgtggaacgacgggagaatcatgggtttcgttagccgcagccaggagcggcgcctcctcaaaaagacaatgagtggaacttttctgctgcgattcagcgaaagctcagagggaggcataacctgttcctgggtggagcatcaagacgacgacaaggttttgatctattccgtgcagccgtataccaaggaggtgctgcagagcctcccgctcacggagatcatccgccattatcaactgttgacggaggagaacatccccgaaaatcctctgcggtttctctacccacggattccacgggacgaagcatttggttgttactaccaggagaaagtgaacctacaggagcgcaggaaatatctgaaacacaggctgattgtcgtttcgaacaggcaagtagatgagttgcagcagcctttagagctaaagcccgagcctgagcttgaaagtctggagctcgaactaggcctcgtcccagagcctgagctgagcttggacctggaaccactgttgaaggccggcttagatttgggcccggaactggaatccgttctcgagtctacactggagccagttatcgagccgacactctgcatggtttcccagacagttccggagccagaccaggggccagtcagtcagccagtaccagagccggatctcccctgtgacctcagacacctgaatacagagccaatggaaatttttagaaattgcgtgaagatagaagagatcatgccgaacggcgatccacttcttgccggtcaaaacaccgtggacgaggtttacgtatcccggccatcgcatttctacacggatggccctcttatgccctcagatttctag

SEQ ID NO: 26360 - DNA, 1383 bp, synthetic construct
  misc_feature 1..1383: note = Description of Artificial Sequence: Synthetic coding sequence
  source 1..1383: mol_type = other DNA
atggcccagtgggagatgctgcagaacctggacagccccttccaggatcagcttcaccagttatactcacactccctcctgcctgtagacatccgccaatacctggctgtttggatagaggaccagaattggcaagaggccgcccttggaagcgacgacagcaaggccactatgctgttctttcattttcttgatcagctaaactacgaatgtgggcgttgtagccaggacccggaatctctgttgctacagcataatctccggaagttttgtcgggatatccaagacccaacccagctggctgaaatgatctttaacctgctgttggaggagaagaggatcttgatccaagcacagcgggcacagctagagcagggagagccggtcttggagaccccggtggagtctcagcagcacgagatagagagccgcatcctggatcttcgggccatgatggaaaaactggtaaaaagcatctcacaactgaaagatcaacaggacgtgttctgtttcagatacaagatccaggccaagggcaaaacgccctccctcgatccccatcaaacaaaggagcagaagattctccaggaaaccctcaacgaactcgacaaacgccgcaaggaagtgttagatgcctcaaaggccctactgggtagactcacaacactgattgagctcctgctgccaaagctcgaagagtggaaggctcagcagcaaaaagcttgcataagggctcccatagatcacggcttggagcagctcgagacctggtttactgcgggagctaaactcttattccacttgcggcagcttctgaaagagctaaaaggacttagttgcctggtgagctaccaggacgatcccctcaccaagggcgttgatttacgtaacgcccaggtgaccgagctcttacaacggcttctgcaccgtgccttcgtggttgaaactcagccctgcatgccacagaccccccatcgccctctgatcctcaagacaggttctaaatttacagtgaggacacgcctcttggtgcgtttgcaagagggtaatgagagcctcacagttgaggtgagtattgatcggaatccccctcagctgcagggatttcgcaagtttaatatcctcacgagtaaccagaagacacttactcctgaaaagggccagagccaggggctgatctgggactttgggtacctaacattagttgagcaacgctccggtggatcaggcaaaggatctaacaagggtccactgggcgttacagaggaactgcacataataagctttacagttaagtatacttaccaaggcttgaaacaggagctcaaagtgtccgagaatggtggccagggggaacgcaagcagctttggaaaaaggcctag

SEQ ID NO: 26361 - DNA, 2544 bp, synthetic construct
  misc_feature 1..2544: note = Description of Artificial Sequence: Synthetic coding sequence
  source 1..2544: mol_type = other DNA
atggcccagtgggagatgctgcagaacctggacagccccttccaggaccagttacaccaactgtattctcactcgctgttgcctgtagacatccgacagtatctggcagtgtggattgaggatcagaactggcaagaggcggccttggggtcagacgattcaaaagccaccatgctgtttttccacttcctggatcagctgaattacgagtgtggacggtgttcgcaggatcccgagagcctcctactgcagcacaatctccgcaagttttgcagagacatccaagatcctacccagttggctgagatgatattcaacttgctgctggaagagaaacgcatattaatacaagcgcagcgcgctcaactggagcaaggggaaccagtgctagaaacccctgtggaatcccaacagcatgaaattgaatcaagaatcctcgatctacgagctatgatggaaaaactggtcaagtcgatcagccaacttaaggatcagcaggacgttttctgttttagatataagattcaggctaaaggcaagacaccaagcctcgatccccatcagactaaagaacagaagattctccaggagaccctgaacgaactggataagcgcagaaaggaggtgttggacgcctcaaaagctctattgggacgtctgacgacgctgatagaactcctgttgcccaaactcgaggaatggaaagcgcagcaacagaaggcatgcatacgtgccccgatagaccacggcttggagcagctggagacatggtttacagctggcgccaagctccttttccaccttcggcagctcctgaaagaactgaaaggcctgtcgtgtctcgtgagctaccaggatgatcccctcacaaagggggtggacttgcgcaatgcgcaggtaaccgagctgttgcaacgtttgcttcacagagcctttgtagtagagacccagccatgcatgccccagacccctcacagacctttaatcttaaaaaccgggtccaagttcaccgtgagaacccggttactcgttcgattgcaggagggtaatgaatccctcaccgtcgaggtgagcatcgacagaaatccaccacaactccagggcttccggaagttcaatatactaactagtaatcaaaagaccctgacacccgagaagggccagagccaggggctgatctgggactttggctatttgaccctggtggagcaaagaagcggaggctctggcaaggggtctaacaaagggcccctgggcgttacagaggaactgcacatcatatctttcaccgtaaagtacacatatcagggacttaagcaagaattgaaaactgacacattgcccgtggtgatcatctctaacatgaaccaactgagcattgcgtgggccagcgtgctctggtttaacctcttaagccccaatctccagaatcagcaatttttttctaatcccccaaaggctccatggtcacttctgggaccggcactgagctggcagtttagttcctacgtcgggagagggctcaactcggatcagctgtccatgctgcggaacaagttgttcggtcagaattgcagaacagaggatccgctgttgtcctgggccgatttcacaaagcgtgagagtccccctgggaaactcccattctggacttggttggacaagatcctggagctagtgcacgaccacctgaaagatctttggaatgacgggaggatcatgggcttcgtttccagaagtcaggagcgcagactgctgaaaaaaaccatgtcgggcacattcttactgcgtttcagcgagtccagcgaagggggaattacttgttcgtgggtggagcaccaggacgatgataaagtgctcatttatagcgtacagccctacaccaaggaggtgttacagtcactgcccctgaccgaaatcattaggcactaccagttgcttacagaagaaaacattccagaaaacccgctccggtttctctacccacgcattccacgggatgaagcctttggctgctactaccaggagaaggtgaacctgcaggaaaggaggaagtacctcaaacacaggctgatcgtcgtgtcaaaccggcaggttgacgagcttcagcagccattagaactcaagccagagccagaacttgagtcactcgaactggagctgggcctggtccccgagccagagctctctctcgacctggaacctctcttgaaggccggcttggacctgggacctgagctggagagcgtactcgagtccacattggagccagtgatcgaacccacgctgtgcatggtgagtcagaccgtcccagaaccagatcagggaccggtaagtcagcctgtgcccgaacctgacctgccctgcgatctgaggcatctcaacactgaacctatggagatttttcggaattgcgtgaaaattgaggagattatgccaaatggcgacccccttcttgcaggccagaacaccgtggatgaggtttatgtctctaggccttcccatttctacacagatggacccctaatgccgagtgacttttag

SEQ ID NO: 26362 - DNA, 2313 bp, synthetic construct
  misc_feature 1..2313: note = Description of Artificial Sequence: Synthetic coding sequence
  source 1..2313: mol_type = other DNA
atggcccagtggaaccagctgcagcagctggacacccggtacctggagcagctgcatcagctgtacagtgatagcttccctatggaactccgccagtttctggctccatggattgaaagccaggattgggcctatgctgcgagtaaagagtcccacgccaccctcgtgttccacaatctgctgggcgagattgatcagcagtattcaagatttttgcaggaatctaacgttctctatcagcacaacctgcgaagaattaaacaatttctgcagagccgctacctagagaaacccatggagatagcacggattgtggcccgatgtttgtgggaggaatcccgtttgctccagaccgctgcgaccgccgctcaacagggcggccaagctaatcaccccacagccgcagtggtgaccgagaaacagcagatgctggagcagcaccttcaggacgttcgcaagagggtccaggatctggagcagaagatgaaagtcgtggaaaacctccaggacgattttgacttcaactacaaaactctaaagagccagggtgacatgcaggatctcaatggaaacaaccaaagtgtgacaagacagaaaatgcagcagctggagcagatgctcacggctctcgaccagatgagacgctcaattgtctctgagttggcaggacttctatccgccatggagtatgtccagaagacattgacagatgaggaattggcagattggaagaggaggcagcagatcgcgtgcatcggtgggccccctaatatttgcctcgaccggcttgagaactggataacttctttagccgaatcccagttgcagacccgacaacaaatcaaaaagctggaggagttgcagcagaaagtctcctacaagggagatccgattgtccagcatcgccccatgctggaggaaagaattgtggagctttttaggaatctgatgaagtctgctttcgttgtggaacggcagccctgcatgcccatgcaccccgatcggccgttagtgatcaaaaccggtgttcaattcaccactaaggtcagactgctggttaaatttcccgaactaaattatcagctgaagataaaagtgtgcatcgataaggactcaggcgacgtcgccgcactacgaggatcccggaagtttaacattctgggaactaatacgaaagtgatgaacatggaggagtctaacaatggctccctgtccgcagaatttaaacatctgaccctgcgcgagcagagatgtggcaatggtggacgcgccaattgcgacgcctcactcatcgtgacggaggagttgcatcttatcacattcgaaacagaggtttaccaccagggcctgaagatcgacctggagactcacagcctgcccgtggttgtgatttcgaatatctgccagatgccaaatgcatgggcctccattctctggtataatatgcttacgaataatccgaaaaacgtgaattttttcactaagccccccatcggcacttgggatcaggtcgccgaagtcctgtcctggcagttctcctcaacaaccaaaagaggcctgtcaatcgaacaacttacaactctcgccgaaaaactgctcggtcccggtgtgaactatagtggatgtcagattacctgggccaaattctgtaaggagaatatggccggaaagggtttttccttctgggtgtggctggacaatataatcgatctcgttaagaagtacatccttgctctttggaatgagggctacattatgggatttatctcaaaggaacgagaacgcgctattctgagtacgaagccccccggcacattcctgctgcgattcagcgagtccagcaaggaaggaggcgtgaccttcacatgggttgagaaggacatttccggtaagactcaaattcagtctgtcgagccatatacaaagcagcaactgaataatatgtcctttgcagagataataatgggatacaagattatggacgctacgaacatcctggtgagccccctggtgtacctgtatcctgatattcccaaagaagaagccttcggaaagtactgccgacctgagtcccaggagcacccagaagctgaccctggcagcgcagctccgtacctaaaaaccaagttcatctgtgtgactccaaccacttgtagtaatacaatcgatctgccgatgagccccaggaccctagactcacttatgcagttcggcaacaacggagagggggccgaaccttccgcgggcggacagttcgagtcgctcactttcgacatggaactgacctccgagtgtgcaacatcccctatgtag

SEQ ID NO: 26363 - DNA, 2019 bp, synthetic construct
  misc_feature 1..2019: note = Description of Artificial Sequence: Synthetic coding sequence
  source 1..2019: mol_type = other DNA
atggagatcgcccggatcgtggcccggtgcctgtgggaggagagccgccttttacagaccgctgctacggccgcgcaacagggcggccaggcgaatcacccaactgccgccgtggttacagaaaaacagcagatgctggaacagcacctgcaggacgttagaaaaagggtgcaggatttagaacagaagatgaaggtagttgaaaacctccaggatgattttgattttaactataaaactctgaagagtcagggggacatgcaggacctgaatgggaacaaccagtccgtgacgcggcagaagatgcagcagttggaacagatgctgacagcacttgaccagatgcgtcgatctattgtgtcagaactcgctggtcttctttctgccatggaatacgtgcaaaagaccttgaccgatgaggaacttgctgattggaaaaggcggcaacagatagcttgtatcggcggccctcctaacatttgcctggaccgactggagaactggatcacctcactggctgaaagtcagcttcagaccaggcagcagatcaaaaagcttgaagagcttcaacagaaggtgtcttataaaggggacccgattgttcagcatcgacccatgttagaagaacggatcgtggagctttttcgcaacttgatgaaatcagcttttgttgtggagcgccagccctgcatgcctatgcaccccgaccggcccctggtcattaagacaggggtccagttcacaaccaaggtgcgcctgctcgtgaagtttcccgagctaaattaccagttaaagattaaggtatgtattgacaaagactctggcgacgtagcggcccttaggggatcacgcaaatttaacatcctgggaaccaacaccaaagtcatgaacatggaggaatcgaacaatggctctttgtcagctgaatttaaacacttaactctgcgcgaacagcgatgtggtaacggaggccgggccaactgcgatgccagtctgatcgtgaccgaagaattgcacctgatcactttcgaaacagaggtataccaccaaggcctgaaaatcgaccttgagacacacagcctgccggtggtggtgattagtaatatctgtcagatgcccaacgcctgggcctccatcctctggtataatatgctcaccaacaaccccaagaacgtaaatttttttacaaagcctccaatcggaacctgggaccaggttgcagaagtcctcagttggcaatttagtagtacaactaagcgtggattgtcaattgagcaattgaccacactagctgaaaaactgctgggtcccggggtgaactatagtggctgccaaattacttgggcaaaattctgcaaagaaaacatggccggcaaggggtttagtttttgggtgtggctggacaacattattgatctagtaaaaaaatatatccttgccctatggaatgaaggctacattatgggttttatctccaaggaaagagaacgagcaattttgagtacaaaacctccaggcaccttcctccttcgattcagtgaaagctccaaagagggtggcgtaaccttcacctgggttgagaaagatatttcaggcaaaacgcagattcagtccgttgaaccctacacaaagcagcaactgaataatatgtccttcgctgagatcatcatgggatacaagatcatggacgcaacaaatatattagtaagccccctggtgtacttatatcccgatatccccaaggaagaggcttttggcaaatactgtcggcccgaaagccaggaacaccccgaggcagaccccggatcggctgcgccctatctgaagactaaattcatctgcgtgacccccaccacctgttctaacaccatagatctccccatgtcgccccggaccctggacagcctgatgcagttcgggaataatggagaaggggccgaaccttcagctggcgggcaattcgagtcgctgactttcgacatggaactgacaagcgagtgcgccacatcccctatgtag

SEQ ID NO: 26364 - DNA, 2310 bp, synthetic construct
  misc_feature 1..2310: note = Description of Artificial Sequence: Synthetic coding sequence
  source 1..2310: mol_type = other DNA
atggcccagtggaaccagctgcagcagctggacacccggtacctggagcagctgcatcagctgtacagtgacagcttccctatggaactgaggcagttcctagccccctggatcgagagccaagattgggcttacgccgcttctaaagagagccatgccacgttggtgtttcataaccttctgggcgagatcgaccaacagtatagccgttttctccaggaaagcaatgttctctaccagcataacctccggaggataaagcagtttctccagtcacgttacctggaaaagccaatggagatcgcccggatcgttgcacgctgcctgtgggaagaatcaagactgctgcaaaccgccgcaacagccgcccagcagggagggcaggccaatcatccgaccgctgctgtcgtcacggagaagcaacagatgctagagcagcacttgcaggatgtgcgcaagagagttcaggacctggagcaaaagatgaaagtggtcgaaaacctgcaggatgactttgacttcaattataagactctcaagagccaaggtgatatgcaagatttgaatggtaataaccagtccgtaactcgccagaaaatgcaacaactggaacagatgcttacagcactcgaccaaatgagacggagtattgtgtctgagcttgccggattgctttctgcaatggagtatgtgcagaagacactgacggatgaggagctcgcagattggaaaaggaggcaacaaatcgcttgcattggtggcccacccaatatctgtctcgaccgcttagaaaattggattaccagcttagccgagtcccagttacagaccagacaacagatcaagaaactggaagaattacagcagaaggtgtcctacaagggggatccaatcgttcaacaccgtcctatgctggaggaaagaatcgttgagttgtttagaaacctgatgaagagcgctttcgttgtggaaaggcagccatgcatgcccatgcacccagaccgacctctcgtgatcaagaccggcgttcagtttacgactaaagttagactgctagttaaattccctgagttaaactaccagcttaaaataaaagtgtgtatagacaaggattctggcgacgtggcagctctgcgtgggagccggaagtttaatattctaggcaccaacactaaagtcatgaatatggaggaaagcaacaacgggtctctgtccgcagaatttaaacatctcacattacgcgagcagagatgcggcaacggcggacgggcgaactgtgacgcgagtctcatcgtgacagaggagttacacttaatcacatttgaaacagaggtctatcatcaagggctaaaaatcgatctagagacccattcgctgcccgttgtggtgatctccaatatttgtcagatgccaaatgcttgggcgagtatcctgtggtacaacatgctcaccaacaacccaaaaaacgtgaactttttcacaaagcccccaataggcacttgggatcaggtggcagaagtcctgtcgtggcagttttccagcacaaccaaaaggggactgagcatcgagcagctcacgacattggcagaaaagctactgggtcccggtgtcaactacagcggctgtcagattacatgggccaaattttgtaaggagaacatggcaggcaagggtttcagtttctgggtttggctggataatatcatagatctcgtaaaaaagtatatactcgcgctgtggaacgaaggatacataatgggatttattagtaaagagcgagagcgggccattctctcgaccaaacctccaggcacctttctcttacggttctccgagtcttctaaagaaggcggagtcacctttacctgggtggagaaggacatctctggcaagacgcagattcaaagtgtggagccttacacaaagcagcagctcaacaatatgagttttgcggaaatcattatgggctataagataatggacgctaccaatattctggttagcccacttgtgtatttataccccgacatcccaaaggaggaggctttcggaaaatattgtcgaccagaaagtcaggaacatccagaggccgatcccggcgctgccccttaccttaaaaccaagttcatttgtgtaacacccacgacgtgctcgaacacaattgacttgccgatgtcccctagaaccctagacagtttaatgcagttcggcaacaacggggaaggagcagaacccagcgcaggagggcagtttgaatctctaacatttgatatggagctcactagcgaatgtgcgacttcaccaatgtag

SEQ ID NO: 26365 - DNA, 2169 bp, synthetic construct
  misc_feature 1..2169: note = Description of Artificial Sequence: Synthetic coding sequence
  source 1..2169: mol_type = other DNA
atggcccagtggaaccagctgcagcagctggacacccggtacctggagcagctgcaccagttgtactccgattcttttcctatggagctgagacaattcctcgccccttggatcgagtctcaagattgggcttacgccgcttccaaggaaagccacgccacactcgtgttccacaatttgctcggagaaatagaccaacagtattccagatttctccaggagtcaaatgtattatatcaacacaacctgcgccgaattaaacagttcttacaaagtcgatatctagagaaacccatggaaattgcacggatcgtcgcgagatgtctctgggaggaatctcgcctcctccagacagccgccacagctgctcagcagggtggtcaggctaaccaccctactgctgcagtggtaaccgagaaacagcaaatgttggagcagcaccttcaggacgtgagaaagagagtgcaggacctggaacaaaagatgaaggttgtggaaaatttacaggacgacttcgactttaattacaagaccctcaagagccagggagacatgcaagatctaaatgggaataatcagtctgtgaccagacagaagatgcagcaacttgagcagatgctaacagccctggatcagatgcgcagatccattgtctctgagttagctggcttgctttcagctatggaatacgtgcagaagacactgaccgacgaagaattggcggactggaaacggagacagcagatagcctgcattgggggccccccaaacatctgtctagatagactagagaactggatcacatcactggccgaatcacagctccagacaagacagcagatcaaaaaacttgaggagttacaacagaaggtttcctacaaaggagatcccatcgttcagcataggcccatgctcgaggaacggatcgttgaacttttccgtaacctcatgaagagcgctttcgtagtagaacggcagccttgcatgcctatgcatcctgatcgacctttggttatcaaaaccggcgtgcagttcacaacaaaggtacgactgttggttaaatttccagagctcaattatcagctcaaaataaaagtgtgcatcgataaagacagtggcgatgtggccgctttaaggggcagtcgcaagttcaatatcctcggaactaacaccaaagtcatgaacatggaggaatctaataatggttctctaagtgctgagttcaaacacctcacactgcgcgagcagcgctgtggaaacggcggcagagcaaactgcgatgcatccctgatcgtgacagaagagctgcatctgattaccttcgagaccgaggtttaccatcagggcctcaagatcgacctggagacccatagcctgcccgttgtcgtcatcagcaacatttgtcagatgccaaatgcttgggcgtccattctctggtataatatgctcaccaataatcccaaaaacgtgaacttctttaccaagccccccatcggcacttgggaccaggtagctgaggtgttgagttggcagtttagtagtaccaccaaacggggcctgtctatcgagcagcttacaacgttagccgagaaactgctaggccccggggtaaattacagtggttgtcagatcacctgggcgaaattctgcaaggaaaacatggcaggcaagggctttagtttttgggtctggctggataatatcatcgatctcgtgaaaaaatacatcttagctctttggaacgagggatacataatgggctttatctccaaagaaagggagagggctattctgtcaactaagcctccaggtacttttctgcttcgattctcagagtcctccaaggagggcggggtcacttttacctgggtcgagaaagatatctccgggaagacgcagatccagtccgtggaaccttatacaaaacagcagctcaataacatgagctttgccgaaatcatcatggggtataagatcatggatgctacaaatatccttgtgtctccactggtgtatctgtaccccgatatacccaaggaagaggctttcggcaagtattgtagaccagaatcacaggaacaccccgaagctgatccaggaagtgcagcaccctatctgaagaccaaattcatctgcgttacaccctttatcgacgccgtgtggaagtag

SEQ ID NO: 26366 - DNA, 2247 bp, synthetic construct
  misc_feature 1..2247: note = Description of Artificial Sequence: Synthetic coding sequence
  source 1..2247: mol_type = other DNA
atgagccagtggaaccaggtgcagcagctggagatcaagttcctggagcaagtcgatcagttttatgacgacaactttcccatggagatccggcacttactcgcccagtggatcgaaaaccaagattgggaagcagcatcaaataatgaaacaatggctaccatactattgcagaacctgctgattcagctggacgagcaacttggccgtgtcagtaaagaaaagaacctgctgctgattcacaatctgaagagaattagaaaagtactgcagggaaagttccacggaaaccctatgcacgtggccgtagtgatcagcaattgcctcagggaggaacggagaattctcgctgcagccaacatgcctgtgcagggccctctcgagaagtccctgcagagcagctcagtctcagagcggcagaggaacgtggaacacaaggtggccgctattaaaaattctgtacaaatgaccgaacaggacaccaagtacttagaggatctgcaggacgaattcgactacaggtacaagacaattcaaactatggatcaatctgataagaattctgctatggtgaatcaggaggtgctgactctacaggaaatgctgaactcattggactttaaaaggaaggaggccctatctaagatgacccagataattcacgagaccgaccttctgatgaataccatgcttatcgaggaactccaggactggaaacggaggcagcagattgcatgcatcggagggccactgcacaatggcttagaccagcttcagaactgttttacgttgctggctgagagtctattccaactccgaagacaactggaaaagctggaggaacagagcacgaagatgacttatgagggtgatcctatacccatgcaacgtacccatatgctggaacgcgtgaccttcctcatctacaacctcttcaaaaattctttcgtggtagagcgccagccatgtatgcctacacaccctcagcgcccattagtgctgaagaccctgatccagttcaccgtgaaactacgacttctgataaaactcccagagctcaactaccaggtcaaggtcaaggcttctatcgacaagaacgtgtctacgctgtccaataggaggttcgtgttgtgcggcacaaacgtgaaagcaatgtcgatcgaggagtcaagtaacggcagcctgagtgtggagtttcggcatctacaaccaaaagaaatgaagtcttccgcaggcggtaaagggaatgaggggtgtcatatggtcacggaggaattgcatagtattactttcgaaacccagatctgcctgtacgggctgacaattgatttggagacatcaagcttgcctgttgtgatgatctccaacgtgtcacagttacctaatgcttgggcctctattatttggtacaacgtgtccaccaatgactcacaaaatcttgtattcttcaataaccctccgcccgcgactctgagccagctcctcgaggttatgagctggcagtttagtagctatgtgggacgtgggctgaattctgaccaattgcatatgttggcagagaagctgactgtccagtccagttattccgacggccatctcacatgggccaagttttgcaaggaacatcttccagggaaaagctttacgttctggacttggttagaagcaattctggacttaataaaaaagcatatcttgcctttatggattgacggctatgtaatgggattcgtctccaaagaaaaagaaagattattgctgaaagacaaaatgccaggcacatttctgctcagattttctgagagccatctgggagggattactttcacctgggtggaccatagtgagtcaggagaggtgagattccatagcgtcgagccctataacaagggtcggctctcagctctgccttttgcagacatactccgcgactacaaagtgataatggcagagaatattcccgagaacccccttaaatacttataccctgatatacccaaggataaggccttcgggaaacactatagctctcagccatgtgaggtatcccgccctactgagcggggggataaaggctatgtgccatctgtatttattccaatctcaacaatcaggagcgattctactgaaccgcactcgccctcagatttattgcctatgagcccctccgtgtatgcagtcctcagggagaacctgtctcctacaacaatcgagacagccatgaagtccccctattcagctgagtag

SEQ ID NO: 26367 - DNA, 2247 bp, synthetic construct
  misc_feature 1..2247: note = Description of Artificial Sequence: Synthetic coding sequence
  source 1..2247: mol_type = other DNA
atgagccagtggaaccaggtgcagcagctggagatcaagttcctggagcaggtggaccaattttacgacgataattttcctatggagatccgccacctcttagcacaatggattgagaaccaggattgggaagctgcaagtaacaacgaaaccatggctactatattgttgcagaacctcctgatacaattggatgaacagctgggtagagtttccaaagagaaaaacctgcttttaatccataacctcaagcggattcgaaaggtcctgcaaggcaaatttcacgggaatcccatgcacgtggcagtggttatatcaaactgtctgagagaggaaaggcgaattctggcggccgccaatatgccagtgcagggaccccttgaaaaatcccttcagagcagcagtgtaagcgagcggcagagaaacgtggagcataaggtagcagctatcaagaactccgtacagatgacagagcaggatactaagtatctggaggacctccaggacgaattcgattaccgctataaaaccatccagacaatggaccaatccgataaaaacagtgccatggtgaaccaagaggtactgacccttcaagagatgcttaattctctggatttcaaaagaaaggaggcgctaagcaagatgacccagataattcatgagactgatctcttgatgaacaccatgctgatcgaggaactgcaggattggaaacggaggcaacaaatcgcgtgtatcggggggccattgcacaacggcctcgaccagctccagaattgcttcacactccttgcagagtcactgttccagctgcggagacagctggagaagcttgaggagcaatccactaagatgacttacgagggggatcctataccaatgcagagaacccatatgctggagagagtgacttttctcatatataatctcttcaagaacagttttgtcgttgagcgacagccttgtatgcctactcatccgcagagacccttggttcttaagacccttatccagtttactgttaaacttcgactactgatcaaattgccggagctgaattaccaggtcaaagtaaaggcttccattgataaaaacgtctcaacgttgtccaaccgccgtttcgtactctgtgggaccaacgttaaggctatgtctattgaggagtcttccaatggcagcttaagtgttgaatttaggcacctgcagcccaaggaaatgaaatcttccgccggtgggaaggggaatgaaggctgccacatggtgactgaggaattacattccatcacattcgagacacaaatttgcctgtacggtctgactatcgacctggagaccagctcccttcctgtggtgatgatatccaacgtgagccagctgcctaatgcatgggcatcaattatctggtacaacgttagcacaaacgactcacagaacctagtcttcttcaataatcctcccccggccaccctgtctcagctcttagaagttatgagctggcagttctcttcctacgtgggtaggggactgaattcagatcagttacacatgctggcagagaaactaacagtacagagctcgtacagcgatgggcatctgacctgggctaaattctgtaaggagcacctgcctggtaagtccttcactttctggacttggctggaagccatactggatctgatcaagaagcatattttacctctttggattgatggttacgtaatgggatttgtctctaaagaaaaagaaagattgctgctcaaagataaaatgccagggacgttcttattaagattcagtgagtcccatttgggcggtattaccttcacttgggtggaccactctgagtctggcgaggtgcgctttcactctgtagagccctacaataaaggacgcctctcagcactgcccttcgcggacattttaagagattataaggtaatcatggccgagaacataccggagaaccccctgaagtatctgtatcctgatattcccaaagacaaggcgtttggtaagcactactcatctcagccctgcgaggtttctcgcccaacggaacgcggggataaaggctacgtcccttcggtctttattccaatttccactattaggtctgactctactgagccgcactccccgtctgatttactgccaatgagcccgagcgtctacgctgtcctgcgggagaacctgagcccgaccaccattgagacagctatgaagagcccttacagcgccgaatag

SEQ ID NO: 26368 - DNA, 354 bp, synthetic construct
  misc_feature 1..354: note = Description of Artificial Sequence: Synthetic coding sequence
  source 1..354: mol_type = other DNA
atgagccagtggaaccaggtgcagcagctggagatcaagttcctggagcaggtggaccagttttacgacgataacttcccaatggaaattcggcacctgctggcacagtggatagaaaatcaggattgggaggctgcctcaaacaacgaaacaatggctaccatccttctccagaatctgttaattcagctcgatgagcagttgggtagagtgagcaaggaaaagaatttgctactgattcataatttaaaaagaatcaggaaagtgcttcagagtcctgggctggctactgctcagctgccgctggatcgccatggtgagacctgcattcaacggtcaaaatcatgtccgtag

SEQ ID NO: 26369 - DNA, 78 bp, synthetic construct
  misc_feature 1..78: note = Description of Artificial Sequence: Synthetic coding sequence
  source 1..78: mol_type = other DNA
atgagccagtggaaccaggtgcagcagctggagatcaagttcctggaacaggtggaccagttttatgacgacaattag

SEQ ID NO: 26370 - DNA, 240 bp, synthetic construct
  misc_feature 1..240: note = Description of Artificial Sequence: Synthetic coding sequence
  source 1..240: mol_type = other DNA
atgagccagtggaaccaggtgcagcagctggagatcaagttcctggaacaagtagaccagttctacgatgataactttccaatggagattcgacatctgcttgctcagtggattgaaaatcaggactgggaggccgcatcaaataatgaaaccatggctaccatactgctgcagaacctgctaatccagctggatgagcagcttggaagagtttcgaaagagaaaaaccttctgctgtag

SEQ ID NO: 26371 - DNA, 2385 bp, synthetic construct
  misc_feature 1..2385: note = Description of Artificial Sequence: Synthetic coding sequence
  source 1..2385: mol_type = other DNA
atggccggctggatccaggcccagcagctgcagggcgacgccctgcggcagatgcaggtgttatacggacaacatttcccaatcgaggtgcgccattatcttgctcagtggatcgagagccagccatgggatgccatcgacttggacaatcctcaggacagggcccaggctacccagcttctggagggccttgtgcaagagcttcagaaaaaagcagaacaccaggtcggtgaggacggtttcctgttaaaaatcaagcttggacattacgccacgcagcttcagaagacctacgataggtgtccgctggagctcgtgagatgcattagacatattctctataacgagcagcggttagtgagagaagctaataattgcagctctcctgcgggtatactggtggatgccatgtcccagaaacacttgcagataaaccagacgttcgaggaactgagactcgttactcaggataccgagaacgagttgaagaagttgcagcagacccaggagtacttcataatccagtatcaggagtccctccggatccaggcccagtttgcgcagctggcccagctgtctccgcaggaaaggttgagccgcgagactgccctgcagcagaagcaggtttctctggaagcttggttgcaaagggaagcccaaactctgcaacaataccgagtggagctggccgagaagcaccagaaaacactgcagctgttacgcaagcagcagactataatcctggatgacgaattgatccagtggaaacggagacagcaactcgcaggtaacggtggtccccccgaggggagccttgatgtgcttcaatcctggtgtgagaagctggctgagataatttggcaaaatagacagcagattcgtcgcgctgagcacttatgccagcagttgcccatcccaggacccgtggaagagatgcttgccgaagtgaacgcaaccattacagacataataagcgccctggtcacgagtacgtttataatagaaaaacagcctccccaagtgcttaaaacacagacaaaatttgccgcaacggtcaggttacttgtgggcggtaagttgaacgtgcatatgaatcctccccaggtcaaggcgacaattatcagcgagcagcaggccaaaagcctattgaaaaacgagaatacacgtaacgagtgttctggcgaaatcctgaataactgttgcgttatggagtaccaccaggctacaggaactttaagtgcccatttccgaaatatgagtctcaagcgcattaagcgtgctgataggagaggggccgaatcagttacagaagaaaagtttaccgtgctttttgaatcgcagttttccgtggggtctaacgagttggtcttccaggtgaaaacactcagcttaccagtggtggtaattgtccacgggagccaggatcacaacgccacagctacagttctctgggacaacgcctttgctgaacccgggcgagttccatttgcagttcctgacaaggtcctctggccgcagctttgtgaggccctgaacatgaagttcaaggccgaggttcagtcaaatcggggtctgacgaaggaaaacttagtatttcttgcgcaaaagctattcaacaactcctcctctcatctggaggactattcaggcctgtctgtctcctggtctcagtttaatcgggaaaacctacccggttggaactatacgttctggcaatggttcgacggcgtgatggaagtgttgaagaagcaccataaaccccactggaatgatggagcaatcctcggcttcgtaaataagcagcaagcccacgacctcctaataaacaaaccagacgggaccttcctcctccggttttctgatagcgagatagggggcatcacaatagcctggaaattcgatagtcccgaacgcaacctctggaaccttaagccttttactactcgggactttagcatacggtcactggcagatagactcggcgacctctcctatctgatttatgtcttccctgaccgtccaaaagatgaagtattttctaagtactatactccagtgctggctaaggctgtcgatggatacgtcaaaccccagatcaagcaggttgtgcccgagtttgtgaatgccagtgccgacgccggcggcagcagcgccacttacatggaccaagccccatcgcccgcagtatgccctcaggctccatacaacatgtacccccagaaccccgaccatgtgcttgaccaggatggcgagtttgacttggatgaaacaatggatgtcgcgaggcacgtcgaagagctgctgcgcaggccaatggacagcctcgactctaggctgtctcccccagcgggcctgtttacctcagcaaggggcagcttgtcttag

SEQ ID NO: 26372 - DNA, 378 bp, synthetic construct
  misc_feature 1..378: note = Description of Artificial Sequence: Synthetic coding sequence
  source 1..378: mol_type = other DNA
atggccggctggatccaggcccagcagctgcagggcgacgccctgagacagatgcaggtactttacggacagcacttccccatcgaagttcgccactacctcgcacagtggatcgagtctcaaccctgggacgcaatagacctcgataacccacaagatcgggctcaggctacccagctccttgaaggtttggtacaggagcttcagaaaaaggcggagcatcaagtcggcgaagatgggtttttgcttaagattaaacttggccattacgctacccagcttcagaaaacctatgacagatgcccccttgagctcgtgcgctgtatcaggcatattctttacaacgagcagcgcttggttcgcgaagcaaacaattag

SEQ ID NO: 26373 - DNA, 2376 bp, synthetic construct
  misc_feature 1..2376: note = Description of Artificial Sequence: Synthetic coding sequence
  source 1..2376: mol_type = other DNA
atggccggctggatccaggcccagcagctgcagggcgacgccctgaggcagatgcaggtgctgtatggccagcactttcctattgaagtccggcactacctggcccagtggattgaaagtcaaccctgggacgcaattgaccttgataatcctcaggacagggcccaggctacccagttacttgagggcctagtgcaggaactccagaaaaaagctgagcatcaggtaggagaggacgggttccttctgaaaatcaagctgggccattatgctacacagttacaaaagacatatgaccggtgtccactggaactggtacgctgcattcggcatatcttatataacgagcagcgactggtcagagaggctaacaattgcagctccccagctggcatcttagtcgatgcaatgagccagaagcacctgcagatcaaccagacttttgaagaactcaggttggtcacacaggacacggagaatgaattgaagaagctgcagcagacccaggagtatttcatcatacagtaccaagaaagcctcagaatacaggctcaatttgctcagctagcccagttgtcccctcaggagaggctgagtagagaaaccgccttacagcagaaacaggtatctctggaagcctggttgcaaagagaggcacagaccctccagcagtaccgcgtcgagctggcagagaagcatcaaaagacactccaacttctccgtaaacaacagactatcatcttggacgatgaactgattcagtggaagaggcgccagcaactggccggtaatggcggcccgccagagggcagcctcgacgtcctgcagagttggtgtgaaaagttggctgagattatctggcagaaccggcagcaaatccgacgggccgaacacttatgccagcagctgcccattcccggccctgtggaagagatgctggcagaagttaatgccactatcacagacatcatatcggctctggtgaccagcaccttcatcatcgaaaagcagccgcctcaagttttgaaaacccagacaaaattcgccgcaactgttaggttgctcgttggggggaagctgaacgtgcacatgaacccaccccaggtgaaggccaccatcataagtgaacagcaagccaaaagcctgctgaagaacgaaaacaccagaaatgagtgctcaggggaaatcctcaacaattgctgcgtcatggagtaccaccaggctaccggtacactgtccgctcactttagaaacatgtccttaaagagaataaagagggccgatagacgcggggccgagtcagtcaccgaggaaaaattcaccgtgctgtttgagtcacagttctccgtgggaagtaatgagctggtctttcaagtgaagaccctgtctttgccggttgtggttatcgttcacgggagccaagatcacaatgcaactgctacagtcctctgggataatgcattcgccgagccaggacgagtacctttcgccgtccccgataaggtgctgtggccacaattgtgtgaggccctgaacatgaagttcaaggcagaggtgcagagtaatcgtggcctgacaaaggagaacctagtttttttggcccagaagctgttcaacaattcttcctcacacttggaagactacagcgggctctccgtctcatggtctcagtttaatagagagaacttgcctggctggaactatactttttggcagtggtttgatggcgtcatggaagttctcaaaaagcatcacaagccacattggaatgacggtggcttcgtcaataagcaacaagcccacgacctcctgatcaacaagcccgatggcacatttcttctgcgcttcagcgatagcgagatcggcggaatcaccatagcttggaaattcgacagtcccgagaggaacctgtggaatttaaaacccttcacaacgcgggacttctcaattagatccttggcagaccgcctcggcgacttgtcatacctgatttacgtttttccggaccgtccaaaggacgaggttttctccaaatattataccccagtgctcgccaaagccgtggatggctatgtcaagccacagattaagcaggtcgtccctgaatttgtgaacgcgtcagccgatgccggcggaagctctgcaacctacatggaccaagccccttcccctgctgtgtgccctcaagccccatacaacatgtatccacagaatcctgaccacgtgctggatcaggacggagaattcgatttagacgagaccatggacgtcgcccggcacgtcgaggaattgctgcgtaggcccatggactcactggatagccgtctgtcgccccccgcagggctctttaccagtgcgcggggctccttgtcatag

SEQ ID NO: 26374 - DNA, 2298 bp, synthetic construct
  misc_feature 1..2298: note = Description of Artificial Sequence: Synthetic coding sequence
  source 1..2298: mol_type = other DNA
accgccatggccggctggatccaggcccagcagctgcagggcgacgcgctaaggcagatgcaggtcctttacggccagcacttccctatcgaggtgagacactacttagctcaatggattgagtctcagccttgggacgccatagacctagacaaccctcaggaccgcgcccaggccacccagttgcttgaaggactcgtgcaggaactgcagaaaaaagcagagcatcaggtcggcgaggatggtttcctgcttaagatcaagttgggtcattacgccacacagttacagaaaacctacgacagatgtccactagagctggtgagatgcattagacacattctttacaacgagcagaggttggtcagagaagctaataattgctcaagtcctgccgggattttggtcgacgctatgtcccaaaaacatctgcagatcaatcagacctttgaggagctccgactcgtgacccaggacacagaaaacgaactgaagaagctacagcagacacaggagtacttcataatacagtatcaggagtctttaagaattcaggcccagtttgcacaactcgcccagctgtctccacaggagcggctgtctagagaaacggcactccagcagaagcaggtgagtttagaagcctggctacagcgagaagcacagacactgcagcagtacagagtcgaactagccgaaaaacaccagaagaccctgcaactgctcaggaaacagcagactattattctcgatgacgagctgatccagtggaaacgccgtcaacagttggcaggcaatggcggcccccccgaagggagtttggacgtgcttcagtcatggtgtgagaaactagccgagatcatatggcagaacagacaacagatccgccgcgccgagcacctatgccagcaattgcctattccagggcccgttgaggaaatgctcgctgaggtgaatgcgacaatcacagatatcattagcgcgttagttacctcaacctttattatagagaaacagcctccacaggttttgaaaactcagacaaaattcgcggcaactgtgcgcctcctagtaggtggaaaattgaacgtgcacatgaaccccccccaggtgaaggcaactatcatcagcgaacagcaggccaagagcctccttaaaaatgaaaatacccgtaacgagtgttctggggagatcctaaacaattgttgcgtaatggagtaccatcaggcaacagggaccttgagcgcacactttcgtaacatgtcactcaaacggatcaagagagcagaccgccgcggagccgaaagtgtgacggaagaaaaatttaccgtcctgtttgaatctcagttttcggtaggatccaacgagctggtgttccaggttaagggacgcgtgccattcgcagtccccgataaggtgctatggcctcagttgtgcgaggctttgaacatgaaattcaaggctgaagtccaatcaaatcgaggacttacaaaagaaaacctcgttttcttggcacagaagctcttcaacaattcttccagccacttggaggattacagcggactctccgtgtcctggtcccagttcaatcgcgagaatctgccaggatggaactacacgttctggcagtggttcgatggcgtcatggaggtgctcaaaaaacatcacaagccccattggaacgatggcgccattttgggctttgtcaacaaacagcaagcacacgatctgctgatcaacaagcccgacggcacttttctgttgcgtttcagtgacagtgagattggcgggatcaccattgcctggaagttcgactctcccgagaggaacttatggaaccttaagccttttacgaccagggacttctctattcgttccctcgctgaccgactcggagacctctcttatctcatttatgttttccctgataggcctaaagatgaggttttctcgaaatactatacaccagtgctggcaaaagccgttgacggttatgtgaaacctcagattaaacaggtagtgccagagtttgtgaatgctagcgctgatgcaggtgggtcttctgctacatatatggaccaagccccttctcctgctgtctgcccacaggctccatacaacatgtacccccagaacccggaccacgtgctagaccaagatggcgaattcgacctggatgagactatggatgtagcccgacacgtcgaagaactgctcagacggcctatggactcccttgattctcgactgagcccgccagctgggttgtttacgtcagccagaggatccctatcctag

SEQ ID NO: 26375 - DNA, 2295 bp, synthetic construct
  misc_feature 1..2295: note = Description of Artificial Sequence: Synthetic coding sequence
  source 1..2295: mol_type = other DNA
atggccggctggatccaggcccagcagctgcagggcgacgccctgcgacagatgcaggtgttgtacgggcagcacttccctatcgaggtgcggcactatctggcccagtggatagagagtcaaccttgggacgcaattgacttggacaatcctcaggaccgtgctcaagccacccagctgcttgaagggttagtccaggagctccaaaagaaggcagaacatcaggtgggcgaggatggcttcctgctgaagattaaactgggccattacgcaacccaactccagtgctcgtctccagccggaatcctggttgatgctatgtcccaaaaacatttgcaaattaatcagacatttgaagagctccggctcgttacacaggatactgagaacgagctcaaaaagctgcaacagacccaagaatattttatcatccagtatcaggagtcacttcgaatccaggcccaattcgcccagctcgctcaactgagtccccaggagcgtctcagcagagagacagcgctccagcagaagcaggtatctttggaggcatggctgcaacgtgaagctcaaacgttgcagcagtatagggttgaattagcagagaaacaccagaagacactgcagctccttcgtaagcagcagaccattatcctagacgatgagctgattcaatggaagaggaggcagcagctggccggaaacggaggaccccccgagggttctcttgatgttctacaatcatggtgcgagaaactggcagagattatatggcagaatcgacagcaaatccggagggcagagcatttgtgccagcagctccctattcccggtcccgtggaggaaatgctggcagaagtcaatgccaccatcaccgatatcatatcggccttggtcacaagcacgttcattatcgagaaacaaccccctcaggtccttaagacccagacaaagtttgctgcaacagttaggctgctggtgggcggcaaactgaacgtgcacatgaatcctccccaggtgaaggcaactattatctctgagcagcaggctaagagcttgttgaagaatgaaaatacaaggaacgagtgctccggagaaatcctcaacaactgctgtgtcatggagtatcatcaggcaactggcacactgagcgcccacttcaggaacatgagcttaaagcgtatcaaaagggcagatagaaggggtgcagagtctgtgactgaggagaagttcactgtgttatttgagtctcaattttccgtggggtccaatgaactagtgttccaggtgaagaccctcagtctcccggttgtcgtgatcgtgcacggtagtcaggatcacaatgctacggccacggtgttgtgggacaacgctttcgctgagccaggacgcgtgccttttgctgtccccgacaaggttctgtggcctcagttatgtgaagccctcaatatgaaatttaaggccgaagttcagtccaatcgcggactgaccaaagaaaatttggtgttcttagctcagaagttgtttaataattcgagctctcacctagaagactactctgggcttagtgtctcctggtcccagtttaatcgggagaatctgcccggctggaactacacattctggcagtggtttgacggcgtcatggaggtgctgaagaaacaccacaagcctcactggaacgacggggccatccttggctttgtgaataagcagcaagcccatgatctgctcattaacaaaccagacggaacgtttttactccgcttctcagattcggagatcggaggcatcacgatcgcctggaaattcgatagcccagaaagaaatctatggaatttgaagcccttcaccacgcgggacttttcaattcgctccctggctgacaggctaggggatctgtcctatcttatttacgtcttccccgaccggccgaaagatgaggtgtttagcaagtactatactccggtgctcgcaaaagcagttgacgggtacgtgaagccgcagatcaaacaagtcgtgccagagttcgtaaacgcttctgccgatgcgggcgggtccagcgcgacatatatggaccaggctcctagccccgcggtgtgcccccaggcaccttataatatgtacccccaaaatcccgatcatgtgctcgatcaggacggagaatttgatcttgacgaaacgatggacgtggcccgacatgtcgaagaactgctgcggcgtcctatggatagtctagactcaagattaagtccgcccgcaggactcttcacctccgccaggggcagcctgtcctag

SEQ ID NO: 26376 - DNA, 2295 bp, synthetic construct
  misc_feature 1..2295: note = Description of Artificial Sequence: Synthetic coding sequence
  source 1..2295: mol_type = other DNA
atggccggctggatccaggcccagcagctgcagggcgacgccctgcgacagatgcaggtattgtatggacagcacttcccgattgaggtgagacactacctggctcagtggattgagtcacagccatgggacgctattgatttggacaacccccaggatagagctcaagccacacaactgttagaagggttagttcaggagcttcagaaaaaggccgagcaccaggtgggcgaagacggtttcctccttaagattaagctgggccactacgccacccaactgcagtgctcatcacccgccggaattctggtagatgccatgtcccaaaagcacctacagataaatcaaacgtttgaggagctgcgtctagtcacccaggacaccgaaaatgagcttaagaaactgcagcagacacaagaatatttcatcatccagtaccaggaaagcctacggattcaagcccagtttgcacaactcgctcagcttagtcctcaggaacgactttcacgcgaaacagctcttcagcagaagcaagtgtccttagaagcatggctccaacgggaagcacagacattgcagcagtatcgggtcgagctggctgaaaaacatcagaagacgcttcagctgctccggaagcaacaaaccattattcttgacgatgagcttatacagtggaagcggcggcaacaactggccggcaatggcggccccccggaaggctcccttgacgtgcttcaatcttggtgcgagaagcttgctgagattatttggcagaaccgccaacaaatcaggagggcggagcacctgtgtcagcagttacctatcccaggacctgttgaggaaatgctcgctgaagtgaacgccaccatcacagacattatatccgctcttgtcacctccacctttatcatagaaaaacagccaccacaggttctgaaaactcagaccaagtttgcagccactgtccgcttgctggttggcgggaagctgaatgttcacatgaatcccccccaggtgaaagcaacgatcatctctgaacagcaggccaaaagcctcctaaaaaacgaaaacaccaggaatgaatgctccggtgagatcctgaacaattgctgcgtcatggagtaccatcaggctacagggaccctgagcgcacacttccgaaacatgagtcttaagcgcatcaagcgcgcagaccgaaggggcgctgaaagcgtcactgaagaaaaattcaccgttctcttcgaatcacaattttctgtgggcagcaacgagcttgtgtttcaggtgaagaccctcagtctcccagtcgtggtaatcgtccatgggtcccaggaccataatgctaccgcaaccgtgctgtgggataacgccttcgccgagccgggcagagtcccgtttgctgtgcctgataaggtgctctggccccaactctgcgaagctttgaacatgaagtttaaggccgaagtgcagtctaacagaggcctgacaaaagaaaacctcgtgttcctcgctcagaagctctttaacaacagtagttcccacctcgaggactattccggtttgtccgtgtcctggagccagtttaacagagaaaatctcccaggatggaactacaccttctggcaatggtttgacggtgtgatggaggtgctgaagaaacatcacaaaccccactggaacgacggcgctatcctaggatttgtgaacaagcagcaggcccacgatctgctcattaataagccagatggaactttcctgctccggttctctgacagcgagataggcggcatcactattgcctggaagtttgacagccccgagagaaacttatggaacctgaaaccatttaccaccagggatttcagcattcgctcacttgctgatcggctgggtgacctgagctacctcatttatgtttttcccgatcggcctaaggacgaagtttttagtaagtactacacccctgtcctcgccaaggcggtggatggttatgttaagccgcagatcaagcaagtcgtgcccgagttcgtaaacgcctccgctgacgcagggggaagtagcgccacctacatggatcaggccccgagccctgctgtatgtccacaggcaccatacaacatgtacccacagaacccagatcacgtactggatcaagacggtgagtttgatttagatgagacaatggatgtcgctcggcatgtagaagaactcttgcgtagacctatggacagtcttgatagccgtctctcaccccccgccggcctgtttacgagtgcaagaggatctttgtcgtag

SEQ ID NO: 26377 - DNA, 2364 bp, synthetic construct
  misc_feature 1..2364: note = Description of Artificial Sequence: Synthetic coding sequence
  source 1..2364: mol_type = other DNA
atggccgtgtggatccaggcccagcagctgcagggcgaggccctgcatcaaatgcaagctctgtacggtcagcacttcccaatagaggtgcggcattacctttcgcagtggattgaaagccaagcctgggattccgtcgacttggacaatccccaagagaatatcaaggctacacagctgctggaggggttagtgcaggaacttcagaaaaaggccgaacatcaggttggcgaggatgggttcttgcttaagatcaagctgggccactacgcaactcagctgcagaacacctacgatagatgccccatggaattggtgcgatgcataaggcacattctgtacaatgagcagcgcctcgtcagggaggcaaacaatgggagtagcccagctggttcactagccgacgcgatgtctcagaaacacctccagatcaaccagaccttcgaggaactgcgccttgtgacacaggatactgagaacgaactaaaaaagctgcagcagacgcaagagtacttcattatccaataccaggagtcactgcgaatccaggctcagtttgggccactggcccagttgtccccgcaggagcgcttatctcgtgaaactgctctccagcagaagcaagtcagcctggaagcttggctgcaacgcgaggcacaaacactgcagcagtaccgagtcgagctggcagaaaaacatcagaaaacacttcagctgctgaggaagcagcagactatcattctagatgatgagctgatacagtggaaacggcgacagcagctggctggaaacggcggcccccctgaggggtcgcttgacgtcttgcagtcttggtgcgagaagctggccgagataatatggcagaatagacaacaaatcagacgcgcagaacatctgtgccagcagttgccaatccctggaccagtcgaggaaatgctagcggaagtgaacgccactattactgatataatttcggccttggtcactagcacctttattatagaaaagcagccaccgcaagtcctcaaaactcagaccaagttcgcggctacagtgcggctcctggtgggcggtaagttgaatgtgcatatgaacccgccgcaagtaaaggccactattatatcagagcagcaggcaaaaagcctgctgaagaatgaaaacactcgcaatgattacagtggcgagatcctgaacaattgctgtgttatggagtaccaccaagctacagggacactcagcgcccacttccgaaatatgagcctgaaaagaattaaaaggtccgatcgacgtggggctgagagcgttaccgaagagaagtttaccatcctcttcgaatcacaatttagtgtcgggggaaatgagctggtattccaggtgaagacgctgagtttgcctgtggtggtgatagtgcacggatcccaggataacaacgccacagctaccgttctgtgggataacgcctttgctgagccggggcgcgtgccattcgctgtgcctgacaaggttttatggcctcaactgtgcgaagcgcttaacatgaaattcaaagccgaagtccagtccaataggggcctgactaaagagaatctcgtcttcttagcacagaaactgtttaacaatagttcaagccacttggaagactacagcggactgtccgtctcatggtctcaatttaatagggagaatctcccgggaagaaactacacgttctggcagtggtttgacggtgtgatggaagtcttgaaaaaacacctcaagccacattggaacgacggggctatcctcggctttgtcaacaagcagcaggctcatgacttgctcataaataagcccgacggcacgtttttgttgcggtttagcgattcggagatcgggggtataactatcgcttggaaattcgacagccaggagcgcatgttctggaatctgatgcctttcactactagggacttcagtataaggagtctggccgataggcttggggatcttaattacctgatctacgtctttcccgatagacccaaagacgaggtatacagcaagtactacacaccagtgccgtgcgaaagcgcaacagcaaaggctgtggatggatatgtcaagccacagattaagcaagtggttcccgagtttgttaacgcgtctgccgacgccggaggaggcagcgctacttacatggaccaggccccaagtccggcggtttgtccccaggcacattacaacatgtacccccagaacccagactccgtgttagacaccgatggcgattttgacctagaggatactatggatgtcgcaaggcgggtagaggaactgttgggtagacccatggactctcagtggattcctcacgcacagagctag

SEQ ID NO: 26378 - DNA, 471 bp, synthetic construct
  misc_feature 1..471: note = Description of Artificial Sequence: Synthetic coding sequence
  source 1..471: mol_type = other DNA
atggccgtgtggatccaggcccagcagctgcagggcgaggccctgcaccagatgcaggcgctgtatggccaacactttcctatcgaggtaaggcattacctcagccaatggattgagagccaggcatgggattctgtggacctggataatcctcaggaaaacataaaggcgacccagctgctggagggtctggtgcaggagctacagaaaaaggccgagcaccaggtgggggaggacggctttctcttaaaaatcaagcttgggcactacgcgacccagctccaaaacacctatgatcgctgtcccatggagctcgtgaggtgtattcggcatatactctataacgaacaaaggcttgtcagagaagccaataacggttcgtctcccgccggttctttggccgacgccatgtcccagaaacatctgcagatcaaccaaactttcgaagaattgcgactggtgactcagtag

SEQ ID NO: 26379 - DNA, 534 bp, synthetic construct
  misc_feature 1..534: note = Description of Artificial Sequence: Synthetic coding sequence
  source 1..534: mol_type = other DNA
atgccccaggccttcctgctgggcagcatccacgagcccgccggcgccctgatggaaccgcagccctgtcctggcagtctagccgaatccttcttggaggaggaactgaggttgaacgcggaattgagtcaacttcaattttctgagcccgtcgggatcatctataatcccgtggagtacgcttgggagccacaccgcaactatgtcactaggtattgtcaggggcctaaggaagttctgttcctggggatgaatcccggaccatttggtatggcccaaaccggcgtgccttttggagaggttagcatggtgagagactggctcggtatcgtgggcccggtccttacaccgccgcaagagcaccctaagcgcccagttcttggtttagagtgtccacagtccgaagggccgaggcagagcatggggcacgagattaaatcagagttactgatgggtggatgttcctggatccgtggaaaaattcagtgcgacagggtgcaagttaggcggccaggcttcagcagccaattgtag

SEQ ID NO: 26380 - DNA, 813 bp, synthetic construct
  misc_feature 1..813: note = Description of Artificial Sequence: Synthetic coding sequence
  source 1..813: mol_type = other DNA
atgccccaggccttcctgctgggcagcatccacgagcccgccggcgccctgatggaaccccaaccctgcccaggatccttagctgagagtttcctggaagaagaacttcggctgaatgcggagctgagccaactccagttctcggaaccagtaggcataatttacaacccagttgaatatgcttgggaaccgcatcggaattatgtgacgcggtattgtcaggggccgaaggaggtattgttcctgggcatgaatcccgggccattcggcatggcacagactggcgtacctttcggggaagtcagcatggttagagactggctgggaatcgtaggtcctgtgctgacgcctcctcaggaacacccgaaacgaccagtcctcgggttagagtgccctcagtcggaggtgagcggtgctagattctggggctttttcaggaatctgtgtggccaaccagaagttttcttccaccactgtttcgtgcacaatctttgtcccctgctctttcttgcaccttctggccgcaacctgacgccagcagagctccctgcgaagcagagagaacagctgctgggcatctgcgacgccgcactgtgtcggcaagtacaactgttaggggttaggttggtggtcggagtgggccggctcgctgagcagcgggcaaggcgggcccttgccggactcatgcccgaggtgcaggtggagggcctgctacatccatctcccaggaacccacaagcaaataaaggctgggaggcagtcgccaaggagcgactgaacgaactgggcctattgccactccttctgaagtag

SEQ ID NO: 26381 - DNA, 813 bp, synthetic construct
  misc_feature 1..813: note = Description of Artificial Sequence: Synthetic coding sequence
  source 1..813: mol_type = other DNA
atgccccaggccttcctgctgggcagcatccacgagcccgccggcgcactcatggagccccagccttgtccagggtccttagccgagtcattcctggaagaggagctaaggttaaacgcagaactgagccagctgcagttttctgagcccgtcggaattatatataatccagttgaatacgcatgggagccacatcggaattatgtcacaagatactgtcagggccctaaggaggtgctattcttgggaatgaatcctgggccctttggcatggcccagaccggtgtaccttttggggaagtttcaatggttcgggattggctgggaatcgttggacccgtacttaccccaccccaggagcacccaaagagacctgtgcttggtttggagtgcccccagtctgaggtctccggggctcgattctgggggttctttcggaacctctgtggacaacctgaggtattcttccatcactgctttgtgcacaacctgtgtcctctcctgtttctggccccatctgggcgcaacctgaccccggccgagctgcctgcgaaacagcgggagcagttgctggggatctgtgatgcggccctgtgcaggcaggtgcagctgctgggggtgcggctagtggtgggtgtcggacggctggctgaacagcgcgcccgccgcgcgctggcaggtctgatgcctgaggtgcaggtggaaggactgcttcacccttcgccaaggaatccacaggccaataagggctgggaggctgtggcgaaggagcgcctgaatgagctgggtctacttcccttgctcctgaaatag

SEQ ID NO: 26382 - DNA, 249 bp, synthetic construct
  misc_feature 1..249: note = Description of Artificial Sequence: Synthetic coding sequence
  source 1..249: mol_type = other DNA
atgccccaggccttcctgctgggcagcatccacgagcccgccggcgctttaatggaaccacagccatgtcccggttccctggctgagagttttctggaagaggaacttcgcctcaacgctgagctttctcagcttcaattttctgagcccgtgggaatcatatacaacccagtcgagtacgcctgggagcctcacagaaactatgttacgaggtattgccagggcccaaaggaagtgctattcctgtag

SEQ ID NO: 26383 - DNA, 519 bp, synthetic construct
  misc_feature 1..519: note = Description of Artificial Sequence: Synthetic coding sequence
  source 1..519: mol_type = other DNA
atgccccaggccttcctgctgggcagcatccacgagcccgccggcgctctgatggagcctcagccatgtcccggcagccttgcagagtccttcctggaagaggagttacgtctgaatgctgaactctcccagttgcagttcagcgaacccgtgggcataatttacaatcccgtagagtatgcttgggaacctcatcgtaactacgtcacgaggtactgccagggtcctaaggaggtactgtttctcgggatgaaccccggaccctttgggatggcccaaaccggtgtgccatttggcgaagtgtcaatggttcgcgactggctcggaatcgtgggaccagtgcttactccccctcaggagcaccccaagaggccagttttgggattggaatgcccacaatcagaggtctccggcgctcgcttttggggatttttcaggaacctttgcggccagccagaagtgttctttcatcactgcttcgtccacaacctctgtccactgctgttcttagctccgtag

SEQ ID NO: 26384 - DNA, 291 bp, synthetic construct
  misc_feature 1..291: note = Description of Artificial Sequence: Synthetic coding sequence
  source 1..291: mol_type = other DNA
atgccccaggccttcctgctgggcagcatccacgagcccgccggcgctttaatggagccccagccatgtcccgggagcctggcagaaagcttcctggaagaagagttgcgtctgaacgcagaactctctcagctgcagttttccgagcccgtgggcattatctacaatcccgtggagtatgcctgggagcctcataggaattatgtgactcggtattgtcagggtccaaaagaggtgctatttttaggcatgaaccctgggccttttggcatggcacagactggggtgtag

SEQ ID NO: 26385 - DNA, 273 bp, synthetic construct
  misc_feature 1..273: note = Description of Artificial Sequence: Synthetic coding sequence
  source 1..273: mol_type = other DNA
atgccccaggccttcctgctgggcagcatccacgagcccgccggcgcactcatggagccccaaccttgtcctgggagcttagctgaaagttttctggaagaagaacttcgtctcaacgcagagttaagtcaattacagtttagcgagcccgtggggataatatataacccagtggaatacgcatgggagcctcacaggaactacgttacacgctattgtcagggacctaaagaagtcctgttccttggaatgaacccgggccctttcggctag

SEQ ID NO: 26386 - DNA, 534 bp, synthetic construct
  misc_feature 1..534: note = Description of Artificial Sequence: Synthetic coding sequence
  source 1..534: mol_type = other DNA
atgccccaggccttcctgctgggcagcatccacgagcccgccggcgcgcttatggaaccccaaccctgccccggcagcttagctgagagttttctcgaggaggaacttcggctgaacgccgaactcagtcaattgcagttcagcgagccagtaggaataatatataaccccgtcgaatatgcttgggagccacatcggaattacgtgacacgctattgtcagggccctaaggaggtgctgtttttgggaatgaacccaggtccgttcggaatggctcagacgggggtgcccttcggtgaagtgtccatggtgagggactggttagggatcgtcgggccagtccttaccccccctcaagaacatcccaaacgtcctgtgctcggcttggaatgtcctcagagtgaggggcctaggcagtctatgggacatgagatcaagtctgaactcctgatgggcggatgctcctggattcgagggaaaatacagtgtgaccgggtccaagtacgtcgaccagggtttagttcacagctgtag

SEQ ID NO: 26387 - DNA, 327 bp, synthetic construct
  misc_feature 1..327: note = Description of Artificial Sequence: Synthetic coding sequence
  source 1..327: mol_type = other DNA
atgccccaggccttcctgctgggcagcatccacgagcccgccggcgcacttatggagccacagccttgtccgggtagcctggcagaatcgttcttggaggaggagcttagattgaatgcggagcttagccagctgcagttttccgagccagtgggaatcatctataatccagttgaatacgcttgggagcctcacagaaattatgtcacccggtattgtcaggggcccaaggaagtgctcttcctggggatgaatcccggacccttcgggatggctcagactggggtgccgtttggagaggtgtctatggtcagagattggttgtag

SEQ ID NO: 26388 - DNA, 813 bp, synthetic construct
  misc_feature 1..813: note = Description of Artificial Sequence: Synthetic coding sequence
  source 1..813: mol_type = other DNA
atgccccaggccttcctgctgggcagcatccacgagcccgccggcgcactgatggagccccagccttgccctggatccctcgccgagagcttcctcgaggaggagttgcgtctcaacgccgagctgagccagctgcagttttctgagcccgtcggaatcatttataatccagtggaatatgcttgggaaccccaccgaaattacgtaacgcgatactgtcagggccctaaggaggtgctctttcttggcatgaatccaggcccctttggaatggcccaaaccggagtgccatttggagaagtgagtatggtgagagactggctcggaattgtcgggcctgttctgaccccgccgcaggaacatcccaaaaggccggtactgggactggagtgcccgcagtccgaggtgtcaggagctcgcttttggggatttttcagaaatttgtgcggacaaccagaagtttttttccaccactgcttcgtgcataacctttgtcccctgctctttcttgctccctctggacggaacctaactccagccgaactgcccgctaagcaacgggaacagctgctgggaatctgcgatgccgcattgtgtcgtcaagtacaactgttgggggtgcgactggtcgtgggtgtgggccgcctcgcagagcagagagctcgaagagctctggctggactgatgccagaggtgcaggttgagggactgctgcacccgagcccacggaacccccaggccaacaaagggtgggaagccgtggcaaaggagcgacttaatgaactgggactcctcccacttttgcttaaatag

SEQ ID NO: 26389 - DNA, 534 bp, synthetic construct
  misc_feature 1..534: note = Description of Artificial Sequence: Synthetic coding sequence
  source 1..534: mol_type = other DNA
atgccccaggccttcctgctgggcagcatccacgagcccgccggcgccctcatggagccccagccttgcccgggctccctcgctgagagttttcttgaggaggaacttcggctgaacgctgaattgtctcagttgcagttctcagagccagttggaattatctataatcccgttgaatacgcttgggaacctcatcgcaattacgtaacccggtattgccagggccccaaggaggtccttttcctcggtatgaaccctggtccgtttggtatggcacaaacaggcgtgccattcggtgaagtgtctatggtgagagactggctgggaatcgttggacccgttttgacaccgccgcaggagcaccctaaaagacctgtcctgggcttagagtgcccgcaaagcgagggacctcgccaatcgatggggcatgagataaaaagcgagcttttaatgggagggtgctcatggattcgcggtaagatccaatgtgatcgtgtacaggtgagacgacccggtttcagctctcaactgtag

SEQ ID NO: 26390 - DNA, 534 bp, synthetic construct
  misc_feature 1..534: note = Description of Artificial Sequence: Synthetic coding sequence
  source 1..534: mol_type = other DNA
atgccccaggccttcctgctgggcagcatccacgagcccgccggcgctctcatggagcctcagccttgccccggatctctggcagaatctttcctcgaagaagaacttcgcctcaacgctgagctgtcccagctgcaattctccgaacccgtgggaatcatatataatcccgtcgagtatgcttgggagccacacagaaattatgtcacccggtattgtcagggtccgaaggaggttttgtttctgggaatgaatccaggaccctttggtatggctcaaactggcgtcccattcggggaggtttcgatggtgcgtgactggttgggcatcgttgggcccgtgctcactcctcctcaggagcatcccaaacgccccgtactcgggctagaatgccctcagagcgagggcccacgtcagagtatggggcacgaaattaagtctgagctccttatgggcgggtgcagttggatacggggaaagattcagtgtgatagggtccaggtgagacggccaggctttagtagtcagctgtag

SEQ ID NO: 26391 - DNA, 1170 bp, synthetic construct
  misc_feature 1..1170: note = Description of Artificial Sequence: Synthetic coding sequence
  source 1..1170: mol_type = other DNA
atggccgagcccgaccccagccaccccctggagacccaggccggcaaagtgcaggaggcacaggatagcgacagtgattctgaagggggcgccgcgggcggcgaagccgacatggattttctgcgcaacctcttcagtcaaacgctctctttggggagccaaaaagaacgcctgttagacgaattaaccctcgagggagtggcccgatacatgcagagtgagcgttgtcgacgagtgatatgcttggtgggagccggaataagcacatccgctggcatccctgactttcgatctccctctaccggcctgtatgataatttagagaaataccatctgccctaccctgaagctatttttgaaatttcctactttaagaaacaccccgagccatttttcgccctcgcgaaggaactgtatccagggcagttcaagccaacgatctgtcattattttatgaggctcttgaaagacaagggcctgttattgcgctgttatactcagaacatcgacaccctggaacggatcgccgggctagaacaagaggacctggttgaggctcacgggactttctatacctcccactgcgtgtcagccagttgtcgtcatgagtatcctctcagctggatgaaggagaaaatattcagtgaagtaacacccaaatgcgaagattgccagtccctggtaaaacccgatatcgtttttttcggcgaatcgctgccggcccgtttcttttcctgcatgcagagcgattttctgaaagtagacttattgttagtgatggggactagcctgcaagtacagccattcgcatcactgatctccaaagcccctctgtctactccgcgcttgttgattaacaaagagaaggcaggccagtcagaccctttccttggcatgataatgggactgggcgggggaatggatttcgattccaagaaggcctaccgcgatgtagcgtggcttggcgagtgcgaccagggatgccttgctctggccgaacttttgggctggaagaaagagcttgaggacttggtgcgtcgggagcatgccagtatagacgcacaaagtggggccggggtgccaaatccttctacgtcagcaagccctaaaaagtcaccacctcctgctaaggatgaggcaagaactacagaaagagagaaaccccagtag

SEQ ID NO: 26392 - DNA, 816 bp, synthetic construct
  misc_feature 1..816: note = Description of Artificial Sequence: Synthetic coding sequence
  source 1..816: mol_type = other DNA
atggccgagcccgaccccagccaccccctggagacccaggccggcaaggtccaggaagcgcaggactctgatagtgattccgagggcggggctgccggcggcgaagctgacatggacttcctccgcaacctctttagtcagacattatccctgggtagccaaaaggagcgcctgctcgacgagctcaccctcgaaggcgtagcacgctatatgcagtcagagcggtgcagacgggttatttgcctggtaggggccgggattagcacttccgcaggcatcccagatttccggagccctagtacaggcctgtatgataacctggaaaaatatcatcttccgtatcccgaggccatctttgagatctcctattttaagaagcaccccgagcctttcttcgctcttgccaaggaactctatcctggccagtttaagccgacgatatgtcactacttcatgcgcctattgaaagataaaggactcctccttagatgctatacacaaaacatcgacacactggagaggattgcaggccttgagcaagaagacctggtagaggcacacggcaccttctatacatcccactgcgtgtctgcaagctgccgccatgaatatccactctcttggatgaaggagaagatcttcagtgaggtcaccccgaagtgcgaggactgtcagtcactggtgaaacctgacattgtttttttcggcgaaagcctcccggcacggttcttctcatgtatgcagagtgactttctgaaggtggatctgctgctggtaatgggcacgagcctgcaaggtcggggcctggcggggtag

SEQ ID NO: 26393 - DNA, 393 bp, synthetic construct
  misc_feature 1..393: note = Description of Artificial Sequence: Synthetic coding sequence
  source 1..393: mol_type = other DNA
atggacttcctgcggaacctgttcagccagaccctgagcctgggctcccagaaagaacggctactggatgaactgacactggagggggtcgctcgttacatgcagtccgagagatgtaggagggtgatctgtcttgtgggggcaggcatctctacctccgcaggcattcccgactttaggtccccctctaccggtttgtatgacaatctggagaaatatcatctcccttaccctgaggccatattcgaaattagctacttcaagaaacatccagaaccattcttcgctctcgcaaaggaactctatcccggccagtttaagccaaccatatgtcactatttcatgagacttttaaaggataaaggcctactcctgcgctgttacactcagtag

SEQ ID NO: 26394 - DNA, 1059 bp, synthetic construct
  misc_feature 1..1059: note = Description of Artificial Sequence: Synthetic coding sequence
  source 1..1059: mol_type = other DNA
atggacttcctgcggaacctgttcagccagaccctgagcctgggctcgcagaaggagcgtttactcgacgaactgacgctggagggcgtcgctaggtacatgcagtctgaacgatgtcgtcgtgtgatctgcctcgtgggtgctggcatatctacatctgctgggattcccgactttcgaagtccctcaaccggtttatatgataacctcgaaaagtaccatctcccctatccagaggccatcttcgaaattagttactttaaaaaacatccggaaccattctttgcgctggccaaagagctgtatcctggtcagttcaaaccaaccatttgccattactttatgagactactgaaggataaagggctgttgctgagatgctatacacaaaatattgacaccctcgagagaatcgccgggctggagcaggaagacctggtggaggcacacgggactttctacactagccactgcgtgagcgcaagctgcagacatgaataccctttaagctggatgaaggaaaagatcttttcagaggtaacacctaagtgcgaggactgccagtccctggtaaagccggacattgtctttttcggggaatccttgccagcccggttcttctcctgcatgcagagtgattttctgaaagtagaccttctgctcgttatgggaacttccttgcaggttcagccctttgccagcctaatctccaaagcccctctgtcaaccccacgcctgctgataaacaaggagaaagcgggtcagtcggaccctttcctcggcatgatcatggggcttggcggtgggatggatttcgattccaagaaagcctatagggacgtcgcgtggttgggcgaatgcgaccagggctgcttagccctcgccgaactcctcgggtggaaaaaagagctggaggatctagtaaggcgggaacacgcatctattgatgcccagtcgggcgcaggggtgcctaacccgtctacgtctgcatcccctaagaagtccccccctcccgcaaaagacgaagctagaaccacagaaagggagaagccacagtag

SEQ ID NO: 26395 - DNA, 510 bp, synthetic construct
  misc_feature 1..510: note = Description of Artificial Sequence: Synthetic coding sequence
  source 1..510: mol_type = other DNA
atggacttcctgcggaacctgttcagccagaccctgagcctgggcagccagaaagagcgcctgctcgacgagttgacactggaaggggtggctcgctacatgcagagcgaacgctgtaggcgggtgatctgtttggtaggtgctggcatcagcacaagcgctgggatcccagatttccggtcaccctcaaccggactttacgacaacctcgaaaaataccatctaccctatcctgaagctatattcgagataagctacttcaaaaagcatcccgaacccttctttgccctcgccaaggagctctacccgggtcagtttaaaccgactatttgtcattacttcatgcgacttcttaaggataaagggctgctcttacgctgctacacccagaatatagacacgctggagagaattgcaggattggagcaggaagatctggtggaggcccatggtacattttacacaagtcactgcgtgagcgccagttgccgtcacgaatatcctctgtag

SEQ ID NO: 26396 - DNA, 714 bp, synthetic construct
  misc_feature 1..714: note = Description of Artificial Sequence: Synthetic coding sequence
  source 1..714: mol_type = other DNA
atggacttcctgcggaacctgttcagccagaccctgagcctgggctcccagaaagaaaggctgctggatgagctgaccctcgagggcgtggctaggtatatgcaaagtgaacggtgtcgccgggttatatgtttggtaggcgcgggcatcagtacaagtgccggtatccctgatttccgtagcccctcaactggactgtacgacaatttagagaagtatcatctgccttaccccgaggctatctttgagatcagttacttcaaaaagcacccagagcccttctttgccttggctaaagagctgtacccagggcagttcaagccgaccatttgtcattattttatgagacttctaaaagacaagggccttttgctaagatgttacacccaaaacattgacaccctcgagagaatcgctggcctggagcaagaagacttggtagaagcccatggcacattctacaccagtcattgtgtgagtgcctcctgtcgacatgaatatcctctgtcttggatgaaggaaaagatcttcagcgaagttactcctaaatgtgaggattgccaaagtttagtgaaacccgatattgttttcttcggggaatcactgcctgctcggttcttttcctgcatgcagtcagatttcctgaaagtcgacttgttgcttgtcatggggacctcgctgcaggtccagccattcgccagtctcatctcctag

SEQ ID NO: 26397 - DNA, 237 bp, synthetic construct
  misc_feature 1..237: note = Description of Artificial Sequence: Synthetic coding sequence
  source 1..237: mol_type = other DNA
atggacttcctgcggaacctgttcagccagaccctgagcctgggctcacagaaggagcgtttgctggacgaacttactctggagggggtagcccgctacatgcaatccgagcgttgccgcagggtgatctgcctcgtgggggccggaatttctacctccgcagggatacccgacttcaggtctcctagcaccgggctgtacgataacttggagaagtatcatttaccgtatccatag

SEQ ID NO: 26398 - DNA, 222 bp, synthetic construct
  misc_feature 1..222: note = Description of Artificial Sequence: Synthetic coding sequence
  source 1..222: mol_type = other DNA
atggacttcctgcggaacctgttcagccagaccctgagcctgggctctcagaaggaaagactgcttgacgagcttactctggaaggcgtcgccaggtacatgcagagcgagcgatgtcggagagtcatttgcttagtgggagcgggtatatcaacatccgccgggattccggattttaggtcgcccagtacggggttgtacgacaatctcgagaagtattag

SEQ ID NO: 26399 - DNA, 1170 bp, synthetic construct
  misc_feature 1..1170: note = Description of Artificial Sequence: Synthetic coding sequence
  source 1..1170: mol_type = other DNA
atgagcgacgaggccgaggacagcgacagcgacagcgagggcggcgccgcaggtggggaggccgacatggattttctgagaaacctgttcagtcaaacgctgagtctcggttcccaaaaggaaaggctcctcgacgaactgaccttggaaggcgtggcccgctacatgcaatcggaaaggtgtaggagagtcatctgcctggtgggggctgggatctcaacctcagccggtattcctgatttcaggagccctagtaccggcctttacgataacctggagaaatatcaccttccatatccagaagcaatcttcgagattagttatttcaagaagcatccagagcctttttttgccttagcaaaggagctgtatccaggacagttcaagcccactatctgccactatttcatgcgcctgttaaaggacaagggactgcttcttcgctgctacacgcaaaatatagataccttggaacgtatcgccgggctggaacaggaggaccttgttgaggcccacggaactttttatactagtcattgtgtttccgcttcctgtcggcatgagtatcccctctcatggatgaaggagaagattttcagcgaagtgacgccaaagtgcgaggactgtcagagccttgtcaagcccgatatcgtatttttcggagaaagcctgccagccaggttcttctcatgcatgcagagcgacttcttgaaggtcgacctgttgttagtcatgggcacttctcttcaggtgcagccctttgcatccctgatctccaaggctcctctcagcacgcctcggctgctgataaacaaggagaaggcgggtcagtctgaccccttcttggggatgattatgggattggggggagggatggacttcgattccaaaaaagcctacagagacgtggcgtggcttggagagtgtgatcagggatgtctggctctggccgaactgctcggatggaaaaaagagctcgaagaccttgtacgaagggagcacgcatcaattgatgcacagggcggcggagggcctcagccacagcacttcagcttcccacaagaggtaccagctacgtgccaagggcgtggccaggacaacagagaaggggaaactcctgtgaccgctgctagccctcgaagggacgccgagctcctaagggattcctag

SEQ ID NO: 26400 - DNA, 1227 bp, synthetic construct
  misc_feature 1..1227: note = Description of Artificial Sequence: Synthetic coding sequence
  source 1..1227: mol_type = other DNA
atggccgagaacggcgacaacgagaagatggccgccctggaggccaaaatatgtcaccaaatcgaatactacttcggagattttaaccttcctcgggataagtttctcaaggagcagatcaaactcgacgaggggtgggtgcctctggaaatcatgatcaaatttaaccgcctcaacagattgacaacagattttaatgtgatcgttgaggccctgagcaagtcgaaggcagagttaatggaaatatccgaagacaagaccaaaattcgcaggtccccatcaaagcctctgccagaagtgacggacgaatataagaatgacgtgaaaaaccgcagcgtttatatcaagggcttccctacagacgcaacacttgatgacataaaggagtggctcgaggacaagggacaggtgttgaacatccagatgcggcgtaccctgcataaggctttcaaagggtctatctttgtcgtctttgattcgattgagagtgccaagaaatttgtggaaactcctgggcagaaatacaaagaaactgacctcctgattttatttaaagacgattactttgctaagaagaatgaggaacggaagcagaacaaggtggaggcaaagttacgagccaaacaggagcaggaggcaaagcaaaagctggaggaggatgcagaaatgaagtctttggaggagaagattggctgcttgctcaaattcagtggagacttagacgatcagacctgccgggaagatcttcacattcttttttccaatcacggagagattaaatggatcgacttcgtacggggagcgaaggaaggaatcattctgtttaaagagaaagccaaggaggccttaggcaaagctaaggacgccaataacggcaacctgcagctcaggaacaaagaagtgacctgggaggtgctcgaaggagaggttgagaaagaggctctgaagaagatcatagaggatcaacaggaaagtctgaataagtggaaatctaaaggaaggaggttcaagggtaagggaaagggcaataaggcagcacagccggggagcggtaaaggaaaagttcaattccagggtaagaagaccaaattcgcctccgacgatgagcacgatgaacacgacgaaaacggcgccaccggccccgtcaagcgtgccagggaggaaaccgacaaggaggagcccgcgagtaaacaacagaaaacggaaaacggagccggggaccaatag

SEQ ID NO: 26401 - DNA, 1086 bp, synthetic construct
  misc_feature 1..1086: note = Description of Artificial Sequence: Synthetic coding sequence
  source 1..1086: mol_type = other DNA
atggccgagaacggcgacaacgagaagatggccgccctggaggccaagatctgccaccaaatcgagtactacttcggggactttaacctaccacgggacaaatttttaaaggagcagataaaactggacgagggctgggtgcccctagaaataatgattaagtttaatagactgaatcgactgacgaccgattttaacgtcattgtggaggccctcagtaagtccaaggcagagctcatggagattagtgaggacaagacgaaaattcgcagatcacccagcaagcctctgcctgaggtcaccgacgagtacaaaaacgacgtgaagaacaggtccgtgtatatcaaaggtttccctaccgatgctaccctcgacgacatcaaggaatggcttgaggataagggtcaagtgctgaatatccaaatgaggcgtacgctgcacaaagcctttaaggggagcatttttgtggtattcgattctatcgaatccgctaaaaagtttgtggaaactcctggtcaaaagtacaaagagacagacttactcatcctatttaaggacgactattttgccaagaaaaatgaagagaggaagcagaataaggtggaggccaagttacgagctaagcaagagcaggaggctaaacagaagctggaggaagatgctgaaatgaagagccttgaagaaaagatcggttgcttactcaaattcagtggtgaccttgacgaccagacatgtcgtgaagacctccacatccttttctccaatcatggggaaatcaagtggatcgacttcgtaagaggtgccaaagagggcatcatccttttcaaggagaaggcgaaggaggccttaggcaaagccaaagatgcaaacaatggcaatttacaactgcggaataaggaagtgacgtgggaagtgctggagggagaggtggaaaaggaagcattgaaaaagatcattgaggaccagcaggaatcgctcaataaatggaagagcaaagggcccgtaaagcgggcccgggaagaaactgataaagaggaaccagcttctaagcagcaaaagaccgaaaatggagcgggcgatcagtag

SEQ ID NO: 26402 - DNA, 1227 bp, synthetic construct
  misc_feature 1..1227: note = Description of Artificial Sequence: Synthetic coding sequence
  source 1..1227: mol_type = other DNA
atggccgagaacggcgacaacgagaagatggccgccctggaggccaaaatatgtcaccagattgaatactacttcggtgatttcaacttaccaagggacaaatttctgaaggaacaaatcaaactggacgagggctgggtcccattggaaattatgattaagttcaaccgcctgaatcgactcactacagattttaacgttatcgtggaagccctcagcaagtctaaggctgagctcatggagatctcagaagacaaaaccaaaatccgcagaagcccttccaagccactgcctgaggtaactgatgagtataagaacgatgtgaaaaacaggagcgtgtatatcaaaggctttccaacagacgccacccttgacgatattaaggagtggttggaagataaggggcaagtgcttaatatccagatgcggcgcacgctgcataaggctttcaaaggatctatctttgtcgttttcgatagcattgaaagcgctaagaaatttgtcgaaactcctggccagaagtacaaggaaaccgacctgctgattctgtttaaagacgactacttcgccaaaaagaacgaagagagaaaacagaacaaagttgaggcgaaacttcgcgccaaacaagagcaagaggccaaacagaaactggaagaggatgccgagatgaagtctctcgaggagaaaatcggctgcctgctaaagtttagcggcgacctggatgatcaaacctgcagagaggacctccatattttgttcagcaaccacggcgaaattaagtggattgattttgtacgaggagctaaggaagggatcatcctgtttaaggagaaggccaaagaagcattgggaaaagcaaaggacgcaaataatgggaaccttcaactgcggaacaaggaagtgacgtgggaagtcctcgaaggagaagtcgagaaagaggccttgaaaaagatcatcgaagaccaacaggaaagtctaaataagtggaagtcaaagggaagacgtttcaaaggaaagggcaaagggaacaaggctgcacaacctggctcaggtaagggcaaagttcagttccagggaaaaaagactaaatttgcaagtgacgatgagcacgacgaacatgacgagaatggagctactggtccggtgaagagggcgcgcgaggagacagataaggaagagcctgcatcaaagcagcagaagaccgagaacggcgccggagatcagtag

SEQ ID NO: 26403 - DNA, 405 bp, synthetic construct
  misc_feature 1..405: note = Description of Artificial Sequence: Synthetic coding sequence
  source 1..405: mol_type = other DNA
atggccgagaacggcgacaacgagaagatggccgccctggaggccaagatatgtcaccaaatcgaatactattttggggattttaacttgccgcgggacaagttcctcaaggagcagatcaaactcgacgaaggctgggtgcccttggaaatcatgataaaattcaaccgactgaaccgcctgaccaccgattttaatgttatagtcgaggccctttcaaaatcaaaagccgaactcatggaaattagcgaggataagactaagatccgcaggtccccctccaaaccactgcccgaggtgaccgacgagtacaaaaacgacgtgaaaaacagaagtgtctatatctcacacccggtggctcatgtcggagtgcagtggtgcgaccacggccccttacagagctag

SEQ ID NO: 26404 - DNA, 363 bp, synthetic construct
  misc_feature 1..363: note = Description of Artificial Sequence: Synthetic coding sequence
  source 1..363: mol_type = other DNA
atgatcaagttcaaccggctgaaccggctgaccaccgacttcaacgtgatcgtggaggctctgagcaaaagcaaagctgagctcatggagatttcagaagataagacgaagatcagaagaagcccatctaagccacttcccgaggtcacagacgaatacaaaaatgacgtgaaaaaccgtagcgtctatatcaagggtttcccgacggatgcgaccttggacgatattaaggagtggctggaagacaaggggcaggtattgaacattcagatgcgccgcactttacacaaagccttcaaaggaagcatatttgtggtgtttgattcaattgagtcagctaaaaaattcgttgaaaccccttag

SEQ ID NO: 26405 - DNA, 555 bp, synthetic construct
  misc_feature 1..555: note = Description of Artificial Sequence: Synthetic coding sequence
  source 1..555: mol_type = other DNA
atggccgagaacggcgacaacgagaagatggccgccctggaggccaagatttgtcaccagatagagtattatttcggggacttcaacctgcctagggataagtttttaaaagaacagatcaagttagacgagggctgggtgcccctcgaaatcatgataaagttcaacagacttaatcgtctcacaaccgattttaacgtgatcgttgaggccttgtctaagagcaaggccgagctgatggaaatttcagaagataagaccaaaatccgacggtcccctagtaagccgttgccagaagttacggacgagtataaaaatgatgtgaagaacaggagtgtctatatcaaaggcttccccacagacgctaccctggacgatatcaaagaatggctcgaggataaaggccaggtgctaaacattcagatgcggaggaccctgcataaagcattcaaagggagcatctttgtggtatttgactccatcgaatctgctaaaaagttcgttgaaactcccgggcaaaaatataaggagacggatctgcttatcctcttctag

SEQ ID NO: 26406 - DNA, 252 bp, synthetic construct
  misc_feature 1..252: note = Description of Artificial Sequence: Synthetic coding sequence
  source 1..252: mol_type = other DNA
atgcggcggaccctgcacaaggccttcaagggcagcatcttcgtggtgttcgactcaatcgagagcgccaaaaagtttgttgaaacccccggacaaaaatacaaagagacggacctgttaatcttgttcaaagacgattacttcgcaaaaaagaacgaagaacggaaacaaaataaagtggaggcgaaacttcgcgcaaaacaggagcaagaggctaagcagaaactggaggaagatgcagagatgaaatag

SEQ ID NO: 26407 - DNA, 5505 bp, synthetic construct
  misc_feature 1..5505: note = Description of Artificial Sequence: Synthetic coding sequence
  source 1..5505: mol_type = other DNA
atgaagctgagcgtgaacgaggcccagctgggcttctacctgggctctctttcacacctcagtgcgtgtcctggcatcgatcctcggagctcggaagatcagcctgagtctcttaaaactggccagatgatggatgagtccgacgaagatttcaaggaactctgtgcctccttctttcagcgcgtgaaaaagcacggcattaaagaagtttcgggcgaaaggaagacacagaaggcagcctccaacggcacccagatcagatcgaagctgaagaggacaaagcagacggccacgaaaaccaaaaccttacaggggcccgccgagaagaaaccacctagtggatcccaggccccacgcacaaaaaagcagcgtgtgacaaaatggcaggccagcgagcccgctcactccgtaaatggcgagggtggggttctggccagtgcgcccgatcctcctgtgctgagggaaaccgcccagaatactcaaaccggtaaccagcaggaaccctcgcctaacctttctagggaaaagacccgagagaacgtgcctaacagcgattcccaacctccgccttcctgtctgacgacagccgtgcccagtccttctaagccccggacggcccagctagttttgcagaggatgcagcagtttaagagggcagatcctgagcgtctgcgccatgctagcgaagagtgcagtctggaagcagctagagaagaaaatgtgcctaaggatccccaggaggagatgatggccgggaacgtttatggactcggcccccccgctccggagtcagacgccgcagtggccttaactttacaacaggaattcgcacgggtcggagcttctgcccatgacgactctttagaggagaagggcctttttttctgtcaaatctgccagaagaatttgagcgccatgaatgtcactagaagagaacagcacgtcaatcgatgtcttgacgaggcggagaaaaccctgaggcccagcgtgccacagattccagagtgcccaatttgtgggaaacccttcctgaccttgaaaagtcgcacaagtcacctaaagcaatgtgccgtgaaaatggaggtgggtccgcagcttctactgcaggccgtgcgacttcagacagctcagcccgaagggtcttcaagtccacctatgttctcattctcagatcactctagagggttgaagcgacggggcccgacctcaaagaaggagccgcgcaaacgccggaaagtggacgaggccccctcggaagacttactcgtagccatggcgctgagtaggtccgaaatggaacctggggccgcagttccagctttgcgcctggagagtgccttttctgaacggattaggcctgaggctgagaataaaagccgaaaaaaaaagccgccagtctcgcctccactgctgctcgtccaggactccgagaccacaggcagacagatcgaagaccgggtggcacttttactgtccgaggaagtggagctctcctccaccccgcctctgcccgcatccaggattcttaaagagggatgggaacgcgccggccagtgtcctcctccccctgaaaggaaacaaagctttctttgggaagggagcgcactgactggcgcttgggccatggaagacttctacacagccaggctggtgcccccccttgtacctcagcgacccgcacaagggttgatgcaagagcccgtgccgcccttggtgccacctgaacactcggaacttagcgaaagaagaagccctgccctgcacgggacacctactgccggttgcggcagcagggggccaagtccttcagcaagccagagggagcatcaagccctgcaggatttagtggatctggctagggagggactgagtgcatcaccttggcccggctccggaggactggctgggagtgagggtacagccggattggatgtcgtccctggcggactgcccttgactggctttgtggtcccatcacaggataaacatcctgatcgcgggggtagaaccctcctcagtctgggactcctggtggccgatttcggtgcaatggtcaataatccacacctctctgacgttcagtttcagaccgactccggggaggtgctttatgcacataaatttgtgttgtacgcccgctgccctcttcttatccaatacgtgaataacgaagggttcagcgccgtggaggatggcgtcctcacccagcgggttctgctcggggacgtttccaccgaggccgcacggaccttcttgcactacctctatactgcagatacaggtctgccccctggactttccagcgagctgagttccctcgctcaccgctttggagtttccgagctcgtacacctttgtgaacaggttcccatagctactgactccgaggggaagccatgggaggagaaagaagccgaaaattgcgagagtcgggccgaaaactttcaggagctgctgcgatctatgtgggccgacgaggaggaggaggctgaaactctcctgaaatccaaagatcacgaagaggatcaggaaaacgtgaacgaagccgagatggaggaaatctacgagttcgctgccactcagagaaagcttctgcaggaggaaagagcggctggggctggcgaagatgcggattggcttgaaggcggttccccagtgtcgggacagctcttagctggggtacaggtgcagaagcagtgggataaggtcgaagaaatggagccactcgagcctggccgggacgaggctgccacaacctgggaaaaaatgggacagtgcgcattgccacctccgcaggggcagcatagtggagcaaggggggccgaggcccctgagcaggaggctcccgaggaggcattaggccacagcagctgttccagtccaagcagagattgccaggctgagcgtaaggaaggttctctgcctcattccgacgacgccggtgattacgaacaactgttcagcagcacacaaggggaaatttcagagccgtcccagataacaagcgaacctgaggaacaaagcggtgctgtgagggaaagagggttagaggtaagtcacagactggctccctggcaggcatccccacctcacccttgccgatttttgctgggaccaccccagggcggaagcccccgaggttcacatcacactagtggcagcagcttgtcaaccccccgctctcggggaggcacgagccaggtaggatcccccaccctcctgtccccggccgttccttcaaagcagaagcgtgaccggagcattttgaccctgtcgaaagagcccgggcaccaaaaaggcaaggagaggcgatcagtgcttgagtgtagaaataagggggtgctcatgtttccagaaaagtctccctccatagacctgacccagagtaaccccgatcactctagctcccgaagtcaaaagtctagttccaagctgaacgaagaggacgaagtgatattgctgctcgattcagacgaagagctggagctggagcaaacgaaaatgaagtccatttcatcggatccccttgaggagaagaaggcgttggaaatctctccgaggtcatgcgagcttttctctatcattgatgtggacgcggaccaggaaccaagtcagtccccgccgagatccgaagccgtcctccagcaggaagatgagggtgcactaccagaaaaccggggatccctcggcagaaggggggccccatggttattctgcgaccgggagtccagcccatctgaggcgtctaccacagataccagctggcttgtgccggcaactccactcgcttcccggagtagagactgctcttctcagacgcagatcagcagcttacgctccgggctagccgtccaggctgtgacacagcacacccctcgagcctcagtagggaacagggaggggaatgaggtggcgcagaaattctctgtcatcagaccccagactcctcctcctcagacacctagctcttgtcttacacccgtgtcgcctggcacctcagatggtcgccgacagggtcataggtcgccctccagaccgcatcccggcggacacccccattcttcccccctggcaccccatcctatcagcggagatcgggcccacttttcaaggaggtttttgaaacatagccctccgggaccttcattcctgaaccagacccctgctggcgaggtagtggaagtaggcgacagtgacgacgagcaagaagtggcctctcaccaagctaacaggtcaccacccctagacagtgatccccctattcctatcgacgactgctgttggcacatggagccactcagccccattcccatcgaccactggaacctggagaggactggccccttgagcacaagcagcccttccaggagaatgaatgaagccgctgattccagggattgccgaagcccgggactccttgacaccaccccgatcaggggaagttgcaccacccagaggaagctacaggagaagagctccggggctgggagcttgggtaacagtaggccctccttcctgaatagcgcgttatgggatgtctgggatggagaagagcagcggccacccgaaacacctccacccgcccagatgccgagcgcagggggcgctcagaagcctgaaggtctggaaacacctaagggggctaaccggaagaagaatcttcctccgaaagtacctatcacacctatgccacagtactctataatggaaacgcctgtgctgaaaaaggaactcgatagattcggggttcgaccactgcccaaacgtcagatggtgttaaagctaaaagagatcttccagtacacacaccagactctggactcggactcagaagatgaaagccagagtagtcagccactacttcaagcacctcactgccagactttggcgtctcagacgtacaagcctagtcgggccggggttcacgcacagcaagaggcgacaacaggacccggcgcccacaggcccaagggccctgccaagaccaaaggtccaagacaccagcggaagcatcatgaaagtattacgcccccgagcaggtctccgaccaaggaggcccctcctgggctcaacgacgacgcgcaaattcctgcctctcaggagagtgttgctacctctgtcgacggcagtgattcttccctatcatctcagtccagtagttcctgcgaatttggtgctgcctttgaaagcgctggggaggaagagggcgaaggggaagtgtctgcatcccaagccgccgtccaggcagcggatactgatgaagctttaagatgctatatccgctcgaaaccagccctctatcagaaagtgctgttataccagcctttcgagctcagggagctccaggcggaactgcggcaaaacggattaagggtttcctctaggcgactactggattttctggatacacattgtatcactttcaccactgccgcgaccaggagagagaagctccaggggcgaagaaggcagccccgtggaaagaagaaagtggaaaggaactag

SEQ ID NO: 26408 - DNA, 1404 bp, synthetic construct
  misc_feature 1..1404: note = Description of Artificial Sequence: Synthetic coding sequence
  source 1..1404: mol_type = other DNA
atgagcagcatcctgcccttcaccccccccgtggtgaagcggctgctgggctggaagaagagtgccggaggctccggcggcgcaggcggcggggagcagaatggacaggaagaaaaatggtgtgagaaggccgtgaaaagtcttgtcaaaaagctgaagaagaccggacgactcgacgagctcgagaaagccatcactacccagaattgcaacactaagtgcgtgactattccctcaacatgcagcgagatatgggggcttagtacgccaaacaccatcgaccagtgggacacaacagggctttattctttcagcgaacaaacgaggagcctggatggacgtctgcaagtgtcacataggaagggcttaccgcacgtaatatactgccgcctctggagatggccagatcttcactcccaccacgaattgaaggccatcgaaaactgtgagtatgccttcaacctgaaaaaggatgaagtttgtgtcaatccttatcattaccagcgtgtcgaaacgcctgttctgccccccgttcttgttcctagacacaccgaaatcctcacggaactccccccactagacgactacacacacagcatccccgagaacacaaattttcctgccgggatagagccccagagtaactacattcccgaaacccctccaccgggctatatctcagaggacggagaaacctcagaccagcaactcaatcagagcatggatactgggtctcccgcggagctcagcccgacgaccttgagcccagtgaatcactcactggacttgcagcctgtgacctatagtgagcccgcattttggtgctcaatagcttactacgaactcaaccaacgagtgggcgagaccttccatgcttcgcagccaagtctgactgtggacggattcacagatccttctaactcagagcgattttgcctcggcctgcttagcaacgtcaatagaaacgctacagtggagatgacgagacgacatatcggccgcggcgtaaggctgtattatatcgggggggaggtgttcgcggaatgcctgtccgactcggccattttcgtgcagagcccaaactgcaaccagcggtacggatggcaccctgccacagtctgtaagattccaccagggtgtaacctgaagatctttaataatcaggaattcgcagcattactggcacagtctgtgaaccagggattcgaggcagtgtaccaacttactagaatgtgtaccataagaatgagttttgttaagggctggggtgccgaatataggaggcaaactgttaccagtactccatgttggattgaactccatctgaacggtcctctgcagtggctggacaaggtattgacgcagatgggatcccctagcgtgcggtgctcaagtatgtcttag

SEQ ID NO: 26409 - DNA, 1314 bp, synthetic construct
  misc_feature 1..1314: note = Description of Artificial Sequence: Synthetic coding sequence
  source 1..1314: mol_type = other DNA
atgagcagcatcctgcccttcaccccccccgtggtgaagcggctgctgggctggaagaaatccgccgggggctcagggggcgccggcggaggcgaacagaatggacaagaagagaagtggtgcgaaaaagcagtcaagtcactcgttaagaaacttaaaaagactggcaggctggacgaactggaaaaggcaattacaacacagaattgtaatactaagtgcgtgaccatcccccggtctctggacggtcgcctgcaggtgagccatcgcaaggggcttccccatgtgatctattgcagactttggaggtggccagaccttcattcccatcatgagctaaaggctattgaaaactgcgaatatgccttcaatttaaagaaggacgaggtatgcgtgaacccctaccattaccaacgggtcgaaacacctgtcttaccccctgtcttggtccctaggcacaccgagatactgacagagctgcctcccttagacgattacacacactctataccagaaaacacaaatttcccagcaggcattgagccacagtcaaattacattccagaaactcctcctcctggatacattagtgaagatggggagacctctgaccagcagttaaatcagagtatggacacaggaagccccgccgaactgagtcctaccacgctgtcaccagtgaaccattccctggatttgcaacccgttacatattctgaacccgccttttggtgctccatcgcctactacgagttaaaccagcgggtgggggagacattccatgcctcccagccctccttaacggtggacgggttcactgaccctagtaattcggaacgtttctgtctcggcctgttgtccaacgttaaccgcaacgccacggtagaaatgacccgtagacacattggacggggcgtgcgcttatattacattggtggcgaggtgttcgcagagtgtctctcagattccgctatttttgtgcaatcacctaactgtaaccaaaggtacggatggcatccagccaccgtgtgtaagatccccccaggctgcaatctcaagatttttaataatcaggagtttgccgccctccttgctcagtcagtcaatcagggatttgaagccgtgtatcagcttactaggatgtgtacaatccgcatgagcttcgtgaaggggtggggtgccgaataccggagacagaccgtaacctctaccccctgttggatcgaactgcatctgaatgggccgcttcagtggctggataaggtgctgacgcagatggggtctccatcagtgagatgtagtagtatgtcgtag

SEQ ID NO: 26410 - DNA, 1404 bp, synthetic construct
  misc_feature 1..1404: note = Description of Artificial Sequence: Synthetic coding sequence
  source 1..1404: mol_type = other DNA
atgagcagcatcctgcccttcaccccccccgtggtgaagcggctgttaggctggaagaagagcgcaggaggcagcggcggagctggaggaggtgagcagaatggtcaagaggaaaagtggtgtgagaaggccgtgaagtcactagtgaaaaaactgaagaagaccgggcggctggacgaactggagaaagccatcactacccagaactgcaatacgaaatgtgtgaccatcccctcaacttgtagtgagatttggggactttccacacccaatacaattgatcagtgggataccaccggcttatatagtttttcagaacagactcggagcttagacggccggctacaggtcagtcataggaagggacttccccacgttatctattgtcgcctatggcggtggccggatttgcactcccaccacgaacttaaggcgattgagaactgcgagtatgcttttaatctgaaaaaggatgaggtgtgtgtgaatccttaccattaccagcgtgtggaaactcccgttttgccgccagtgctggtgccccgtcatactgagattctgacggaactgcctcccctggatgattatacacattcaattcctgaaaatactaattttcctgcagggatcgagccgcagagcaactatatccctgagaccccacctcctgggtacattagcgaggatggggaaaccagtgaccagcaactcaatcagagtatggatactggctcccctgctgagctgagtcctactaccctcagtcccgtgaaccactctcttgatctgcaacctgtcacctatagtgaacccgcattctggtgtagcatcgcatattacgaactgaaccaacgagtcggggagactttccatgcctcccaacccagcttgactgttgatgggttcacagatccgagcaacagcgaacgattctgtctgggcctcctgagcaatgtcaaccggaatgccaccgtggaaatgaccagacgccacataggacgcggcgtgcgcctctactacatcggcggcgaggtgtttgccgaatgtctgagtgactctgccatctttgtgcagtccccgaattgcaatcaaagatacggttggcaccccgccaccgtttgtaaaatacctcccgggtgtaaccttaaaatcttcaataatcaggagtttgctgccctcttggcgcaaagcgtcaaccagggctttgaggctgtctatcagcttactaggatgtgcactatccgcatgagttttgtcaaaggctggggcgcagagtaccggagacagaccgtgacaagtacgccctgttggatcgagcttcaccttaatggacccctgcagtggctcgataaggtgcttacacagatgggatcccccagtgtgagatgctcgagcatgtcctag

SEQ ID NO: 26411 - DNA, 1278 bp, synthetic construct
  misc_feature 1..1278: note = Description of Artificial Sequence: Synthetic coding sequence
  source 1..1278: mol_type = other DNA
atgagcagcatcctgcccttcaccccccccatcgtgaagcggctgcttggttggaaaaagggggaacagaatggccaggaggagaagtggtgcgaaaaagctgtgaaatctttagtaaagaaactcaaaaaaaccgggcagctggacgagctcgagaaagcgattaccacccagaacgtgaacactaagtgcataaccataccccggtccctggatgggaggttgcaagtctctcatcgtaaaggcctgccacatgtgatttattgccgcttatggaggtggccggatctgcactcacaccacgagctcagggctatggaactgtgtgaatttgcttttaatatgaaaaaagatgaagtctgtgtgaacccttaccactatcagcgggtagaaacaccggtcctacccccagtcctcgtgccacgacacactgaaatccctgccgagtttcctcccctagacgactatagccactccatcccagaaaacaccaatttcccagcaggcattgaaccacaaagcaacattcctgagacaccacctcccgggtacctgagcgaggacggagagacctctgatcatcagatgaaccattccatggacgccggctcccctaatctgtcccccaatcccatgtcaccagcccacaataatttggacttgcagcccgtcacatactgcgagcctgccttctggtgttcgatcagttattacgagcttaaccagcgggtgggcgaaactttccacgctagtcaacctagtatgacggttgatggctttaccgacccatctaatagcgagcggttttgcttaggtttgctatctaatgtgaaccgaaatgcagcagttgaactgacccgtagacatataggtagaggagtgcgtttatattatatcgggggcgaggtgttcgctgagtgtctatctgactcggccatctttgtgcaaagtccaaattgtaatcagaggtatgggtggcaccccgcaaccgtttgcaagatcccacctggatgtaacctgaaaatctttaacaatcaggagtttgcagctctgctcgcacagtctgtgaatcagggtttcgaggccgtgtaccagcttacaagaatgtgcactatccgaatgagcttcgtaaaaggctggggggctgagtatagaaggcagacagtcactagcaccccttgttggattgaactgcatctcaatggtcctttacagtggcttgacaaagtgctaacgcagatgggctcacccagtatccggtgcagctccgtatcctag

SEQ ID NO: 26412 - DNA, 1146 bp, synthetic construct
  misc_feature 1..1146: note = Description of Artificial Sequence: Synthetic coding sequence
  source 1..1146: mol_type = other DNA
atgagctgcctgcacccccggcagacctggaagggcgccgccctggtgcacagaaaggcttggtggatgggacggagcctcgatgggagactgcaagtctcccacagaaagggcctcccgcacgtcatctattgccgcctgtggagatggcccgatcttcatagtcaccacgagctgcgagcaatggaattgtgtgaattcgcattcaacatgaagaaagatgaagtatgtgtcaacccttaccattatcagagagtagagactccggttttgcctccggtccttgtcccccgtcacacagagattcctgccgagtttcctcccttggacgactattcacattcaataccagagaacactaacttcccagctggtatcgaaccacagagcaatatccctgaaaccccaccgccgggctacctgtctgaagatggggaaacatctgatcaccagatgaaccatagtatggatgcagggtcacctaacctaagccccaacccgatgagcccagctcacaacaatcttgacttgcagccagtcacttattgcgagcctgctttttggtgctccatttcttactacgagctgaaccaaagggtgggcgagacttttcacgccagtcagccgtcaatgaccgttgatggctttacagaccccagcaattcagaacgtttttgcttgggcctgctgtccaacgtgaacaggaacgccgccgtcgagcttacacgcaggcatatcggtcgaggcgtgaggttgtattatatagggggagaagtgtttgccgagtgcctaagtgactccgccattttcgtccagtctcctaactgtaatcagcggtacggctggcaccctgccacagtgtgtaagatccccccagggtgtaaccttaaaattttcaataaccaggagtttgccgcattgctcgcccagtccgtaaaccaaggttttgaagcggtttatcagctgacacgtatgtgcaccattcgtatgtcttttgtgaagggctggggcgccgagtatcgccggcagacagtgactagcaccccatgctggatcgagcttcatctgaatgggcctctgcaatggctggacaaggttttaactcagatgggctctccttccataagatgttccagcgtatcctag

SEQ ID NO: 26413 - DNA, 1278 bp, synthetic construct
  misc_feature 1..1278: note = Description of Artificial Sequence: Synthetic coding sequence
  source 1..1278: mol_type = other DNA
atgagcagcatcctgcccttcaccccccccatcgtgaagcggctgctcggctggaaaaagggcgaacagaatgggcaagaggaaaaatggtgtgaaaaagcagtaaaaagcctggtgaagaagctgaagaagacaggccagctggatgaactggaaaaagcaatcaccacacagaacgttaacactaagtgtatcactatcccgagatcacttgacgggcgcttgcaagtgagtcatcgcaagggtctgccgcacgtcatttattgcagattatggcggtggccagatctgcatagtcaccacgagctgagagctatggaattgtgtgaatttgcttttaacatgaaaaaggacgaggtgtgtgtaaatccctaccactaccagcgggtcgagacccccgttctcccccccgtgttagtcccccgacacacggaaatcccagctgagttccccccactcgatgattattcccacagtatacctgagaatacaaatttcccagccggaatcgagcctcagtctaatataccagaaacaccacccccaggctatctgtccgaggacggagaaaccagtgatcaccaaatgaatcattccatggatgccggaagtccaaacttgtcacctaatcctatgtcacctgctcacaacaacctggatctgcagcctgttacctattgcgaacctgccttttggtgttccatcagctattatgagctgaatcagagagtcggagaaactttccatgcatctcagccctccatgacggtggacggctttacagatccatccaatagtgagagattctgtttaggacttttgtctaatgtcaatcggaacgctgctgtcgagctgactcggagacatattgggaggggcgtccgactgtactatatcggcggagaggtatttgcagaatgcttgtccgattctgccatcttcgttcaatctcctaactgcaaccagagatatggctggcatcccgccaccgtctgtaagattccacctggatgcaatttgaagatcttcaataatcaggaatttgcagccttgctcgcccagtccgtgaaccaagggttcgaggctgtctatcagttgacgcgaatgtgtacaataagaatgtcttttgtaaagggctggggtgctgaataccgtcgccagacagtcacctccacaccttgttggatcgaactgcaccttaacggaccgctgcaatggctggacaaggttctgacgcagatgggctcacccagtattcggtgctcctctgtctcatag

SEQ ID NO: 26414 - DNA, 693 bp, synthetic construct
  misc_feature 1..693: note = Description of Artificial Sequence: Synthetic coding sequence
  source 1..693: mol_type = other DNA
atgaaccacagcatggacgccggcagccccaacctgagccccaaccctatgtcaccggctcataacaatttagatctgcagcctgtgacatattgcgaaccagctttttggtgctctattagctattatgaactcaaccagcgcgttggggagacctttcatgctagccagccctccatgacagtcgatggtttcactgacccgtccaacagtgaaaggttctgtctgggacttctgagtaatgtgaacaggaacgccgcagtcgagttgacccggagacatatcggtaggggtgtgcgcctgtactatatcggcggcgaggtttttgcggagtgtctgtcagacagcgccattttcgtgcaaagtccaaactgcaaccagagatatggatggcacccagctactgtttgtaagatccccccaggttgcaacctcaaaatcttcaacaaccaggagttcgctgccctactagcccagagcgtgaatcaaggctttgaggccgtctaccagctgacccgcatgtgtaccattcggatgtccttcgtgaagggatggggggccgagtataggcgccaaacagtcacaagcacaccctgctggattgagctccacctcaatggcccactgcagtggctggacaaagtcttaacgcagatgggcagtcccagcattaggtgttctagtgtctcatag

SEQ ID NO: 26415 - DNA, 963 bp, synthetic construct
  misc_feature 1..963: note = Description of Artificial Sequence: Synthetic coding sequence
  source 1..963: mol_type = other DNA
atggagctgtgcgagttcgccttcaacatgaagaaggacgaggtgtgcgtgaatccatatcactaccagagagttgagactccggttctgccaccagtgctcgtgcctcgacatacagagatcccagcggaattccccccccttgacgactattcacactctataccagagaacacaaattttccagccggtattgagcctcagtccaacatccccgagaccccgcctccaggctatttatcagaggacggagaaacttcagaccaccaaatgaaccatagcatggacgccgggtctccaaatctctccccaaaccccatgagccccgcgcacaataacttggatctccagcccgttacatattgtgagccagccttctggtgcagcatctcctactatgagcttaaccagagagttggtgaaactttccatgctagccagccgagcatgaccgtagacggctttactgacccctccaattccgagcggttttgcctcggtctgctctcaaacgtgaatcgaaacgccgcagttgaactcacccgtcgtcacattggacgaggggtgagactgtattacataggtggggaagtttttgccgagtgtctcagcgacagcgccatcttcgtgcaatcccccaactgcaatcaacgctatggatggcacccagctaccgtttgcaagattccaccaggatgcaacctaaaaatcttcaataaccaagagttcgctgctctcttagcacaatcagtgaatcagggcttcgaggccgtgtaccaactgactaggatgtgtacaatcagaatgtcctttgtaaaaggctggggggcagagtacaggaggcagacagtaaccagcacaccatgctggattgaactccatctgaacggcccactgcagtggctggacaaggtgttaacccagatgggcagccctagcattcgttgctcttcagtaagctag

SEQ ID NO: 26416 - DNA, 1281 bp, synthetic construct
  misc_feature 1..1281: note = Description of Artificial Sequence: Synthetic coding sequence
  source 1..1281: mol_type = other DNA
atgttccggaccaagcggagcgccctggtgcggcggctgtggcggagcagggcacccggcggcgaggacgaggaagaaggcgctggaggggggggcggtggtggcgagctgcggggggagggggcgacagactccagggcccacggagctggagggggaggacctgggagagcagggtgctgtctcggcaaagccgtgaggggagccaaaggccaccaccatccacatcctccggcagctggagctggtgctgcaggcggggccgaggccgacctgaaggccctaacacattcagtgctgaagaaattgaaagagcggcagctagaattactgttgcaggctgtcgaaagccgagggggcacccggactgcttgtttgcttctccccggcaggctggactgcaggctggggcccggcgcccctgccggagcccaaccagcccaaccgccttcaagctattccctcccactcttgctgtgtaaagttttccgatggccggatctacgccacagcagcgaggtgaagagactgtgctgttgcgaaagctatggaaaaatcaaccccgaattggtctgctgtaatccacaccacctgtccagattgtgtgagttggagtctcccccacctccatacagtcggtaccccatggactttcttaagcctaccgctgattgtcctgatgcagttccttcatccgctgagacgggaggcacgaattatctggcaccaggtggattatctgattcacagctgcttctcgagcccggcgaccgatcacactggtgtgtggtggcctactgggaagagaaaacacgtgttggcaggctgtattgcgtccaggagcctagtctcgacatcttctacgacttaccacaggggaatggcttctgcctgggccagctgaattccgataacaagtcacaattagtccagaaagtgcggagcaaaattggatgtggcattcaactgacgcgagaggttgacggagtgtgggtttacaacaggagcagctaccctatatttataaaatctgctacacttgataaccccgacagcaggacacttctggtccataaagtgttcccaggattctccatcaaggcattcgattacgaaaaggcctactcattgcagcgccccaatgatcatgagtttatgcaacagccctggactggattcacagtacagatctccttcgtgaaagggtgggggcagtgctacacccggcagtttatctcgtcgtgtccatgctggctagaggtgatttttaatagccgctag

SEQ ID NO: 26417 - DNA, 636 bp, synthetic construct
  misc_feature 1..636: note = Description of Artificial Sequence: Synthetic coding sequence
  source 1..636: mol_type = other DNA
atggacttcctgaagcccaccgccgactgccccgacgccgtgccctccagcgctgagactggtggtacgaattacctggctcccggcggactcagcgactcccagcttttgctagagcctggggatagatcccattggtgtgtagtcgcatactgggaggaaaagacccgtgtgggtcgcctctattgcgtgcaagaaccatcattagatatattttacgatttgccgcagggcaacggattctgtctgggtcagctgaactccgataataaatcccagttagtgcagaaagtaagaagtaagataggctgtgggatccagttaaccagagaagtggatggggtttgggtttacaacagatccagctatccaatcttcatcaagagcgccacactggacaatcccgacagcagaactcttttggtgcataaagttttcccaggtttttctataaaagcctttgactacgagaaagcctattccctgcagaggcccaacgaccacgagtttatgcagcagccctggaccgggttcactgtccagatcagctttgttaaaggatggggccagtgttataccagacagtttatttcttcttgcccgtgttggttagaggtgatctttaattctcgttag

SEQ ID NO: 26418 - DNA, 636 bp, synthetic construct
  misc_feature 1..636: note = Description of Artificial Sequence: Synthetic coding sequence
  source 1..636: mol_type = other DNA
atggacttcctgaagcccaccgccgactgccccgacgccgtgccctcttctgccgagaccggtggcactaactacctagcgcctggggggctgtccgatagccagctgttgctggaaccaggcgatcggagtcactggtgcgtcgtagcatattgggaggaaaagacgcgggtgggtcggctttattgcgtacaggaaccatcactcgacatcttttacgacctgccacagggtaacggcttttgtctcggccagttgaatagcgataacaaatcccagctggtgcaaaaagtcaggtccaagatcggctgcggcatacagcttacccgagaggtagatggtgtttgggtgtataatcggtcctcctaccccatatttatcaaaagcgcaacactggacaaccctgacagtcggacactcctggtgcacaaagtattcccgggcttctccataaaggcgttcgactacgaaaaggcctacagcttacagcgaccaaatgaccacgaattcatgcagcagccctggaccggatttacggtgcagattagtttcgtaaaggggtggggccagtgttacacccggcagtttattagcagttgcccttgctggctcgaggtgatctttaattcccgctag

SEQ ID NO: 26419 - DNA, 270 bp, synthetic construct
  misc_feature 1..270: note = Description of Artificial Sequence: Synthetic coding sequence
  source 1..270: mol_type = other DNA
atgaacagccagcagcagaagcagccctgcaccccccccccccagccacagcagcagcaggtgaaacagccctgccagccaccgccccaggaaccttgtatcccaaagacgaaagaaccttgtcacccaaaggtccctgaaccctgtcatccgaaggtccctgaaccgtgtcagcccaaggtcccagaaccttgccagcccaaggttcctgagccatgcccaagcactgtcacccccgcccctgctcagcaaaagaccaaacagaagtag

SEQ ID NO: 26420 - DNA, 270 bp, synthetic construct
  misc_feature 1..270: note = Description of Artificial Sequence: Synthetic coding sequence
  source 1..270: mol_type = other DNA
atgaacagccagcagcagaagcagccctgcaccccccccccccagccacagcagcagcaggtgaaacagccatgtcagccccctccacaggagccttgcattcccaagaccaaggaaccttgtcatcctaaggttccagaaccttgccaccccaaggtgcctgaaccctgccaaccaaaggtcccagagccctgtcagccgaaggtgcccgaaccgtgcccttctactgtgacacccgctccagcacagcaaaaaaccaaacagaagtag

SEQ ID NO: 26421 - DNA, 4260 bp, synthetic construct
  misc_feature 1..4260: note = Description of Artificial Sequence: Synthetic coding sequence
  source 1..4260: mol_type = other DNA
atggccgagggcctggagcgggtgcggatcagcgccagcgagctgcgcgggattctagcgaccttagcgcctcaggctgggtcacgggagaatatgaaagaacttaaagaggctcgccctaggaaagacaacagacgcccagacctggaaatctataagcccggcttaagccgcctaagaaataaacctaaaatcaaggaaccccctggtagtgaggaattcaaggatgagattgtaaatgatcgcgattgtagcgccgttgagaatggaacccaaccagtgaaagatgtatgcaaggagctgaataaccaggagcaaaatggccccatcgaccccgagaataaccgagggcaggagtctttcccgcggaccgcagggcaggaagatcgtagcctgaaaattatcaaaagaactaagaagccggatctgcagatatatcagcccggtcgcaggctccaaaccgttagcaaagagagtgccagccgcgtcgaagaagaggaggtacttaaccaggttgaacagctgcgcgtcgaggaggacgaatgtcgcggcaatgtggcgaaagaggaagtggcaaataagccagaccgtgccgagatcgagaagtctccaggcggaggacgggtgggcgccgcaaaaggtgaaaaggggaagcggatgggaaagggcgagggagtgcgagagactcacgatgatccggcccgcggcaggcccggcagtgccaaaagatattctagatctgataaaaggcggaaccgatacagaacgcgctccactagcagcgccggttccaacaactcagcggagggagctggactcacagataatggttgtcgcagacggaggcaggatcgaactaaggaaagacctagactgaagaaacaagtatccgtgagctcgacagacagccttgacgaagaccgaatcgatgagcctgatggcctgggcccgcggcggagctcagagcgtaagagacacctagagcgcaattggagtggtagaggcgagggggagcagaaaaattctgcaaaggaatatcgaggaacgcttagagtaaccttcgatgctgaggctatgaacaaggagagccctatggttagaagcgccagggatgatatggaccgcggcaaaccggataagggattaagcagcggtggtaaagggtctgagaagcaggagtcaaagaatccaaagcaggaactgagaggacgcggccgtggcatactgatccttccagcacacacgactttgtcagtgaactccgctggcagtcccgagtcagccccacttgggccaagactgttgtttggcagcggcagcaagggttccagaagttgggggcgcgggggcaccaccagaagactctgggatcccaataatcctgatcagaagcccgctctcaagacacagacacctcaactccatttccttgatactgatgacgaggtgagccctacttcttggggcgactcaagacaggcacaggctagctattataagttccagaacagcgacaatccctattattatcccaggactcccgggcccgcgtcacaatatccttacaccggatataaccctcttcagtaccctgtgggacctaccaatggcgtgtaccccggaccatattaccctgggtatcccactcccagcgggcaatacgtttgtagccccctgcccacgagcacaatgtcacccgaggaggtggagcagcatatgaggaatctccaacaacaggaactgcatcgccttctgcgcgtggctgacaatcaggagctgcaactttcgaatcttcttagtcgcgatcgcatctccccagaaggtctggagaagatggctcagcttcgtgcagaactcctgcagctgtacgagaggtgtatcttgctcgatatcgagttctctgacaatcaaaacgtcgaccaaattctgtggaaaaacgcattctatcaggtcattgaaaaattcagacagctggttaaggatccaaatgtggaaaatccggaacagatcaggaatcgcctgctggagttgctagatgagggctctgatttttttgattccctgctgcaaaaactgcaggtcacatataagttcaagcttgaagactacatggatggcctggcaatcaggtctaaaccgctgcggaagaccgtaaagtatgcactgatttccgcccaacggtgcatgatatgccaaggcgacatcgccaggtatcgagagcaagcatccgatactgcaaactatggtaaggccagaagttggtacctgaaggctcagcacatcgcccccaagaatggccggccttacaatcagttagcgcttctggcagtgtatacccgaagaaagctggatgctgtgtactactacatgcggtccttagccgcttcaaatccaattttgacagccaaggaatccttaatgtcacttttcgaagagactaaacgtaaggccgaacagatggagaaaaagcagcatgaggagttcgacttgtcaccagatcaatggcgtaagggcaagaagtcaacatttcgccatgtaggagatgacactacccgactcgaaatctggattcatccatcacatccgaggagtagccagggaacggaatcgggaaaagactcggagcaggagaacggcttaggctccctgtcaccatccgacctgaacaagcggttcatcctgagctttttgcatgcccacggcaagctctttacccgcatagggatggagacgtttcctgccgtcgcagaaaaagtgttaaaggagtttcaggtgctcttgcaacactccccatcgcctatcggctctactagaatgctacaactaatgacgatcaacatgttcgctgtgcacaatagtcagttaaaggactgcttcagtgaagagtgccggagtgtaatccaggagcaggcagctgctctgggattagctatgttctcattactggtacggcgttgcacctgcctcctaaaggagagcgctaaggctcagctgtcttctcctgaggatcaggatgaccaagatgatattaaagtgagcagtttcgtgccagacttgaaagagctcctaccttccgtgaaagtgtggtctgattggatgctgggctatccagatacttggaacccccccccaacaagtctcgaccttcctagtcatgttgcggtcgatgtatggtctacactcgctgacttctgcaacattctgacagcggttaatcaaagcgaagttcccttgtacaaggatcctgatgacgacctcaccctcctgatcctggaagaggatcgactgttgagtggatttgttccattgctcgccgccccacaagatccttgttacgtagaaaagacctctgacaaggtaattgctgcggattgcaaaagagtaactgtgctaaaatactttctcgaggccctgtgcggccaggaggagcccctcctggctttcaaaggagggaagtacgtcagcgttgctcccgtccccgacactatgggaaaagagatgggctctcaggaaggcactaggctcgaggacgaagaggaagatgtcgttattgaggattttgaggaggatagtgaggcagagggttccggcggcgaggatgacataagggaattacgtgctaaaaagctcgccctcgcccgcaaaattgctgaacagcaacgccgtcaggagaagattcaggcagtgctggaagaccactcgcagatgcggcaaatggagctggagatcagacctctgtttctggtcccagacacaaatggctttattgatcacctggcctcactggctcgcctgctagaaagcagaaagtatattttggtggtacccctcatagtgataaatgagctggatggcctcgctaaaggccaggaaacggatcaccgggctggcggctacgctagagtggtgcaggaaaaagccaggaaatctatcgagttcctggaacagcggttcgagtcgagagactcctgtctgcgggcccttacatcgcgcggcaacgaactagagtccatcgcttttcgttctgaggatattactggacagctgggtaataacgatgatctcattctatcttgttgcctgcattactgcaaggacaaagcgaaggacttcatgccagcatcaaaggaggagcctatacggctgttaagagaagtggtccttctcacagacgatcgtaacctgcgcgtgaaggcgttgacgagaaacgtgcccgttcgcgacatcccggcttttcttacatgggctcaggtaggctag

SEQ ID NO: 26422 - DNA, 993 bp, synthetic construct
  misc_feature 1..993: note = Description of Artificial Sequence: Synthetic coding sequence
  source 1..993: mol_type = other DNA
atgcggttccggctgtgccaccagcggggctgctgcccccacgagcgagagaacacctgtacatgcaagatgattatcagttctcttcaggttatagctgcggattgcaagcgcgtaacggtgcttaagtatttcctggaggctctgtgtggacaggaggagccactgttagctttcaagggggggaaatacgtgtcagtggccccagtccctgatactatggggaaggagatgggttctcaagagggcactcgtttggaggacgaggaggaagacgtggtgatcgaggacttcgaagaggacagcgaggccgagggctctggaggagaggatgacatccgggaattaagggcaaaaaagctggcgttggcccgcaagattgccgaacagcagcggagacaggaaaaaatccaggcagtcctggaggatcatagtcaaatgcggcaaatggagttagaaatcaggcccctcttcttggtacctgacacaaatggcttcattgaccacctggctagcctggcccggctactggaatcccgaaaatatatcctggtcgtgcccctgattgtcatcaacgagttggacggtctggccaaaggacaggagacagaccaccgcgccgggggatacgccagggtggtgcaagagaaggcccgcaagtccattgagttcctggaacagcgcttcgaatcacgagactcctgtctccgcgcgctgacttctcgaggcaatgaactcgagtccatagcctttaggtcggaggacattactggtcaactcggtaataacgatgatctaatcctctcctgttgccttcactactgtaaagataaggccaaggactttatgcctgcttccaaagaagaaccaattagactcttgcgcgaggtcgtgctgctgacagacgaccggaatcttcgcgtgaaggcattgacacggaatgtgcctgttcgtgatatcccagctttcctgacgtgggcccaggtgggctag

SEQ ID NO: 26423 - DNA, 1536 bp, synthetic construct
  misc_feature 1..1536: note = Description of Artificial Sequence: Synthetic coding sequence
  source 1..1536: mol_type = other DNA
atggagaccttccccgccgtggccgagaaggtgctgaaggagttccaggtacttctgcagcactcccccagtccaatcgggagtacccgcatgctccagttgatgaccataaatatgttcgcagtgcataattctcagctcaaagactgtttcagtgaagagtgtagaagtgtgattcaggagcaagccgccgcattaggacttgctatgttctctttgctcgtgagacgttgcacctgcctcctcaaggagtccgctaaggctcagctttcatctcctgaggaccaggatgatcaagacgacataaaggttagctcttttgtgcctgatcttaaagaattgctccccagtgtgaaggtgtggagcgactggatgctcgggtatcctgatacctggaacccacctcctactagtctcgatcttcccagtcatgttgcagttgatgtttggtctacactggcagacttctgtaatatattgacagccgtaaatcaatctgaggtgccactctataaagaccccgatgacgacctcactttactcatcctagaggaggataggttgctgagtgggttcgtgccgttgctggcagctccacaagacccctgctatgtcgaaaagacatcagataaggtcatcgctgctgactgcaagcgcgtcactgtgctgaagtatttcctggaagcactgtgtggccaagaagagcccctgcttgcatttaaaggtggcaagtatgtgagtgtggcgccggttccggacacaatgggtaaagaaatgggctctcaagaggggacccgcctggaagatgaagaggaggacgttgtgattgaagacttcgaagaggactcagaagccgaagggtccggcggtgaagacgacatcagagaactgagagccaagaagttagccctggcccgcaagatagcagagcagcagcgcagacaggagaaaatacaagctgtgctggaggatcactctcaaatgcgccaaatggagctcgagataagacccctgtttctggtgcctgacacgaacggcttcatagaccacctcgcatccctggcacggctcctcgaaagccgcaaatacatcctggtggttcctctcatcgttatcaatgagttggacggattagccaagggtcaagagacagatcatagagcaggcggctacgctcgggtggtccaggagaaggctaggaagagtattgaattcctggaacagaggtttgagtccagagatagttgcctccgcgctctgacctcacgcggcaatgagcttgagtctatcgctttccggtcagaagacatcaccggccaactgggtaataacgacgatctgatcctatcatgttgccttcactactgcaaggataaggccaaggacttcatgcccgcaagtaaggaagaacccatacgcctgctcagggaagtcgtcctcctcactgacgacaggaacctgcgagttaaagctctcactagaaacgtgccagtgcgagacatccctgcctttctcacttgggctcaggtgggctag

SEQ ID NO: 26424 - DNA, 4167 bp, synthetic construct
  misc_feature 1..4167: note = Description of Artificial Sequence: Synthetic coding sequence
  source 1..4167: mol_type = other DNA
atgaaggagctgaaggaggcccggccccggaaggacaaccggcggccggatctcgaaatctacaaacccggtctgagtcggctccggaataaacccaagatcaaggagccccccggctccgaggagttcaaagacgagatcgtcaatgacagagattgtagtgccgtggaaaatgggacacagcccgttaaagatgtctgtaaggagttaaataaccaagagcagaatggccctatcgatccagagaataacaggggacaggagtctttcccaagaacagcaggtcaggaagatcgttccctcaagatcattaagcgcacgaaaaaacccgaccttcagatttatcagccggggagaagattgcaaactgtgagcaaggagtccgcctctagagtcgaagaggaagaggtgttaaaccaagtcgagcaattgcgagtagaggaagacgagtgtagggggaatgtggcaaaggaggaagtagccaataaaccggatagggcggagatcgagaaatctcctggcgggggcagggtgggggctgctaagggagagaaggggaagagaatgggtaagggggagggggtgagagagacacacgacgaccccgctaggggtagacccggttcagcaaagaggtattcgaggagcgacaagcgcaggaaccgctatcgcactcggagtacttcatcagcaggaagtaacaactctgccgagggagcaggactgacagacaacggctgtcgtagaagacggcaagatcgcaccaaggaacgccctagactgaaaaagcaggtgtcggtctcttccactgatagcctggatgaagaccgcattgatgagccagatgggctcgggccgagaaggagcagtgagcgtaagaggcacctggaaagaaactggagtggccggggggagggagaacagaagaattcagcgaaggaatatcgtggaacccttagggttactttcgacgcagaggcgatgaataaggagagcccgatggtacgtagcgcacgcgatgatatggaccggggaaaacctgataaagggctgagttcaggtggaaaagggtcagaaaagcaagagtctaaaaaccctaagcaagaacttagaggaaggggccgtggcattctgatccttccagcgcacacaaccctctctgtgaatagcgctggctcccctgagtctgcccctctgggaccccggcttctgtttggatctggctcaaaagggagccgttcatggggcagagggggaacaactcgacgtctgtgggatcctaataatcccgaccagaagcctgcattgaagactcaaacccctcagctgcacttcctggatacagacgacgaagtgtcgccaacttcctggggcgacagccgccaggctcaggcctcgtattacaaattccaaaactccgataatccctattactaccctaggactccaggccctgccagtcagtacccgtacacaggctacaaccctcttcagtatcctgtaggaccaaccaacggcgtgtaccccggcccttactatccagggtacccaaccccgtccgggcagtacgtgtgttctccgctgccaacatcaaccatgagcccggaggaagtggaacaacacatgcgcaacttgcagcaacaggagctgcatagactgctccgggtagccgataatcaggagcttcagctgtctaatctcttgagtcgggaccgcatcagccccgaaggacttgagaaaatggctcaactgagggctgaactgctgcaattatacgagagatgcattctgctggatatagagttctcagacaaccagaatgtggatcagatcctgtggaaaaacgccttttatcaagtcatcgaaaagtttcgtcagttggtgaaggaccccaacgtggaaaaccccgagcagattaggaaccgcttacttgaactgcttgacgaaggaagcgacttttttgatagcctactgcagaaactgcaggtgacctacaaattcaagctagaagactatatggacggtctggcaattcgctccaagccgctgcggaaaactgtgaaatatgccctgatcagcgctcagcgctgtatgatctgccaaggcgatatcgcacgttaccgcgagcaggcatctgatactgctaattacggcaaggctagaagttggtacttgaaggcgcagcatatcgcacctaagaacggtagaccttacaatcagctggccttgctggctgtgtacactagacggaagcttgacgccgtctattactacatgagaagcctggctgcaagtaacccgatcctaactgcaaaggagagcctcatgagcctattcgaagagaccaagaggaaagcggaacagatggaaaaaaagcagcacgaagaatttgatctgagtccagatcaatggaggaagggcaaaaagtcgacattccgacacgtgggggatgatacgacccgactcgagatctggatccatccctcacacccacgtagtagccagggcaccgagagtggaaaagatagcgaacaggaaaatggtctggggagcctttccccgtctgatctgaacaagaggtttatcctcagcttcctgcacgctcacgggaagctgttcactaggattgggatggagaccttccccgccgtggctgagaaggtgctgaaagagttccaggtattgctgcaacactccccatcccccataggctctacaagaatgctgcagctgatgactatcaacatgttcgccgtgcataattctcagctgaaggactgtttttccgaagaatgccgctcggtgatccaggagcaagccgctgcacttggcctcgccatgttcagcttgttggttcgtaggtgcacgtgtctccttaaagagtcagctaaagcgcagttgagtagccctgaggatcaggacgaccaggatgatattaaagtctccagcttcgtgccagatctcaaggaactgttgccttctgtaaaggtctggagtgattggatgcttggctatcctgatacatggaaccctcctcccacttccctggaccttccgtctcatgtggcagttgatgtttggagtaccctggccgatttttgtaatattttaaccgcagtcaaccagtcggaggtgcccttatataaggaccctgacgatgatttaactttattgatcttggaagaagaccgcctcctcagtggatttgttcctctgctcgccgctccacaggatccttgctacgtagagaaaaccagtgacaaggttattgctgccgactgcaaacgggtcaccgtgcttaagtacttcctggaggctctatgcggacaggaagagcctttgctcgcatttaaaggcggcaaatacgtctcagtcgctcctgtgccagacacaatggggaaggaaatggggagccaggaaggcacccgcttggaggacgaagaggaggacgtggttattgaggatttcgaagaggacagcgaggccgaagggagcggaggcgaagacgatattcgcgagctccgagcgaaaaagctggctctcgcgcgaaagatcgccgagcaacagcgccgccaggaaaaaatccaagccgtgctggaggatcacagtcagatgaggcagatggagctggaaatcagacctctcttcctggtgcctgataccaatggtttcatagatcacctcgcgtctctggcacggctcctggagtctcggaaatacatcctagtggtgccacttatcgttattaacgaactggacggtctggctaagggacaggagaccgatcatcgggcaggcggttacgcgcgggtagtacaggagaaggccaggaaatcaatagagtttcttgaacagcgcttcgagtctcgggacagttgcttgagagcactcaccagccgcgggaacgagctggagtccatcgccttcaggtccgaggacattacagggcaactcggtaacaatgacgacctcatactgagctgttgcctacattattgtaaagataaggccaaggattttatgcccgccagtaaggaggaacccatcagactcctgagggaagtggtgctgctgacagacgataggaacctgcgcgtaaaagccttaacaagaaacgtcccagtgagagacattcctgcctttctgacatgggctcaagtcggatag

SEQ ID NO: 26425 - DNA, 2364 bp, synthetic construct
  misc_feature 1..2364: note = Description of Artificial Sequence: Synthetic coding sequence
  source 1..2364: mol_type = other DNA
atggccgccgcccggcccgcccggggccccgagctgcccctgctgggtttacttctcttactcctgttaggagacccaggcaggggggcagcctcatccgggaatgccacaggtccaggaccaaggtcagccggtggctctgcaaggagatctgccgctgtaacgggccccccccctcctctctctcattgtggccgggctgccccttgcgagcccttacgatacaatgtctgcctggggtctgttttgccttacggagccacatccactttactggccggagacagtgacagtcaggaggaggcacacggcaaactggttctgtggtccggacttagaaatgcccccagatgttgggccgttatacaaccactgttatgcgcagtctatatgccgaagtgcgagaacgatagagtcgaacttcctagcagaacactctgtcaagctacccgaggaccatgtgccatcgtggagcgcgagcggggctggccagacttcttaaggtgtaccccggaccggtttccggagggttgtacgaatgaggtgcaaaatattaagttcaattcctctgggcagtgcgaagtgccactagtgagaaccgacaaccccaagagttggtatgaggatgtggagggttgcgggattcagtgccagaatcccttgttcacggaagcagagcaccaagatatgcacagttacatcgccgcctttggagccgtaaccggcttatgcacgctgttcacactggccactttcgtggctgattggaggaactcgaacagataccctgcagtgatcttgttctacgtgaacgcgtgtttcttcgtgggcagtatcggctggctggcccagttcatggacggtgccagacgcgaaattgtctgccgtgctgatgggaccatgcgcctgggcgagcctacgtccaacgagacgctgtcttgtgtgatcattttcgtgatcgtgtactacgccctcatggccggtgtggtgtggttcgtggtcctgacgtatgcctggcatacctcctttaaggctctggggacaacataccagcctcttagtgggaagactagttactttcacttactgacctggagcctcccatttgtgttgaccgtcgcgattctggctgtggcccaggtcgacggggactccgtttctggcatctgcttcgtcggatataagaactacagatacagggctggcttcgtgcttgcccctatcgggctggtactgatcgtgggagggtacttcctgattcgtggagtaatgactcttttttccattaagtccaaccatcctgggttattatctgagaaagcagctagcaaaattaatgagaccatgctgcgactaggtatttttggtttcctggcctttggtttcgtactgatcactttttcctgtcacttttacgatttttttaaccaagccgaatgggagaggtctttcagagattacgtgctgtgtcaggccaacgtcaccatcggtctccccactaaacagcccatacctgattgtgaaataaagaatcgaccctctctcctggtggaaaagatcaatttattcgccatgtttgggaccggaatagccatgagcacctgggtatggactaaggctacattgctgatctggaggaggacctggtgcaggctgacagggcagagtgatgatgagcccaagaggattaagaagtctaaaatgatcgcgaaagcctttagcaagcgccacgagcttttacaaaatcccggccaagagctaagttttagcatgcatactgtaagtcatgatggacctgtggcaggtcttgcctttgatttaaacgagccgtcggccgacgtctccagcgcttgggctcagcacgtgactaagatggtcgccaggcgtggtgccatcctaccccaagacattagtgtgaccccggtagctactcccgtgcctcctgaagagcaggccaatctttggctggttgaggccgaaatctcgcccgaactgcagaagcgtctcggaaggaagaagaagagacgaaagcgaaaaaaagaggtctgtcccttggccccaccccctgaattacacccccctgctcccgcgccgagtacaatcccgcgccttccacagctgcccaggcaaaagtgtctcgtcgccgccggcgcctggggcgccggcgattcctgccgccaaggcgcctggaccttagtgagcaacccgttttgcccagaaccctcacccccgcaggatccgtttcttccaagcgcgccagcaccggttgcctgggcccatggtaggcgccaggggctcggacccattcacagcaggacaaatctcatggatacagagctcatggacgctgactccgacttttag

SEQ ID NO: 26426 - DNA, 231 bp, synthetic construct
  misc_feature 1..231: note = Description of Artificial Sequence: Synthetic coding sequence
  source 1..231: mol_type = other DNA
atgagcgaccaggacagcagcgagatccacttcaaggtgaagatgacaacacatctgaaaaagcttaaggagagctactgtcaacgacagggtgtgcctatgaatagcttacgatttctctttgaaggccaaagaattgccgataaccatacaccaaaagagcttggaatggaggaagaggacgtcatcgaggtgtatcaggaacagacaggtgggcacagcacagtgtag

SEQ ID NO: 26427 - DNA, 306 bp, synthetic construct
  misc_feature 1..306: note = Description of Artificial Sequence: Synthetic coding sequence
  source 1..306: mol_type = other DNA
atgagcgaccaggaggccaagcccagcaccgaggacctgggcgacaaaaaggagggggagtacattaaactgaaagtgatcggccaggactcctccgaaatccattttaaggtaaaaatgacgacgcacctcaaaaaactgaaggaaagctactgtcaacgccagggagtgccaatgaatagcctgcggttcttgttcgagggtcagcgaatagctgataaccatacacctaaagaactcggtatggaagaagaggatgtgatagaggtctatcaggagcaaactggcggccacagcaccgtgtag

SEQ ID NO: 26428 - DNA, 306 bp, synthetic construct
  misc_feature 1..306: note = Description of Artificial Sequence: Synthetic coding sequence
  source 1..306: mol_type = other DNA
atgagcgaccaggaggccaagcccagcaccgaggacctgggcgacaagaaggagggcgagtacataaagcttaaagtgatagggcaggattcttccgaaatacactttaaggttaagatgactacccatttaaaaaaactgaaggaatcctattgccagcgccagggggtgccaatgaatagcttaagatttttgttcgagggccagagaatcgctgacaaccatactccaaaggagcttggaatggaagaagaggacgtgatcgaggtataccaggagcaaacaggaggccatagtacagtgtag

SEQ ID NO: 26429 - DNA, 189 bp, synthetic construct
  misc_feature 1..189: note = Description of Artificial Sequence: Synthetic coding sequence
  source 1..189: mol_type = other DNA
atgaccacccacctgaagaagctgaaggagagctactgccagcggcagggggttcccatgaacagcctaaggttcctgtttgaagggcagaggattgccgataatcatacacccaaggagctgggcatggaggaggaggatgttatagaggtttatcaggagcagaccgggggtcattcaactgtgtag

SEQ ID NO: 26430 - DNA, 189 bp, synthetic construct
  misc_feature 1..189: note = Description of Artificial Sequence: Synthetic coding sequence
  source 1..189: mol_type = other DNA
atgaccacccacctgaagaagctgaaggagagctactgccagcggcagggggtgccaatgaactcgctgagatttctctttgagggtcaaaggatcgccgacaaccatacaccaaaagagcttggaatggaggaggaggacgtcatcgaggtatatcaggagcagacaggaggccattccacagtctag

SEQ ID NO: 26431 - DNA, 795 bp, synthetic construct
  misc_feature 1..795: note = Description of Artificial Sequence: Synthetic coding sequence
  source 1..795: mol_type = other DNA
atgccccggagcttcctggtgcggaagcccagcgaccccaaccggaagccaaactacagtgagctgcaggattcaaatccagagtttacctttcagcagccctacgatcaggctcatctgctggctgccatccctcctcctgagattctaaacccaaccgcaagcctccctatgctgatatgggacagcgttctggcccctcaggcacaacctattgcttgggcatctctccggttgcaggaaagtcccagggtcgccgaattgacgtcactttctgacgaagactccggaaaaggatcgcagccgccgtcaccacccagtcctgccccaagctcattctcttctacctcagtgagcagtttagaggcagaggcatacgcggcattccccgggctcggacaggtccctaaacaacttgcccagctgtccgaggcaaaggatctgcaggctagaaaagccttcaactgtaaatattgcaacaaggaatacctatccctaggggcccttaaaatgcacatacgctctcacacactgccatgtgtgtgtgggacgtgcggcaaagccttttctcgcccctggctgcttcagggccacgtccgcactcacaccggggaaaaaccgttttcgtgccctcattgcagcagagcttttgccgatcgcagcaacctgcgcgcacatctccagactcacagtgatgtgaagaagtatcaatgccaggcttgcgcaagaaccttcagcaggatgtcactgttacacaagcatcaggagagcggatgcagtggatgcccacgctag

SEQ ID NO: 26432 - DNA, 807 bp, synthetic construct
  misc_feature 1..807: note = Description of Artificial Sequence: Synthetic coding sequence
  source 1..807: mol_type = other DNA
atgccccggagcttcctggtgaagaagcacttcaacgccagcaagaagcctaactatagcgaactcgatactcacactgtcataatatcaccatacctgtacgagtcatattccatgcctgtaatccctcagcctgaaattctgtccagtggtgcctacagtcccattactgtgtggacaacggcagccccattccatgcacaactacccaatggactgtcacccctgagtggctactcatcatctctgggaagagtaagccccccgcctccttcagatacatccagcaaggaccattccgggtccgagtcaccaatttctgatgaggaagagaggctgcagtccaaactctcggatcctcacgctatcgaagctgaaaagttccaatgcaatctctgtaacaagacctattcgacgtttagcgggctggcaaagcataaacagctgcactgcgacgcccaatctaggaagagcttttcttgcaagtattgcgataaagagtacgtgtcactgggggccttaaagatgcatatacggacacacacgttgccatgcgtatgcaaaatttgtgggaaggcatttagtaggccatggctgttgcagggacatattaggacccacacgggcgaaaagccttttagctgcccacattgcaatagggcttttgccgatcgatcaaatctccgagcccatctgcaaactcattctgatgtgaaaaagtatcagtgtaagaactgtagcaagactttcagcagaatgtccctgctacataagcatgaggaatccgggtgttgcgtcgcccactag

SEQ ID NO: 26433 - DNA, 807 bp, synthetic construct
  misc_feature 1..807: note = Description of Artificial Sequence: Synthetic coding sequence
  source 1..807: mol_type = other DNA
atgccccggagcttcctggtgaagaagcacttcaacgccagcaagaaacccaactactctgaactagatacgcacacggttatcatctcaccttatttgtacgagtcttattcgatgcctgttatcccgcagcctgaaatactgtctagcggagcgtatagtcctatcaccgtgtggacgaccgcagcccccttccacgcccagcttccgaacggactctcaccactgagcggctacagctcctccctgggacgcgtttcgccccccccaccaagcgacacaagctctaaagatcacagcggctccgaatctcccatctctgacgaggaagaacggctgcagtccaagctaagcgacccacacgctatcgaagccgaaaaatttcagtgtaacctctgcaataagacctatagtacctttagcggactagcaaaacataagcagctgcattgcgacgcgcagtctcgaaagtcattttcttgcaagtattgcgataaggaatatgtgagcctgggcgctctaaaaatgcatattagaacccacacactgccatgcgtatgtaagatctgtgggaaagctttttcccgaccatggctgcttcaagggcacattcgtacacacacaggggagaagcctttttcatgcccccactgcaatcgagcctttgcggaccggagtaatctcagagctcatctccagacccatagcgacgtaaagaagtaccagtgcaagaattgctccaagacattcagtagaatgtcacttctgcataaacatgaggaatctggttgttgcgtagcgcattag

SEQ ID NO: 26434 - DNA, 879 bp, synthetic construct
  misc_feature 1..879: note = Description of Artificial Sequence: Synthetic coding sequence
  source 1..879: mol_type = other DNA
atgccccggagcttcctggtgaagacccacagcagccaccgggtgcccaattaccggagactggagacccagcgggagataaatggagcatgctcagcatgtggtggattagtggtcccgctgcttccgcgagataaagaggccccctccgtacccggtgatcttcctcagccctgggaccgctcctctgccgttgcctgtatcagccttccgctgctgcccaggatcgaagaggccctgggggcttctggactggacgctctggaggtttcagaagttgacccacgggccagccgagcggcaatagtcccgttgaaggacagcctgaaccacctgaatctgcctcccctgctagtacttccaacccggtggagccccactcttggcccagatagacacggagctccagagaaactcctcggagccgagagaatgccaagggcccctggcggtttcgagtgttttcactgccacaagccttaccacactctcgctgggctggcacgacatagacaattacactgtcacttacaggtgggtcgagtgtttacttgtaaatattgcgataaggaatacacatcactcggcgccttaaagatgcacatacgcacccacactctcccatgcacgtgtaaaatttgtggaaaagcatttagccgcccatggttgctgcagggccacgttaggacacataccggtgaaaaaccgtatgcttgcagccactgcagccgggcttttgccgatcgttcgaacttacgagcccatttacaaacccactccgatgccaagaaatatcggtgtcgtaggtgcactaaaacctttagtcggatgtcactgcttgcccggcatgaagaatccggatgctgcccgggcccctag

SEQ ID NO: 26435 - DNA, 1398 bp, synthetic construct
  misc_feature 1..1398: note = Description of Artificial Sequence: Synthetic coding sequence
  source 1..1398: mol_type = other DNA
atgggcggcgccgtggtggacgagggccccaccggcgtgaaggcccctgacgggggatggggctgggccgtactgttcggatgttttgtgatcacgggattctcttatgcttttccgaaagctgtttctgttttttttaaggagctgattcaagagtttgggattgggtattcagacaccgcttggatcagctcaattctcctcgccatgctgtacggtaccgggcctctctgtagtgtatgtgtgaaccgatttggatgccggccagtgatgcttgtaggtggcctgtttgcaagtctcggaatggtcgcggcgagcttttgccgctcaataattcaggtgtatttgactacaggagtgattactggcctgggtcttgctctcaacttccagcccagcctgatcatgctgaaccgatattttagcaagcggcggccaatggccaatggcctggccgccgccggctcacccgtcttcctctgcgcactatctccattggggcaactgctgcaggacaggtatgggtggcgcggcggatttttaattctgggcggcctgctactcaattgttgcgtgtgtgctgcactgatgagacccctcgtagtgaccgctcagcccggctccgggcctcctaggccctccaggagattgctcgatcttagtgtctttcgggacaggggatttgtcctgtatgcagtggcagcatcagtgatggtccttggactgttcgtgccccccgtctttgtggtcagttatgccaaagacctcggagttcccgatacaaaggccgctttcctgctgacgatattggggttcatagatatttttgcccggcctgccgccggctttgtcgcaggtttgggcaaggtgcgcccatactctgtgtacctgttcagcttctcaatgttttttaatggattagcagatcttgctggctcaacagccggggattacgggggactcgtggtcttttgcatattcttcggtatatcttacggtatggtcggagccctgcaatttgaggtgctgatggctattgtgggtacacacaagttctcaagcgctatcggacttgtgttgttaatggaggctgtggcagtgcttgttggacccccctctggcggaaagttgctggacgcaacccatgtgtatatgtacgtctttattctcgctggggccgaagtactgacctcctcattgattctgctgctgggaaatttcttctgtatcagaaaaaagcccaaggagcctcagcctgaagtcgctgcagctgaggaggagaagctccacaaaccacccgctgattctggggtggacctgagggaagtggagcatttcctgaaagcagaacctgaaaaaaacggcgaggtagtgcatacccccgagacctctgtatag

SEQ ID NO: 26436 - DNA, 1398 bp, synthetic construct
  misc_feature 1..1398: note = Description of Artificial Sequence: Synthetic coding sequence
  source 1..1398: mol_type = other DNA
atgggcggcgccgtggtggacgagggccccaccggcgtgaaggccccagacgggggatggggatgggctgtgcttttcggttgcttcgtgatcaccggcttcagctacgcgttccccaaggctgtttccgtgttttttaaagagctcattcaagagttcggcataggatattccgacactgcgtggattagctccatcttgctggctatgctgtacggcacagggccgctgtgcagcgtctgtgtgaatcgtttcggctgtaggcctgtaatgctcgtcgggggactatttgctagtctcggcatggtggctgcctccttctgccgtagtatcatccaagtgtacctcaccactggtgtgattaccggcctcggactcgctttgaacttccaaccaagcctgataatgctaaacaggtatttttctaagagaagacccatggcaaacggtttggccgcagcggggtccccagtgtttctgtgcgccctgtcccctctgggtcaactgttacaggaccgctatggctggcgcggcgggttcctcatccttggaggactcctcctcaattgttgtgtttgtgcagcactgatgcggccactggtggtaaccgcacagcccggttccgggcctcctcggccttcgcgtagactcctcgatctgtccgttttccgtgatcgtggattcgttctttatgccgtcgccgcatccgttatggtgctgggtttgttcgtccctccagtgttcgtcgtatcctacgccaaggacctcggagtgccggataccaaggcggcgtttctcctcaccatcctcggattcatagacattttcgctaggccagcagcgggcttcgtcgctggactggggaaggtgagaccttattccgtgtaccttttttctttctcgatgttctttaatggacttgcagacctcgccggcagcactgcaggggactacggcggcctggttgtgttttgcatctttttcggcatcagctatggtatggtaggggctttacagtttgaagtgttgatggctattgtgggcactcacaaattttcaagcgccatcggactggtgttactcatggaggcagtggccgtgctggttggcccaccatctgggggtaagctgctagacgctacacacgtttatatgtatgtctttatcctggcaggcgcagaagttttaactagctcacttatcctgctgctgggtaatttcttttgcatccggaaaaaacccaaagagccccagcccgaggtggccgccgcagaggaggagaaactgcacaaaccccccgcggattcaggcgtcgatctccgtgaagtggagcattttctgaaggcagaaccagaaaagaatggggaggtcgttcacacccctgaaactagtgtctag

SEQ ID NO: 26437 - DNA, 1398 bp, synthetic construct
  misc_feature 1..1398: note = Description of Artificial Sequence: Synthetic coding sequence
  source 1..1398: mol_type = other DNA
atgggcggcgccgtggtggacgagggccccaccggcgtgaaggcccctgatggcggttggggatgggccgtgctgtttggctgcttcgtcatcacaggattctcctatgcttttcctaaagccgtaagtgtctttttcaaagagctgattcaggaattcggaatcggttatagcgataccgcgtggatatcctccatccttcttgcaatgctctatggcacaggacccctgtgtagcgtctgcgtgaaccgattcggatgtcggcctgtaatgttggtcggcgggctgttcgcctccctggggatggtcgccgcatccttttgcagatctatcattcaggtttatctgacaactggcgtcatcaccggactcggactggccttgaactttcagcctagcttgatcatgctcaataggtacttctccaaacgaaggcctatggctaacgggctcgctgccgcggggtcaccggtatttttgtgtgccctgtccccccttggacagctactccaggataggtacggatggcgtggcggctttttaatcctgggggggctgctgctgaactgctgcgtgtgcgctgcattgatgcgccccctcgttgtcaccgctcagcccggaagcggccctccacgccctagcagaagactgctcgatttatctgtcttccgggaccgcggcttcgtactttacgcggtggccgcatctgtgatggtgctgggcctgttcgtgccgccagtctttgtggtgtcttacgcaaaggatctgggtgtaccagacactaaagccgcctttttgctaacaatattggggttcatcgatatctttgcccgcccagctgctggattcgttgctggactgggcaaggtgcgaccttactccgtgtacttatttagctttagcatgttttttaacggtttagcagatctggcaggtagtactgctggggattacggaggtctagtggtgttctgcatcttcttcggaatctcctacggtatggtgggtgctcttcagttcgaggtacttatggccatcgtcggaacccacaaatttagttctgccatcggcctcgtgctacttatggaagcagtcgccgtcttagtggggccaccgagtggggggaaactgcttgatgccacacatgtgtatatgtacgtgtttattcttgcaggagccgaggtcctgacttcctctcttattctcctcctgggcaattttttctgtattcggaagaaacctaaggagcctcaaccagaagtggcagctgccgaagaagagaagctgcacaagccccccgcagattctggtgtggatctccgggaagtcgagcactttctgaaggccgagccagaaaagaacggagaagtcgtgcacacacccgagacatcggtttag

SEQ ID NO: 26438 - DNA, 1398 bp, synthetic construct
  misc_feature 1..1398: note = Description of Artificial Sequence: Synthetic coding sequence
  source 1..1398: mol_type = other DNA
atgggcggcgccgtggtggacgagggccccaccggcgtgaaggccccagacggcggctggggctgggcagtcttattcggttgctttgtgatcacaggctttagctacgcatttccgaaagccgtgagtgtcttcttcaaggaattaattcaagagtttgggatcggctatagtgacacagcctggatctcctctatacttcttgccatgctctatggtacaggccccctgtgctctgtatgcgtgaatcgattcgggtgcagacccgttatgcttgtgggagggctgtttgcgtcactaggcatggtcgccgcaagtttctgccggagcataattcaggtttacctcaccaccggggtgatcactggattggggctcgcactcaacttccagccaagccttattatgttaaaccgctacttctcaaaacgtcgacccatggccaacggactggccgccgccggaagtcctgtcttcctgtgcgctctgagtccattaggacaattgctgcaggatcgatacggctggcgcggtggattcctgatcttggggggactgctcctcaattgttgtgtgtgcgccgccttaatgagaccgctggtcgtgaccgctcagcccggttcaggaccccctagaccatcaaggaggctgctcgacctctctgtgtttagggaccggggctttgtactgtatgcagtggccgcgagtgtgatggtgctagggctttttgtaccacctgtgttcgtagtctcctatgccaaggacctcggcgttcctgacactaaggccgcctttttgctgaccattcttggcttcatagacattttcgcacgtcccgcagctggatttgtcgccgggctggggaaggtgaggccttattcagtgtacctgttttctttcagtatgttctttaatgggctggcagacttagccggtagcaccgccggcgattatggagggctggtcgtattctgcatcttctttgggatctcctacggaatggttggggccctgcagttcgaggtccttatggccatcgtgggcacacataaattttcttccgcaatcggtctcgtccttctgatggaggccgtagctgtgctcgtgggcccaccctctgggggaaaactcctcgacgccacgcatgtttatatgtatgtgtttattctggcgggtgccgaagttctcacgtcaagtctcatcttgctccttggtaactttttttgcatccgtaaaaagccaaaggaacctcagccggaagttgccgctgccgaggaggaaaaactccataagccaccagctgactctggcgtcgacctccgggaggtagagcacttcctgaaggcagagcccgagaagaacggagaggtcgttcacaccccggagacaagcgtgtag

SEQ ID NO: 26439 - DNA, 1470 bp, synthetic construct
  misc_feature 1..1470: note = Description of Artificial Sequence: Synthetic coding sequence
  source 1..1470: mol_type = other DNA
atggtgcccagcagccccgccgtggagaagcaggtgcccgtggagcctggaccagaccccgagctccgctcctggcgacatctagtttgttacctctgcttttatggattcatggcccagatccgtcctggcgagagttttattactccgtacttactgggtccagataaaaatttcacaagggagcaggtaactaatgagatcactcccgttttaagctattcttatcttgccgtgctcgtccctgtcttcttgctgactgactacttacgatatacgccggttctcttgctgcaggggctgagtttcgtgtccgtctggcttctgttgctgctgggacactccgtggcccatatgcagctgatggaattgttctactctgtgaccatggctgccaggattgcctattctagctacatattttcccttgtgaggcctgctagatatcagagagtcgcagggtattctagggcggccgtgcttctcggtgtattcacctctagcgtccttggccagctactggtgactgtgggcagggtgagtttttccactctcaattatatctccctggcattcctgactttttccgtcgtgctggcacttttcctgaagaggccaaaacgctcactgttcttcaatcgcgacgatagggggcgctgcgagacatccgccagtgaactggagcggatgaacccaggacctggaggcaagcttggccacgccctgcgtgtggcctgcggggattctgtgcttgcccgaatgctgagagagctgggggactcactgaggagaccccagctaaggctttggagtctctggtgggtgtttaattcggctggttactatttggtcgtatattatgtacacattctgtggaatgaggttgatccaaccacaaattctgcccgcgtgtataatggagctgctgacgccgcatcaaccctgttgggagccatcacaagctttgccgccggctttgttaagatcagatgggcccggtggagcaagctgctgattgctggcgtaaccgccacacaagccggtctggtgtttcttctcgcccacacacgacatccaagctcgatatggctctgctacgccgcatttgtgctctttcggggctcatatcagtttcttgtgcccatcgctacatttcagattgcttctagtctgtcaaaggagctgtgcgcattagtgtttggcgttaacacattcttcgctactattgtgaagactatcattacgttcattgtgagtgacgtgagaggccttggattgcctgtaagaaagcagaacgaagagctgcatgtcgcttctctgagtttgtggaaaagtcatttacgtctcgccgctgacaccctgtcttcagaaggatccagtggttcaggccctcgttcttggttcctcagccccaccctccgcgcagccctccatggccctgtgtgtcctagcgaggtttgcccttcctag

SEQ ID NO: 26440 - DNA, 1776 bp, synthetic construct
  misc_feature 1..1776: note = Description of Artificial Sequence: Synthetic coding sequence
  source 1..1776: mol_type = other DNA
atggtgcccagcagccccgccgtggagaagcaggtgcccgtggagccgggacccgaccctgagttgcgatcctggagacatttagtgtgctatctctgcttctacgggttcatggcacagattcgacctggcgaaagtttcataaccccatacctgcttgggccagacaaaaattttaccagagagcaggtcaccaatgagattacacctgtgcttagctactcttatttggctgttcttgtgcccgtgtttctgctgactgattatctgagatacacgcccgtactgctgctccaggggctgagcttcgtgtcagtttggttgcttctgctgcttggtcacagcgtcgcccatatgcagctcatggagctgttttactctgttactatggcagcaaggatcgcttactctagctatatattttcactggttaggcccgccaggtaccagcgagtggctggatattcacgcgccgccgttctgctcggagtctttacgtcttctgttttgggacagctactggtgacagtggggagagttagcttctccactctaaattacatctcactcgcgtttctgacattttctgtggttctcgccctctttctgaagcggccgaagagatccctgtttttcaacagagatgaccgtggtcggtgtgaaacatctgccagcgaactggagcggatgaatccaggtcctggtggaaagctagggcacgcgctgcgcgtcgcctgcggggactccgttctggcccgcatgttaagggagctgggagattctctccggcgaccacagctgcggctttggtccctctggtgggtctttaatagcgcagggtactacctggtcgtgtactacgtgcatatcctgtggaacgaggtagatccgaccactaattcagcaagagtctataacggagccgctgacgctgcctccactctccttggggcaattacaagcttcgctgccggctttgtaaaaatcagatgggcccgctggtctaaattgctcattgccggcgtaaccgctactcaggcgggcctggtctttctacttgcacatacacggcacccctcctccatttggctatgttatgccgccttcgtgctgtttcgcgggtcataccagttcttagtgccaattgccacattccagatcgcttcctctctcagcaaggagctctgtgccctagtattcggggttaacacattcttcgctaccatagttaaaaccatcatcacctttatcgtatcagacgtgaggggtctaggcctccccgtccgaaagcagttccagctctactccgtctattttctcatcctgtcgattatctacttcctcggcgcgatgttggatgggctaagacactgccagcgcggacatcaccctaggcagccccctgcacaggggcttaggagtgcagcagaggagaaggctgcacaggcgctaagcgtccaggacaagggattaggaggcctgcaacccgcccagagtccaccgctcagtcccgaggatagtttaggggctgtgggccctgctagcctggaacagaggcaatccgatccatatctggctcaagcgcccgctccacaggccgccgaattccttagtcccgtgacgacaccttcgccctgcactctttgttcggcccaggccagtgggcctgaagccgctgacgagacttgcccacagttagccgtgcatcctcccggagtgagcaagctcggactgcagtgtttgccaagcgatggcgtacagaatgtgaatcagtag

SEQ ID NO: 26441 - DNA, 846 bp, synthetic construct
  misc_feature 1..846: note = Description of Artificial Sequence: Synthetic coding sequence
  source 1..846: mol_type = other DNA
atgctgcgggagctgggcgacagcctgcggcggccccagctgcggctgtggtctctctggtgggtctttaacagcgccggatactatctcgtggtttactatgtccacatactgtggaatgaagtggatcccactaccaattccgcccgcgtttataatggcgccgcggatgcggcttccactctgctgggcgctatcaccagcttcgcagctggatttgttaagattaggtgggcccgttggagcaaactcctgatcgcaggggttacagcaactcaggccggccttgtctttctcctggcccatacccggcacccttcttcaatttggttgtgttatgcggctttcgtgttattccggggaagttatcagttccttgtgcctatcgccacatttcagatagcttcctctctgtccaaagagctgtgcgcgcttgtgtttggtgtgaacacatttttcgctacgatagtcaaaaccataatcacttttatcgtgtcagacgttagaggtctcggcctgccggtgaggaagcaggccttgagaatgtcccgacctaggttggggctctgtttgcctggaccttttccaccccagtctgcggctcctgcccgcgccggcatggccgcatcgtctgcagaagaccctggttctgagagggggccttggagacgcgcagggaccgtggccgcccgcggcgaccctggtggagaacgtgggccttggaggcgcgagggaaccctagctgccagaggtgatcccgggggggagcgcggaccttggtggcgggaaggcacactcgcagccaaaccacggatgcagtgggtgacccgagccactgccccttag

SEQ ID NO: 26442 - DNA, 810 bp, synthetic construct
  misc_feature 1..810: note = Description of Artificial Sequence: Synthetic coding sequence
  source 1..810: mol_type = other DNA
tgactgcggctgtggagcctgtggtgggtgttcaacagcgccggctactatcttgtggtgtattacgttcatattctgtggaacgaagtcgaccctaccacaaacagcgccagggtctacaatggcgcggcagacgcagcctccaccctccttggtgcaatcactagtttcgctgctggatttgtaaagattagatgggccaggtggtcaaaactgctgatcgcaggtgtgaccgctacccaggccggactcgtattccttctggcccacacaaggcatccttcttctatctggttgtgctatgctgcctttgtcttattcagggggtcgtaccagttcctggtgcccatcgctacgttccagattgcctcatcactgagcaaggagttatgtgctctggtgtttggtgtgaacacattttttgctaccattgttaagacgattataacttttattgtgagtgacgtgcgcggattagggctccccgtgaggaaacaggccctccggatgagccggcctcgcctggggctctgtctccctggtccttttcctccccagagcgcagctccagcacgcgcaggaatggctgcctctagtgccgaggatccgggatccgagcggggcccatggcgccgggcagggacggtcgctgcaagaggcgaccctggaggcgagcgaggcccttggaggcgcgaaggtaccttggctgctcggggagacccggggggcgagcgcggcccgtggtggagagaaggcactctcgcagccaaacctcgtatgcagtgggttacccgcgctactgccccttag

SEQ ID NO: 26443 - DNA, 549 bp, synthetic construct
  misc_feature 1..549: note = Description of Artificial Sequence: Synthetic coding sequence
  source 1..549: mol_type = other DNA
atggtgcccagcagccccgccgtggagaagcaggtgcccgtggagcctggacccgatccagagctgaggagctggagacacctcgtgtgctacctgtgtttctacggcttcatggcacaaattcgcccgggagaaagcttcatcactccatacctgcttggacccgataagaactttacgcgggaacaggttaccaacgaaatcaccccagtgctgagttactcttatctggctgttcttgttcccgtgttcctcctgacggattacttgcgctacacgcctgtattgctgctgcagggattgagcttcgtcagtgtttggcttctgctgttgctgggccactctgtcgcccacatgcagctgatggagctgttctactctgtgacaatggcagctcgtattgcttattcatcatatatttttagccttgtgagacccgcacgctaccagagggtggctgggtactcccgggctgcggttctcctgggtgtgttcacatcgagcgttctcgggcaacttctggtgacagttgggagggtttctttttag

SEQ ID NO: 26444 - DNA, 465 bp, synthetic construct
  misc_feature 1..465: note = Description of Artificial Sequence: Synthetic coding sequence
  source 1..465: mol_type = other DNA
atggtgcccagcagccccgccgtggagaagcaggtgcccgtggagcctggcccggaccccgagctgagaagttggagacatctcgtttgttacctgtgcttctacggatttatggctcaaattcggcccggcgagagctttatcaccccttacctgttaggcccagacaagaattttacacgagagcaagtgactaacgagataacacctgttctaagttactcttatctggcagtactggtacctgtgttcctcctgacggattacctgcgttataccccggtgttgctgctgcagggcctctcctttgttagtgtctggctgcttctactcttaggccattcggtggcccatatgcagctcatggagctgttctatagcgtgactatggccgcccgaatcgcgtattcatcatacatcttttctttggtgcggccagccaggtaccagcgagtcgctgggtag

SEQ ID NO: 26445 - DNA, 1656 bp, synthetic construct
  misc_feature 1..1656: note = Description of Artificial Sequence: Synthetic coding sequence
  source 1..1656: mol_type = other DNA
atgcggccccagcccgccgagcccgcccccggcggccggggcaacgaggcgtgttccatccacagcgaggtgactaacgaaattacacctgtcctgtcctattcttatttagctgtcctagttccagtgtttcttctgaccgattacctgcggtacactccggtactgttgctgcagggcctctcttttgtgtccgtgtggctactccttctgctcggccactccgtggcgcatatgcaattgatggagttgttctatagtgtcaccatggccgcccgcattgcctattcatcttacatcttctccctggtcaggcctgccagataccagcgggtcgctggctattccagggccgctgtcctcctcggtgtgttcacgtcttcagttctcggccaactgctggtgacagtaggccgggtgtcctttagtaccttgaactacataagcctggcttttctgacattctcggtggtgctcgcccttttcctgaagagaccgaagcggtccctttttttcaatagggacgatcgcggcaggtgtgagacctcggccagcgagctggagcgcatgaacccaggcccaggaggtaaattaggacacgcattacgtgtagcctgcggtgactcagtgcttgcaaggatgctccgggaactcggagatagcttgcgccggccacagctgaggttgtggtctttatggtgggtgttcaactctgccggatattacttggtggtgtattatgtgcacattctgtggaatgaagtcgaccccacaacaaactcagctagagtttacaacggggccgcggacgccgcatcaaccttgctcggggctatcactagttttgccgctggttttgtaaagatcaggtgggcaagatggtcaaaactgttaatcgccggcgtgacagccacccaggctggcttagtctttctgctggctcacacaaggcaccccagctctatctggctttgttatgcagcatttgtgctttttcggggcagctatcagtttttagtaccgatagcgaccttccagatcgcctcctcactgagcaaggaactgtgtgcacttgtttttggggtcaacacattctttgccacaatcgtgaagacaatcatcacatttattgtcagtgatgtgaggggactcggcctacctgtgaggaagcagtttcaactatacagcgtttacttcctgatcctaagtattatctacttcttgggagctatgctcgacggacttcggcactgtcagcgaggtcatcatcctcggcagccgcctgcccaggggctccgcagcgcggccgaagaaaaagctgcccaggcccttagcgtgcaagataagggcctgggtggccttcagccggctcagtctccccctctgtcccccgaggattctctgggcgcagttggccccgcatccttagaacagcgtcaaagcgatccttatctcgcccaggcaccagccccacaagccgctgaattcctttctcccgtgacaacacccagtccctgcactttatgttcagctcaggcatccgggccagaagctgcggatgaaacctgcccgcaactcgccgtgcatccaccaggagtgtccaagctgggtttgcaatgtctgccttcagacggcgttcaaaacgtgaatcagtag

SEQ ID NO: 26446 - DNA, 186 bp, synthetic construct
  misc_feature 1..186: note = Description of Artificial Sequence: Synthetic coding sequence
  source 1..186: mol_type = other DNA
atggtgcccagcagccccgccgtggagaagcaggtgcccgtggagcccggacctgaccccgaactgcgcagctggaggcacctggtctgttatctctgcttctacggcttcatggcccagattcgacctggggagtcgtttatcactccatacctgcttggccccgacaaaaacttcacgcgctag

SEQ ID NO: 26447 - DNA, 705 bp, synthetic construct
  misc_feature 1..705: note = Description of Artificial Sequence: Synthetic coding sequence
  source 1..705: mol_type = other DNA
atggagcccagcagcaagaagctgaccggccggctgatgctggccgtgggcggggccgtcctagggagccttcagtttggatacaacaccggtgtcatcaacgcaccacaaaaagtgattgaggagttctataatcaaacatgggtacacaggtatggcgaatctatactgccaacaacgttgactacgctttggtccttgtctgtggccatattctctgtggggggcatgatcggcagtttcagcgtaggactgtttgtgaatcgctttgggcggagaaattctatgctgatgatgaacctgctggcctttgtcagcgcagtcctcatggggttcagcaagctgggcaagtcttttgaaatgcttattcttgggagatttatcattggtgtgtactgtggactgacaaccggttttgtacccatgtatgtgggagaggtcagcccaaccgctctccggggggccctgggaactctgcatcagctgggcattgtggtggggatcctcatcgcccaggttagctggggtcgaatttacttaccaggcactgctcccgcccactccttttccggtagccgtatttgcgctcagcaggggcgggtttcactcccgccatccccccatagccttgcagaagataactacggcacacaggtccagcgcacccagcaccacgggctgcccgtggattccaagatgacatag

SEQ ID NO: 26448 - DNA, 1377 bp, synthetic construct
  misc_feature 1..1377: note = Description of Artificial Sequence: Synthetic coding sequence
  source 1..1377: mol_type = other DNA
atggagcccagcagcaagaagctgaccggccggctgatgctggccgtgggcggcgctgttctcggaagcctgcagttcgggtataatacaggagtgattaacgccccacagaaagtgattgaagaattttacaaccaaacttgggtgcatcgttacggagagtccatcctgccaacgacactcactaccttgtggagcttgtcagttgctatattcagtgtggggggaatgattgggagtttctccgtcggcctgtttgttaatcggtttgggagaaggaactcaatgctgatgatgaatctgctggcatttgtgagtgctgtgttaatgggattttccaagctggggaaatcattcgagatgctaattctggggagattcatcattggggtgtactgcggactaaccacgggattcgtaccaatgtatgttggtgaggtgtcccctaccgctcttcgaggggccttgggaaccctacatcagctcggtatcgttgtcggaatactgatcgctcaggtgttcggcttagattctatcatgggaaacaaggacctttggccccttctcctcagcattattttcattcccgcactgctgcagtgtattgttctgccattttgtccggaatcaccccgctttctcctcataaacagaaacgaggagaaccgggcaaagtctgttttgaaaaagctgcggggcactgcagatgtaactcacgatctgcaggagatgaaagaggagtcgagacagatgatgcgagaaaaaaaggtaaccatacttgagctgttcagatctcctgcctaccgacaacccatccttatcgctgtggtgttgcagttgtcccagcagctgagcggcattaacgccgttttctattactccaccagcattttcgagaaggccggagttcagcagccagtgtatgccactatcgggagtggcatagtgaatacagccttcacagttgtttctttatttgtggttgaaagggctgggcggcgaactctccatctcattgggctcgccggtatggcagggtgtgcaatactgatgaccattgctctcgccctgttggaacaattaccatggatgtcttatctatccatagttgctatcttcgggtttgtggcattctttgaggtggggcctggccctattccctggttcattgtggccgagttattcagtcagggcccccgccctgccgccattgctgtggcaggattctccaattggacaagcaattttatagtggggatgtgcttccaatacgtagaacagttgtgcggcccgtatgtgtttatcatcttcacagtgcttctggtgctgttttttatcttcacactaaacgggagcatgcccgagggaggcgattag

SEQ ID NO: 26449 - DNA, 1305 bp, synthetic construct
  misc_feature 1..1305: note = Description of Artificial Sequence: Synthetic coding sequence
  source 1..1305: mol_type = other DNA
atggagcccagcagcaagaagctgaccggccggctgatgctggccgtcggaggagccgtgttggggtcactccagtttggctataatactggcgtcatcaatgcaccacagaaagttattgaagagttttataaccagacttgggtgcacaggtacggcgaaagcatcctgccaactacattgaccaccctgtggtcactaagcgtggccatctttagcgttggaggcatgatcgggagcttttctgttggcctgttcgttaaccgattcggcaggaggaattccatgctgatgatgaatttgcttgcctttgtccccatgtatgtgggagaggtctcgcctacagcactcaggggcgctttgggaactttacaccagctcgggatcgttgtgggcattattatatttatcccagcgttgctgcaatgtatcgtgctacctttttgcccggagtcgccacgttttctgctgataaatcgtaacgaagaaaaccgggcgaagagcgtcctgaaaaagctgcggggaacggcagatgtgacccacgatctccaggagatgaaggaggaatcccgacaaatgatgagagaaaagaaggtcactatactcgagctcttccgctccccggcataccgacagcctatactcattgccgtggtgctccaactgagccagcagctcagcggcattaacgcagtgttctactactctacaagcatattcgagaaagccggagtgcagcagccggtgtacgccacaatcggatctggaattgtaaatacagcttttaccgtggtatctcttttcgttgtggagcgcgcagggcggcgcactttacacttgattggtttggccggcatggcgggatgcgctatactgatgactattgctttagcccttctggagcagttgccttggatgagctatctttccattgttgccatctttggttttgtggctttcttcgaggtaggaccaggacccattccttggttcattgtcgcggaactgttctcccagggcccccggcctgcagccatcgccgttgccggattttcaaattggacatctaattttatagtcggtatgtgctttcagtatgttgagcagctctgtggcccttacgtgtttatcatattcacagtgctgcttgttttattcttcattttcacatactttaaagtgcccgagacgaaaggtaggacattcgacgagatagcaagtggcttccgacaggggggcgccagccagtctgacaagacccctgaagagttattccatccgctgggggccgattcacaggtgtag

SEQ ID NO: 26450 - DNA, 528 bp, synthetic construct
  misc_feature 1..528: note = Description of Artificial Sequence: Synthetic coding sequence
  source 1..528: mol_type = other DNA
atggagcccagcagcaagaagctgaccggccggctgatgctggccgtcggcggagctgtgctgggctccctccagtttggctacaacacaggcgttatcaatgccccccagaaggtcatcgaagagttttataaccagacatgggtgcatcggtatggcgagtccatcttgcctactaccctcacaactctttggagcctgtctgttgctatcttctccgtcggcggcatgattgggagtttttccgtgggacttttcgtaaacaggtttggacggcgtaattctatgttgatgatgaacttacttgccttcgtcagcgcggtgctgatgggtttctccaaactcgggaaccccaagctcgagaccaccgacactcccctgccgaagaaatttcctttccgaccccaggcacggaaagtgaccgcggtacagtgtccgttttgtctaagcatctgtccgctacatagcctcctgattcttggacctactagtactgcaacagaagcgggaaaaggccacaatgtctag

SEQ ID NO: 26451 - DNA, 1479 bp, synthetic construct
  misc_feature 1..1479: note = Description of Artificial Sequence: Synthetic coding sequence
  source 1..1479: mol_type = other DNA
atggagcccagcagcaagaagctgaccggccggctgatgctggccgttggaggagccgttcttggatcattgcagttcggctataacaccggtgtcatcaacgctcctcaaaaggtcattgaggaattttacaatcagacctgggtgcaccgctatggcgaatcgatcctgcccacgacactgacaaccctgtggtcattgagcgtagcaatctttagcgtggggggaatgatcggtagcttttctgtcgggctgttcgtgaacagattcggaaggcggaattctatgctgatgatgaatctcctcgcctttgttagcgctgtccttatggggttttccaagctggggaaaagcttcgagatgctgatcctggggcgatttatcatcggcgtctactgtggcctaaccacaggcttcgtccccatgtacgtgggggaggtgtcacctacggcactgcgcggcgcactgggaacactccatcagctggggattgtggttggcatccttattgcacaagtgttcggactggatagcatcatgggcaacaaggacctttggcccttattgctctccataatattcatccccgctttgttgcagtgcattgtgcttcctttttgtcccgagtctcccagattcctcctcatcaatcgcaatgaggagaaccgcgcgaaatcagtcttaaagaagttgcgagggacagctgacgtaacccatgacctgcaggagatgaaagaggagagtcgtcagatgatgcgcgaaaaaaaggtgacaatcctggagctctttagatcgcccgcttaccggcagcctatcttgattgctgtggtccttcaattatctcagcagctgagtgggatcaacgcagttttctattacagcaccagcattttcgagaaagcgggggtccaacagcccgtgtatgcgacgattggcagtggcattgtgaacacagcctttacagtggtatctctgtttgtcgtcgaaagggcagggcgtaggaccctgcatctgatcggcttggctggcatggccggatgtgccattctgatgacaatcgcgttggcactgctggagcagctcccctggatgagttatctatctatcgtggcaatctttgggtttgtggcgttttttgaggttggccccggtccaatcccatggtttattgtcgctgagctgttttctcagggtcctcgtccagccgctattgctgtggctggattctccaattggactagcaatttcattgtgggtatgtgttttcaatacgtggagcagctctgcggaccttacgtgttcattatctttacagttctgctggtgctcttctttatatttacatattttaaagtgccagagacaaaaggtcggactttcgatgaaattgcgtctggcttccgtcaggggggggcctcgcagagtgataaaactccggaagaactgttccatccactcggagccgatagccaggtctag

SEQ ID NO: 26452 - DNA, 753 bp, synthetic construct
  misc_feature 1..753: note = Description of Artificial Sequence: Synthetic coding sequence
  source 1..753: mol_type = other DNA
atgctgatgatgaacctgctggccttcgtgagcgccgtgctgatggggttctcaaaactggggaagtcttttgaaatgcttatcctggggcggttcattattggcgtttattgcggcttaacaacaggcttcgtgcccatgtatgtcggtgaggtttctcctaccgccttgaggggggctctcggcactttacaccaactgggaattgtggttggaattctgatagcacaggtgtttggcctagactctattatggggaacaaggacctgtggccactgttactgagcattattttcatccccgcactcttacagtgtatcgttttgccattttgtccggagtctccacgattcctgctaattaatcgcaatgaggagaacagagccaagtccgtgctcaagaaactgcgcggcacagcagatgtgacccacgacctacaggaaatgaaagaggagtccagacagatgatgagagaaaagaaggtcacaattctcgagctctttcggtctccagcatacaggcagcccattctgatagcagtggtacttcagttatcacagcagctaagtgggattaacgctgtcttctattattcaacttcaatctttgagaaagctggcgtccagcaaccagtgtatgccaccatcggcagcgggatcgttaatactgccttcaccgtggtgtccgtatccctttgcctcctcgctccacccgcaaaaccccagggcggagggagtgcaatctttccatag

SEQ ID NO: 26453 - DNA, 1671 bp, synthetic construct
  misc_feature 1..1671: note = Description of Artificial Sequence: Synthetic coding sequence
  source 1..1671: mol_type = other DNA
atgcccagcttcgacgaggccctgcagcgggtgggcgagttcggccgttttcagcgccgtgtgtttcttctgctgtgtttgaccggcgtcacattcgctttcctgtttgttggggtcgtattcctcggcactcagcccgatcactactggtgccgaggccccagcgcagcagccttagcggagcgatgcggatggagtccggaagaggagtggaatagaaccgctcctgctagccgcgggcccgagccgcctgaacgacgaggacgctgccagcgttacctactcgaagcagccaatgacagtgcaagcgcaacatctgctctgagttgcgctgaccctctagccgccttccctaacagaagtgctcctctagtgccttgtagggggggttggcgttacgctcaggcacattctaccattgtgtcggagtttgacttggtgtgcgtaaacgcctggatgctggatctaacacaggcaatccttaacttggggttcctcaccggcgcttttactcttggctacgctgcagatcgttatggaaggatcgtgatctacttactgtcctgcctgggcgtaggtgtcacaggggtggtcgtagcttttgcacccaattttcctgtttttgtcatattccgcttccttcaaggagtgttcgggaaaggcacgtggatgacctgttatgtgatcgtgactgagatagtgggcagcaaacaaaggcgcatagtcggcattgtgatccagatgttcttcactctgggtattatcattctccctggaattgcctatttcatccccaactggcagggcatccagctcgcaatcaccctcccctctttcctgttcctgctgtactactgggtagtgcctgaaagccccagatggctgatcacccgcaaaaagggagataaggctctacaaattctaaggcgcattgccaaatgtaacggcaagtatcttagctcaaactacagcgagatcacagtgacggacgaggaagtatccaacccatctttccttgacctggtccgcactcctcagatgcgcaaatgcacactgatcctcatgttcgcctggttcacatccgcagtcgtgtatcaggggctggtaatgcgcttaggtatcataggaggcaacctctacatagattttttcattagcggagttgtcgagctgcccggagcactgttgatcttgctgacaatcgagagactcggacggcgcctccccttcgcagcctccaacatcgtcgcaggcgtcgcctgtctggtgactgcctttctccccgaggggattgcttggttacgcacaacggtggcaacgctcgggagactaggaatcactatggcattcgaaatagtgtatttggtgaatagcgaactgtacccaacaaccctcaggaactttggcgtgtctttgtgttccggcctgtgcgatttcgggggcataattgcaccctttcttctgtttagacttgcagctgtgtggctcgagctgcccctaattatctttggaattctggcgagtatttgtggtggccttgttatgctgctaccagagacgaaggggattgctctccccgaaaccgtcgatgacgtggaaaaactgggatctccccacagctgcaagtgcggccgtaacaagaagacacccgtgtctaggtcccacctgtag

SEQ ID NO: 26454 - DNA, 1674 bp, synthetic construct
  misc_feature 1..1674: note = Description of Artificial Sequence: Synthetic coding sequence
  source 1..1674: mol_type = other DNA
atgcccagcttcgacgaggccctgcagcgggtgggcgagttcggccgatttcagcggcgggtgttcctgttgctgtgtctgacaggcgtgacatttgcctttctattcgtcggggtggtgttcctgggaacacagccggaccattactggtgcagaggtccttcagccgccgcattggccgagcgatgcggatggtcacccgaggaggagtggaatcggacagcaccagcctccagaggacctgaaccgccagaaagacgtggtagatgccagcgatacttactcgaggccgccaacgactccgcgtcggctaccagcgccctctcttgtgcggatcccctcgccgctttcccgaaccgcagtgcacctctcgtgccatgccgaggaggatggcggtacgcccaggcacatagcacaatcgtgtcggagtttgacctggtctgtgttaatgcatggatgctggatttaacccaggctatcctcaatttagggttcctaacgggagccttcaccctgggctatgctgcggacagatatggccggattgtgatatacctcctttcctgtcttggtgttggagtaacaggggtggtggtggcattcgcaccgaatttccccgtgtttgtcatttttagatttctacaaggagtcttcgggaagggaacatggatgacttgttacgtgatcgtcaccgaaatcgtcggaagcaagcagcggcgaattgtgggaattgtgatccagatgtttttcacactcggtatcatcatcttgcctggaatagcttacttcatcccgaactggcagggcattcagctggccattactctccccagctttctctttctgctgtactattgggtggtgcccgagtcccctaggtggcttatcactcgaaagaagggcgataaggcactacaaatcctgagaaggatcgccaaatgtaatggcaagtatttgagctccaactattccgaaattacagtgacagatgaggaagttagcaatccttccttcctggatctagttcgtacccctcagatgcgcaagtgcacactaatcctcatgttcgcttggttcaccagcgccgttgtttaccagggactggtcatgaggttggggatcataggtgggaatctgtatatcgacttctttatcagtggagtggtcgagttacctggggctttgctaatcctcttgacgatagagcggttaggcaggcggctgcccttcgcagcctccaatatcgtcgccggggttgcttgtctcgttactgcctttctccctgaggcagggatcgcatggcttcgcactactgtcgctaccctgggtaggctaggcatcactatggcttttgaaatcgtctatttggtgaactctgaactgtatccaaccacgctacgtaactttggcgtgagcctgtgctccggtctgtgtgacttcggtggaatcatcgctcctttcttgcttttccgcctggccgcagtttggcttgagctccctctcattatctttggcatcctggctagcatttgcggaggattagtcatgctactgccagaaacaaaaggcatcgctctgccagaaacagtggatgacgtagagaaactgggaagcccccattcttgcaagtgcggcagaaataagaaaacccctgtgtctcggtcccatctgtag

SEQ ID NO: 26455 - DNA, 1017 bp, synthetic construct
  misc_feature 1..1017: note = Description of Artificial Sequence: Synthetic coding sequence
  source 1..1017: mol_type = other DNA
atggagctgcggagcggcagcgtgggcagccaggccgtggcccggcgaatggacggagactcgcgcgacggtgggggcggtaaggacgctaccggctctgaggactatgagaacctgcctaccagcgccagtgtttccacccatatgaccgccggggcgatggcagggatcctggaacactcagtgatgtacccagtggatagtgtgaagacccgcatgcagtcactgtccccagatcccaaggctcagtatacatccatatacggcgccctgaagaaaatcatgagaacagaagggttctggaggcctcttaggggtgtgaatgtgatgattatgggggctggacctgcgcacgccatgtattttgcctgctatgaaaacatgaaacggacgcttaatgatgtgttccatcatcaaggaaattctcatcttgctaatggcatagctggatctatggctaccctgctgcacgacgctgtgatgaatcctgccgaggtagtcaaacagcgtctgcagatgtataactcacagcataggtctgcaatctcctgtatccggactgtatggaggacagagggcctcggagcgttttaccgtagctacaccactcaactgaccatgaacatcccattccagagtattcactttattacgtacgaattcttgcaggaacaggttaatccgcaccgcacctataatccacagtctcatatcatctctgggggtctcgctggagcattggcggcggccgcgaccacacctctggatgtttgtaagaccttgctgaatacccaggaaaatgttgcccttagcttggcaaacatcagcggacggctgtctgggatggctaacgcgttcagaaccgtgtaccagcttaatggattggccgggtatttcaaagggatccaggcgagagtgatctatcaaatgccatctacagccatatcttggagtgtgtacgaattctttaaatacttcctgaccaagagacagctggagaaccgcgctccctattag

SEQ ID NO: 26456 - DNA, 2268 bp, synthetic construct
  misc_feature 1..2268: note = Description of Artificial Sequence: Synthetic coding sequence
  source 1..2268: mol_type = other DNA
atggcccggaagctgagcgtgatcctgatcctgaccttcgccctgagcgtcaccaaccccctgcacgaactgaaggctgcagcattcccccagaccacggaaaagatcagccctaattgggagagtggcatcaacgtggacttggcaatctcaaccaggcagtatcatctgcagcaactattctaccgttatggagaaaacaacagcctctccgtcgaaggattccgcaagttgctgcaaaacattgggattgataagataaaacggatacacatccaccacgatcatgaccaccattccgatcatgagcaccactccgatcacgaacgccactcagatcacgaacatcatagcgagcatgaacatcacagcgatcatgatcaccactctcaccataatcacgccgctagcggcaaaaataagcggaaggccctgtgtccagaccacgatagcgactccagtgggaaggaccctcggaatagccagggaaaaggtgctcaccggccagaacacgcgtcaggcagacgcaatgtaaaagattccgtctcagcaagcgaggttacctctaccgtttacaatacggtgtctgagggcacccacttcttggagacaatcgagacaccgagaccagggaagctgttccctaaggacgtgtcgtcctccactcccccctctgtaactagcaaatctcgggtctctaggcttgcgggcaggaaaacaaacgagagtgtaagtgagccccgaaagggattcatgtacagtagaaacacaaacgaaaacccccaggaatgtttcaacgcaagtaagttgctgacctcccatggcatgggcatccaggtacctctgaacgccacagagtttaattatttatgccccgctataattaatcaaattgatgcacgctcatgtctgattcacacatccgagaagaaagcagaaattcctccaaaaacctactcactgcagattgcttgggtgggagggtttatcgcaattagcattatctccttcctctctcttttgggtgtgatcctggttcctttgatgaacagagttttttttaagtttctcctgtccttcctggtggcccttgccgtcggcactctgagtggagatgcattcctacatctcctgccgcactctcatgccagccatcatcatagccactcgcacgaggaaccagccatggagatgaagaggggccccctattctctcacctcagttcccaaaatattgaggaatcagcctactttgactccacctggaagggattgacggcccttggcggactatacttcatgttccttgttgaacatgttctgacactgatcaaacagttcaaggataaaaagaagaagaatcagaagaagccagaaaacgacgacgacgtggaaatcaaaaagcagctgtccaagtatgagtcccagctctcaaccaacgaagagaaagtagacaccgacgatcgcacggaggggtacctgcgagccgatagccaagagcccagccatttcgattcgcagcagccagccgtgctggaggaggaggaagtcatgatcgcccacgcccacccacaagaagtctacaatgagtacgtgccgcgaggctgcaagaataagtgtcactcacatttccatgatacgctggggcagagcgatgatctgattcaccaccaccacgactatcatcacattctgcatcaccaccaccatcagaaccaccacccacactcacacagccagagatatagtcgagaggagttaaaagacgccggcgtcgctaccttagcatggatggtgattatgggggatggtcttcacaatttttcagacgggcttgccatcggcgccgcctttacagaaggtctttcaagcggtctgtccacctctgtggctgtgttttgtcatgagctccctcatgagttgggcgactttgccgtgctgcttaaggccggtatgaccgttaagcaagctgtgttgtacaacgcactatccgcgatgctcgcctacctgggaatggcgactggcatctttattggtcattacgcggagaatgtgagcatgtggatattcgccttaaccgcaggtctgtttatgtacgttgccctcgtggatatggtccccgaaatgctacacaacgacgcctcggaccatgggtgttcacgctgggggtacttttttctgcagaacgccggtatgctccttggctttggcatcatgctgttgattagcatttttgagcacaagattgtcttccggattaatttctag

SEQ ID NO: 26457 - DNA, 1302 bp, synthetic construct
  misc_feature 1..1302: note = Description of Artificial Sequence: Synthetic coding sequence
  source 1..1302: mol_type = other DNA
atgggcatccaggtgcccctgaacgccaccgagttcaactacctgtgtccggctatcataaaccagatcgatgctcgctcctgtttaatacacactagcgagaagaaagcagagatcccaccaaaaacgtattctcttcaaattgcttgggtaggtgggtttatcgccatttctattattagttttctttcgctcttgggcgtgatattggtgcccctgatgaaccgtgtattttttaagtttctgctcagctttctggttgcactcgctgtggggacactgtctggggacgcatttctccatctgctgccacatagtcacgcctcccaccaccacagtcacagtcatgaggaaccagcgatggaaatgaaacggggtcccttattttcgcatctgtcgagtcagaacattgaggagtccgcttattttgactcaacttggaagggcttgactgcactgggaggcctgtacttcatgttcctcgtggagcacgtcctgactctcatcaaacaatttaaagacaagaagaagaaaaatcagaagaagccagaaaacgacgacgacgtggagataaagaagcagctgagcaaatacgagtcacagctttccacgaatgaggaaaaagtggataccgacgataggacggaaggctacctcagggctgatagccaggagccctctcactttgactcacagcagccggccgtattagaggaggaggaagtaatgatcgctcatgcacatcctcaggaggtgtataacgaatatgtgcctcgaggatgtaagaataaatgtcactcccacttccacgacacactcggacagtctgacgatctgatccaccatcaccacgactatcaccatatcctccatcaccaccaccaccaaaaccaccacccacattcccactctcaaaggtatagccgagaggaactaaaagatgcaggagtcgcaaccctggcttggatggtaatcatgggcgatggcctgcacaatttcagcgacggactcgccatcggggctgccttcacggagggactgtcctccgggctgtccacaagtgtagctgtgttttgtcatgagctcccacacgagctgggggatttcgccgtcttgctgaaagctggaatgacagtgaagcaggcagtcctgtacaatgctctgtctgccatgctggcatatctcgggatggccacaggcattttcattggacattacgcagagaatgtcagcatgtggatttttgccctgaccgctggattgttcatgtatgtggcccttgtagatatggtctctttttag

SEQ ID NO: 26458 - DNA, 1233 bp, synthetic construct
  misc_feature 1..1233: note = Description of Artificial Sequence: Synthetic coding sequence
  source 1..1233: mol_type = other DNA
atgggcatccaggtgcccctgaacgccaccgagttcaactacctgtgcccagctatcatcaaccaaatcgatgccaggtcttgtctcatacacacttccgagaaaaaagcggaaattccgcctaagacctactctttgcagatagcatgggtgggcggcttcattgcaataagtattattagcttcttgagcctcctcggtgtgatcttagttcctttgatgaaccgggtcttttttaagtttcttctgagtttcctagtggcactggcagtggggaccctatctggcgacgcctttctccatttacttccgcatagccacgcaagtcatcaccattcacactcccatgaagaaccagccatggagatgaaacgcggcccgctgttctcacacctctcctctcagaatattgaggaatcagcctattttgacagtacctggaagggcctcaccgccctgggcggcctgtactttatgttccttgtggaacacgtgctgacgttgattaaacagtttaaagataagaaaaaaaagaatcagaaaaaacccgaaaatgatgacgacgtagaaatcaaaaagcagctgtctaaatatgagagccaactgtcaacgaacgaggagaaggtggataccgacgaccgcaccgagggataccttcgcgcagactctcaggaaccaagccactttgactctcagcagccagccgtgctggaagaggaggaagtcatgatagcccacgctcatcctcaggaggtctataacgaatacgtgccaaggggctgcaaaaacaaatgccacagccacttccatgatactctcggacagtccgatgacttgatccatcatcaccacgattaccaccacatcctgcaccaccaccatcaccaaaaccaccatccacattcccatagtcagaggtacagcagggaggaactgaaggatgcaggtgtggcaactttagcctggatggtgataatgggagacggactgcataacttcagtgacggtcttgcaattggcgctgcctttaccgagggcctgagcagtgggctgagcacaagtgttgctttggtggacatggttccagaaatgctgcacaacgatgcttctgatcatggctgcagccgatggggctatttctttttgcaaaatgccggtatgcttctcggctttgggataatgctgttgattagtatcttcgagcacaagatcgttttcaggatcaacttctag

SEQ ID NO: 26459 - DNA, 1833 bp, synthetic construct
  misc_feature 1..1833: note = Description of Artificial Sequence: Synthetic coding sequence
  source 1..1833: mol_type = other DNA
atggacaccccccggggcatcggcaccttcgtggtgtgggactacgttgtgttcgctggtatgctggttattagcgctgccatcggaatttattacgcattcgcaggcggagggcaacaaacgtccaaggactttctcatgggcggtagacgaatgactgcggtccctgtggccctgtccctaactgcctccttcatgagcgccgtgaccgtcctcggaactccttcagaagtctatcggttcggcgccatcttcagcatttttgccttcacatacttttttgtggtcgtgattagtgctgaagtttttctgccggtgttctacaagctggggattactagcacatatgagtatctggagttgcgctttaacaagtgcgtacgcttatgtggcacagttcttttcattgtgcagaccatcctttataccggaatagtcatttacgcgcccgctctcgccctgaatcaggtgaccggctttgacctatggggcgcggttgttgctacaggtgtggtgtgtactttttattgtacgctgggtgggctgaaggccgtgatctggaccgacgtgtttcaggtggggatcatggtagctggattcgcttccgtgatcattcaagctgttgtaatgcaaggtggcatatctaccattctcaacgacgcatatgatggcggccgcctaaacttctggaatttcaacccaaatccactgcaacgccacaccttctggactatcattataggaggaacgttcacgtggacaagtatttacggtgtcaaccagagccaagttcagaggtatatcagttgtaaaagcaggtttcaggctaagctgagtctgtatatcaatctggtgggcttgtgggcaatactcacatgctccgtcttttgcgggctcgcactgtattcacggtatcacgactgtgacccatggaccgctaagaaggtcagtgcccccgatcagctgatgccctatctggtactggacattttgcaggattatccaggccttcctggactcttcgttgcctgtgcctactccggaacactgagcacagtgagtagctctattaatgctttggctgccgtcaccgtggaggatctcatcaagccatacttcagaagtttaagcgagagatccttgtcatggataagtcagggaatgtctgtggtctacggcgcactctgcattgggatggccgccctggcttctttaatgggcgcactgttacaggcagccctgagcgttttcggcatggttggggggcccttaatggggctatttgccctaggcatactggtgccattcgccaattctattggtgccctggtcgggcttatggctggcttcgcgatatctctgtgggtaggaatcggcgcacagatttatccgcctttgcccgagaggacactgcctcttcatctcgatatacagggttgtaattccacatataacgaaacaaatctgatgaccaccaccgaaatgccttttacgactagcgtgtttcagatttataatgtgcaacgcaccccgttgatggacaactggtacagtctgtcgtacctgtatttctcaacggtgggaacccttgtgacactgctggtcggcatactcgtctctcttagtaccggagggagaaaacaaaatctggatccccgatatatcctaaccaaggaagatttcctaagtaactttgatatcttcaagaaaaagaaacacgttctgtcttacaagagtcacccggtggaagatggaggcactgataatcctgcttttaaccatattgagttgaatagtgaccaaagcgggaagtccaacggtacaaggttgtag

SEQ ID NO: 26460 - DNA, 1071 bp, synthetic construct
  misc_feature 1..1071: note = Description of Artificial Sequence: Synthetic coding sequence
  source 1..1071: mol_type = other DNA
atggacatggccgacgagcccctgaacggcagccacacctggctgtccataccctttgatttgaacggcagcgtcgtcagcaccaacacctccaatcaaactgaaccatattatgacctgactagcaatgccgtactgacctttatctactttgttgtttgcatcataggcctgtgcggaaatacactcgttatttacgtcatcctgaggtacgctaagatgaagacaataactaatatctacatcctcaatctcgccatcgccgacgagctgtttatgttgggccttcccttcttggcaatgcaagtggctttagttcattggcccttcggcaaagctatatgtcgcgtcgtaatgacggtggacggcatcaatcagttcacgagcatcttttgcttaacagtaatgagcattgacaggtacctggccgtggtgcatcctataaagagcgcaaagtggcgaaggcctaggaccgccaaaatgatcaccatggccgtgtggggagtgagtctcctagtgatactccctataatgatatacgcagggctgcgatccaaccagtggggaagaagcagctgtacaatcaattggcctggggagtccggcgcatggtatactgggtttataatttacacttttatcctcggctttctggttccactgaccattatttgcctctgttaccttttcatcataatcaaggtgaaaagttccgggatccgggtcgggtccagcaaaaggaaaaaatccgaaaagaaggtgacacggatggtgtcaatcgtcgtggctgtgttcattttttgctggctaccattttatatcttcaatgtctcttctgtctctatggccattagtcccaccccggcgctgaagggtatgtttgacttcgtcgttgtcctcacttatgctaactcgtgcgcaaacccaattctgtatgcatttctctcagacaactttaaaaaatccttccaaaacgtcttatgcttggtgaaagtcgacaattccaagagtggtgaagaggggtcatgcctggatatgattttcaggaacaataaaaacagaaaaaaatag

SEQ ID NO: 26461 - DNA, 1110 bp, synthetic construct
  misc_feature 1..1110: note = Description of Artificial Sequence: Synthetic coding sequence
  source 1..1110: mol_type = other DNA
atggacatggccgacgagcccctgaacggcagccacacctggctgagtatccctttcgaccttaacggctcagtggtctccactaacacttcaaatcagacagagccatattacgatctgacatcgaacgcagtccttaccttcatttatttcgttgtgtgtattattggtctttgtggcaacacattggtgatctacgtgatactcaggtatgcgaaaatgaagacgatcacaaacatttatattctcaatctcgccatagccgacgaactgttcatgctcggcctcccttttctggcaatgcaggtggcattagttcactggccatttggcaaggccatttgcagagtcgtaatgactgtggacggcattaatcagttcacctcgatcttctgtctgaccgttatgtctatcgaccgctacctcgcagtggtccatcctattaagagcgcgaaatggagaaggcctcggacagctaagatgatcacaatggcagtgtggggtgtgtcactactggtcatcttgcctatcatgatttacgccgggcttaggagtaaccagtggggccgctcatcgtgcaccatcaattggccaggagaatctggtgcatggtacactggtttcattatttatacttttattttaggcttcctggtcccactgacgatcatctgcctttgttatttattcataataatcaaagtcaaaagctccgggatcagagtcgggagctctaaacgcaaaaagagcgagaagaaggtcacgcgcatggtgagcattgtggttgccgtgttcatcttttgctggcttcctttctatattttcaatgtgtcatcagtgagcatggcgatctctcctactccggctctgaaaggcatgtttgattttgttgtggtgttgacatatgcaaattcttgtgctaatccaatactgtacgcattcctgtccgacaatttcaaaaagtcgttccaaaatgtactctgtctggtaaaggtctcgggcaccgatgacggtgagcgttccgacagcaagcaggataagagcaggcttaacgaaaccacagagacacagaggaccttgctgaatggcgacctccagacatccatttag

SEQ ID NO: 26462 - DNA, 3315 bp, synthetic construct
  misc_feature 1..3315: note = Description of Artificial Sequence: Synthetic coding sequence
  source 1..3315: mol_type = other DNA
atgcaggcccagcagctgccctacgagttcttcagcgaggagaacgcccctaagtggagaggcctactggtgcctgctctgaagaaagtgcagggacaagtccacccaaccttggaaagtaacgacgacgcactgcaatacgtcgaagagttaatcctccaactcctgaatatgctgtgccaggctcaaccccggtcagcttcagacgtagaagaacgggtccagaagagctttcctcatcctatcgataagtgggcaattgccgatgcccagagcgctatcgagaaacggaagcggaggaacccactgagtctaccggtcgagaagatacatcccctcctgaaagaagtccttggatataagatagatcatcaggtttcagtgtatatcgttgcagtcctcgaatatatttccgccgacatcctcaaacttgtgggcaattatgttcgcaatattcggcattatgaaattactaagcaagacatcaaagtagctatgtgtgcagataaggtattaatggatatgttccaccaggacgttgaagatatcaatatcctgtccctgaccgacgaagagccttcaacctctggagaacagacttactacgatctggtcaaagcattcatggccgaaattcgccagtatattcgagaactgaatctgataatcaaagtctttcgtgagcccttcgtgagcaattcaaagctgttcagcgccaatgatgtggagaatatctttagtcggatcgtggacatccatgagctcagcgtgaagcttttagggcatatagaagacacagtggaaatgacagacgaggggtcccctcacccgctagttgggtcttgttttgaggaccttgcggaagaattggcctttgatccatatgagtcatacgcaagagacatcctgagacctgggtttcacgatcgctttctgtcccagcttagcaagccaggtgccgccctgtatctccagtctatcggagaggggttcaaggaagctgtgcagtacgtcctgccccggctgctcctggccccagtataccactgtttgcattatttcgagctgctgaaacagctggaggaaaaatcagaagatcaggaagacaaagaatgcctcaagcaagccataactgctcttttaaacgtgcagagcgggatggaaaagatatgcagcaagtcattagccaaacgacgtctttccgaatccgcctgtcggttttattcccagcagatgaagggaaagcagctggcgataaaaaagatgaatgaaattcagaaaaacattgacggatgggagggtaaagatatcggacagtgctgtaacgagtttattatggagggaacccttacaagagtaggggctaagcacgagcggcacatcttcctttttgacggtctgatgatctgctgtaagtccaaccacgggcaaccgcggctgcctggcgcgtctaacgcagaatacaggctgaaggaaaagttctttatgcggaaggtgcagattaatgacaaggacgatacgaatgagtacaagcacgcttttgagataatactgaaggatgagaacagcgtgattttcagtgccaagtcagcagaggaaaaaaataattggatggccgcactcatttccttacagtataggtcaactctcgaaaggatgcttgatgtgaccatgctgcaggaggagaaagaggagcagatgagactgcctagtgccgatgtgtacaggtttgccgagcctgatagtgaagaaaacatcatctttgaagagaacatgcagcctaaagccggaatcccgatcatcaaggccggtactgtgataaagttgatcgaaaggcttacctaccatatgtatgctgacccaaattttgtacgaacttttctgaccacatatagatctttttgtaaacctcaggagttgctttctttgatcatcgaacggttcgagatccctgagcccgagccaactgaggctgatagaattgctatcgaaaacggtgatcagcccctgtctgctgagctgaagcggttcagaaaggaatatatccagcccgttcagctgagggtgctaaatgtttgtcgccactgggtagaacatcacttttacgattttgaacgagatgcttatctgctgcagaggatggaggaatttattggaacagtcaggggcaaagccatgaagaaatgggtggaaagcatcaccaaaatcatccagagaaagaaaatcgcaagggacaatggccctgggcacaacattacctttcagtccagtcctccaaccgttgagtggcatatttccaggcctggtcacatcgaaacattcgatttgctgacactccaccctattgaaattgcgagacagcttactctgctggagtccgacttatacagggctgtgcagccaagcgagcttgtcggatctgtttggacaaaggaggataaggaaatcaatagccccaatctgctgaaaatgattaggcacaccaccaatctgaccttatggttcgagaagtgcatagtcgagacagaaaacctggaagaaagggtggccgtggtttcacgcattattgagatactgcaggtattccaggagctaaacaactttaatggggtgcttgaggttgtgtccgcaatgaactccagcccggtatatcgacttgatcataccttcgagcagatcccctcaaggcagaagaagattctcgaagaagctcacgagctgtcagaggatcactataagaaatatctggccaaattacgatctattaaccctccttgcgtgccctttttcggtatttatctgaccaacatcctcaagacagaggaagggaatcccgaggtgctcaagagacatggcaaggagctcataaatttctccaaaaggagaaaagttgcagagattactggcgaaatccagcaatatcaaaatcaaccttactgcttaagagtagaatcagatatcaaaaggtttttcgagaatctgaacccaatgggtaattccatggaaaaggagtttactgattacttgttcaacaagtccctggaaattgaaccccgaaaccctaaacctttgccccggttccccaaaaaatattcatatccacttaaaagcccaggagtgaggccttctaacccaaggcccggcaccatgcgccacccaacccccctgcagcaggagccccgaaagataagctactcccggataccggagtcagagactgaaagcactgcttctgccccaaactccccaaatactgttaacacatccgcatgcttctggtgctttcaataccatcggtgtctgcagtgcatatag

SEQ ID NO: 26463 - DNA, 3957 bp, synthetic construct
  misc_feature 1..3957: note = Description of Artificial Sequence: Synthetic coding sequence
  source 1..3957: mol_type = other DNA
atgcaggcccagcagctgccctacgagttcttcagcgaggagaacgctccaaaatggaggggacttctcgtccccgctctcaagaaagtgcagggccaggtacacccaactcttgagtcgaacgacgatgcactgcaatacgtcgaagaactgattctgcagctgctgaacatgctgtgccaggcccagccccgcagcgcctcagacgtggaagaaagggtgcagaagtcattcccccacccaattgacaaatgggccattgcagacgcccagtccgctattgagaagagaaagaggagaaatccattgtctttgcccgttgaaaagatccaccccctcctgaaggaggtgctggggtacaagatcgaccatcaggtgtctgtgtatattgtggcagtgctggagtacatcagcgctgatatcctgaaactggtgggcaactacgttcgcaacatacgccactacgaaatcacaaagcaggatatcaaggttgcaatgtgcgcagacaaggtcctgatggatatgtttcatcaagatgtagaagacataaatattttaagcctgacagatgaggagcccagtacctccggcgaacagacatattacgaccttgttaaagctttcatggccgagataaggcagtatatccgggaactgaacctgattatcaaagttttccgggagccctttgtgagcaactcaaaattatttagcgccaacgatgtcgaaaacattttttcacggatcgtggacatccatgagttatccgtgaaactcctcggccacattgaagacacggtggagatgacagacgaaggaagcccacatcctctggtgggatcctgttttgaggacttggctgaggagctggcttttgacccctatgagagctacgccagggacatccttagaccgggctttcatgaccgatttttatctcaactctccaagcccggtgctgccttatacctgcagagtatcggagaaggctttaaggaagcagtgcagtacgttttacctcgactcctcttggcccctgtctaccactgcttgcattattttgaattactgaagcagctagaggagaaatctgaggatcaagaagacaaggaatgtctgaagcaggcgattactgcgctcctaaacgtgcagtctggcatggaaaaaatctgcagcaaaagtctggcaaaacggcgcctcagtgaatccgcctgccgcttctactctcagcaaatgaaagggaaacagctggcaatcaagaagatgaacgagatccagaagaatattgatggctgggagggaaaagacatcggccagtgttgcaacgagttcattatggaggggacgttgacacgcgtaggagctaagcacgagcggcatatcttccttttcgatggcctgatgatctgttgtaagtctaaccacggccagcctagattgcctggtgcaagcaacgccgagtatcgcttgaaggaaaagttcttcatgcggaaggtccagatcaatgacaaagatgatacaaacgaatataaacacgccttcgagatcatccttaaagatgagaactcagtgatcttcagtgcgaagtcggccgaagagaagaataactggatggctgccctgatcagcctgcagtatcgaagcaccttggaacggatgttggatgtgacgatgctccaggaagaaaaagaggaacagatgaggctgccaagcgccgatgtatatagattcgcagaacctgactccgaagagaacattatctttgaggaaaacatgcagccaaaagccggaatcccgatcataaaagcagggaccgtcattaagttgatcgagaggctcacgtatcacatgtacgcagaccccaattttgttcgcactttcctgacaacgtaccggagcttctgcaaaccacaggaactgctctctctgattattgaacgcttcgaaatccctgagccggagcccaccgaagctgaccggattgccatcgaaaacggggaccaaccactgagcgcggaactgaagcggtttaggaaggaatatattcaaccagtccagctgagagtacttaacgtgtgccgccattgggttgagcaccatttttatgactttgagagggacgcatacctgttacagcgcatggaagaatttattggcaccgttagaggcaaggccatgaagaagtgggtggagtccataaccaaaatcattcagcgaaaaaaaatcgcacgagacaacggacctggccacaatattactttccagagcagccctcccacagtagaatggcacatctcccgcccaggacatatcgaaacgtttgatttgcttactctgcaccctattgaaattgcacgacagctcaccctactcgagagcgacctgtaccgggctgtgcagccatcagagttagtcggaagcgtatggaccaaagaagataaggagatcaattctcccaatctactgaaaatgattcgacatactacaaacctgaccttgtggtttgagaagtgtattgtggaaaccgagaatctggaggaacgcgtcgcagtggtctccagaataatagagattctgcaagtttttcaagaactcaacaatttcaacggcgtgttggaggtcgtttctgcaatgaatagtagtccagtctataggctggatcacactttcgagcagattccctcccgacagaagaaaattctggaagaggcccacgagctgtccgaggaccattataaaaagtatctggccaagctacggtctattaaccctccatgtgtccccttcttcgggatctatctcaccaacattctgaagactgaagaaggtaaccccgaagttttgaagcgtcatggcaaggagcttatcaacttcagtaaacgcaggaaggtggcagagatcacaggtgagattcagcagtaccagaaccagccatactgtctgcgggtggaatcagacattaaaagattctttgaaaacttaaaccccatgggaaactcaatggagaaagagttcaccgactacctattcaacaaatctctcgaaattgagcctcggaaccccaagccgcttcccagatttcccaagaaatatagctatcccctgaaaagtcctggcgtgagaccttctaatcctcgcccagggaccatgcggcaccctacgcctttacagcaggaacctcggaagatttcgtactcgcgcatccccgaaagtgagacagagtccaccgccagcgctccgaattccccccgcactcccctgacacctcctccagcttctggagcatcttccaccaccgatgtttgctcagtcttcgattccgaccactccagtcccttccattcaaggtcagccagcgtgtcctcaataagcctaaccaaaggcacagacgaagttcccgttccaccgccagtgcctccaagaagaaggcccgagtccgccccagctgaaagttcacccagcaaaattatgtccaagcacttagatagccctcccgccatcccaccgcgtcagcctacaagcaaggcctactcacctcgatactccatttctgaccggacctcgatctccgacccaccagaaagcccacccttactcccgccacgtgaacccgtgcggaccccggacgttttttcttccagcccccttcacctccagcctccccctttgggaaaaaagagcgaccacggtaatgctttttttccgaactcacctagcccctttaccccgcccccccctcagactccaagtccgcacggaactaggagacatctgccaagccctccattgactcaggaggtggatttgcactctatcgctgggccacccgtccctcctagacagagcaccagccagcacatccctaagctcccgccaaaaacctacaagcgtgagcatacgcacccatcaatgcaccgtgacggtccacccctgctagagaacgcgcacagttcctag

SEQ ID NO: 26464 - DNA, 4002 bp, synthetic construct
  misc_feature 1..4002: note = Description of Artificial Sequence: Synthetic coding sequence
  source 1..4002: mol_type = other DNA
atgcaggcccagcagctgccctacgagttcttcagcgaggagaacgctcccaagtggcgcggcctgttggttccggccctcaagaaggttcaggggcaggtgcaccccactttagaaagcaacgacgatgccctgcagtatgttgaggagctaatacttcagctgctcaacatgctgtgtcaggcacagccacggtctgcaagtgatgtggaggaacgagtacagaagtcattccctcaccctattgataagtgggccatcgcagacgcacagtcagctatagagaagcggaaacggcgcaacccgctctcactgcccgttgaaaagattcatcccttgctcaaggaagtgttggggtacaaaatcgatcaccaggtgagcgtgtacatcgtggccgtcctggagtatatatccgctgatattctaaagctggtgggaaattacgtccgtaacattcggcattatgaaattacgaagcaggacatcaaggtggctatgtgcgctgacaaggtgctaatggacatgtttcaccaagacgtagaagacataaacatcctctctctaactgacgaagagcccagcaccagcggggagcaaacgtactacgatctggttaaggcttttatggcagagatacgccagtacattcgggaactgaatttgattattaaggtgtttcgtgaacccttcgtcagtaattccaagctctttagcgcaaatgacgttgagaatatctttagcaggatagtggacatccatgaactttcagtgaagctactcggccatattgaggatacggtggaaatgacagacgaaggatctccccatccactcgtggggtcctgcttcgaagatctggcggaggagctcgccttcgatccttacgaatcttatgcacgtgatatcttacggccggggttccatgatcgatttctttctcagctgtccaagccaggcgcagctctgtacctgcaatccataggagagggcttcaaagaagccgtgcagtacgtgctgccgcgcctcctgctcgctcctgtgtaccactgcctgcattacttcgagctgctaaaacaacttgaagagaagtctgaagatcaggaagacaaggaatgtttgaagcaggctataacagccttgctgaatgttcagagcggaatggaaaagatctgtagcaagtcgctggctaaacggaggttgtcggagtctgcctgtcgattttatagccaacagatgaaggggaagcagctggcgattaagaaaatgaatgagattcagaagaacatcgatggctgggagggaaaggatatcgggcaatgctgcaatgagtttatcatggaggggaccttgactcgagtgggtgctaaacacgagagacacatctttctctttgacggactcatgatttgttgcaagtctaatcacggtcagcctcggctgccaggcgccagtaacgccgagtatcgccttaaagaaaagttcttcatgagaaaagtgcagataaacgacaaggatgacacaaacgaatacaagcatgccttcgagataatcctcaaggatgaaaattcagtcatattctctgcaaaatcagctgaagagaaaaataattggatggccgcactgattagcttgcagtacagatccactctggagcggatgctggatgtcaccatgcttcaggaagagaaggaagaacagatgcgtctcccatcggccgacgtgtacaggttcgcagagccagactcggaggaaaatattatcttcgaagaaaacatgcagcccaaggcgggcatccccattattaaagccggtacggttattaagcttattgaaaggttgacttaccatatgtatgccgacccaaactttgtgcgtaccttcctgacgacgtatcggagtttctgtaagccccaggaattgttatctctgattatcgaaagatttgagatccctgaacccgagccgactgaagccgataggatcgccatcgagaacggagaccagcctctgtccgcagaactcaagagattccgcaaggaatatatccagcccgtccagctgcgcgttctaaacgtctgtagacactgggttgaacatcatttttacgactttgagcgggatgcatacctgctgcagcgcatggaggaattcattggcaccgtacgaggcaaggccatgaagaaatgggtggagtctattacaaagatcattcagaggaaaaagatagcccgtgacaatggccccggacacaatattactttccagtctagcccccccaccgttgaatggcacatctcccgccccggccacatcgaaacattcgacctcctcacgttgcacccgattgaaatcgctcgacagttaacgctccttgagtcggatttgtaccgagccgttcagcccagtgagttagtgggctccgtctggactaaagaggataaagaaatcaacagtccaaacctcctgaaaatgataaggcatactactaaccttaccttatggtttgagaaatgcatagtggagactgagaacctggaggaaagggtagcagtggtgtcccgcattatcgagattttgcaggtgtttcaggagctgaacaacttcaacggggtgctggaggtggtcagcgcaatgaatagcagcccagtgtatcggctggaccacacgttcgaacagatcccttcccggcagaaaaaaatcctcgaagaggcacacgagctctccgaagatcattataaaaaatatttggcaaagctccgatctattaacccgccctgtgtgccttttttcgggatttatcttactaatatattgaagaccgaagagggcaaccctgaagtcctaaaaaggcacggtaaggaacttataaatttcagtaagcggagaaaagtggccgagatcaccggagaaatacagcagtaccagaaccagccatactgcctgagagtggaaagcgatatcaaacgattcttcgagaatctgaatcccatgggtaattccatggaaaaagaattcactgactacttgtttaataagtcactcgaaatcgagccgcgaaatcccaagcctctgcccaggtttcccaagaaatactcataccctctcaaatctccaggagtgcgccccagcaaccccagaccaggcactatgagacacccaacaccccttcagcaggagcctcgaaaaataagctacagtagaattcctgagtcagagactgaatcgacagcctctgcacccaatagccccaggaccccactgacaccgcctcccgctagtggagcatctagcacgaccgatgtttgctcagtgtttgactccgaccatagctcccccttccactcgtcgaacgacacagtgttcattcaggttacgctgcctcatggccccaggtccgcttccgtttcttcgataagcctgacaaaagggaccgatgaggtgcccgttccaccacccgtgccaccccgacggcgtccagagtctgccccagccgagtcaagcccaagtaaaatcatgagcaaacaccttgatagtcctcctgccataccccccagacagcctacttccaaagcctacagcccacgatactccatttccgatagaacttcaatttccgacccaccggagtcaccccccctgcttcctcctcgcgaacctgtgaggaccccagacgtattttcttcttcccctctccacctgcagcctcctcccctcggtaagaagagtgatcacggtaacgcatttttccccaattccccgagccctttcacccccccacctcctcagacgccaagccctcacggcacgcgccgccatttgccctcacctcccttgacacaagaagtcgatctgcattcgatagccggcccccccgtgcccccgcgccagtccacctcacagcacattccaaagctccctcccaaaacttacaagcgtgaacacacacaccctagtatgcaccgagatggccctcctctattagaaaatgctcattcatcatag

SEQ ID NO: 26465 - DNA, 4002 bp, synthetic construct
  misc_feature 1..4002: note = Description of Artificial Sequence: Synthetic coding sequence
  source 1..4002: mol_type = other DNA
atgcaggcccagcagctgccctacgagttcttcagcgaggagaacgccccgaaatggcgtggtctcttagtgccagcgctgaagaaggtccagggacaggtgcaccccacactcgagtcaaacgatgatgcactccagtacgtggaagagttaatccttcagctgctgaatatgctctgccaggcccaacctcgttctgcttctgacgtagaggagcgggttcagaagagttttccacaccctatcgacaaatgggcaatcgccgatgctcagtcagcgattgaaaagcgcaagcggcgaaatccactttctctacctgtggaaaaaattcatcctctcctgaaagaagtcttgggctacaaaatcgatcatcaggtttctgtgtatattgtagccgtcctcgaatatatatcggcagacatcctgaagctcgttggcaactacgtgagaaacatccgccactacgagatcacaaaacaggatataaaggtggccatgtgcgctgacaaggtccttatggatatgtttcaccaggacgtggaggacataaacatcctgagtcttacggatgaggaaccttccacaagcggcgagcaaacctattatgatttggtaaaggctttcatggctgaaattcgccagtatataagagaacttaatctgattatcaaagtgttccgggaaccttttgtatcaaactcaaagttattttcagcaaatgacgtcgaaaatattttttcaaggattgtcgatatccacgaattgagcgtcaagcttttagggcatattgaggacacagtagaaatgacggacgaggggtctcctcaccctcttgtcggatcatgcttcgaggatttagcggaggaattagccttcgacccatacgagagttacgcaagagatatcctgagaccagggtttcacgatcggtttctctctcagctatcaaagcccggggctgccctgtatctgcaaagtatcggcgagggattcaaagaggcagtgcagtacgttctccctcgcctgcttctcgccccagtgtaccactgtctgcattacttcgagcttttaaagcagctcgaggaaaaatcagaggatcaggaggataaagaatgtttaaaacaagcaattaccgccctgctaaacgtccagagcggaatggagaaaatctgctcaaagagcttagccaaacgtcggctgagtgagagtgcttgcaggttctacagccagcagatgaaaggcaagcagctcgcaatcaagaagatgaacgaaattcagaaaaacatcgacggatgggagggaaaggacatcggccagtgttgcaacgaatttatcatggagggcactttgacacgtgtgggcgctaagcacgagagacatattttccttttcgacggactgatgatctgctgtaaaagcaaccacggccagccaagacttccaggcgctagcaatgcggagtatagactgaaagaaaagttttttatgaggaaagtccagatcaacgacaaggatgacaccaacgaatacaaacacgccttcgagatcatccttaaagacgagaacagtgtcatcttctccgccaagtctgctgaagagaagaacaactggatggctgcacttataagtctgcagtacaggagtactctggagagaatgctggacgtaacaatgttgcaggaagagaaagaggaacagatgaggctcccctccgctgatgtgtatcggtttgccgagcctgacagcgaagagaacatcattttcgaggaaaatatgcaaccaaaggcaggtattccaattatcaaggccgggacagtaataaagttaatcgagcgcctgacctaccatatgtatgctgaccctaacttcgtcaggactttcctaaccacttaccgctcattttgtaagcctcaggagctgctctccttgatcattgagcgcttcgagattcccgagcctgagcctactgaagctgatcggattgcaatcgagaatggcgatcagcccctgagcgccgagctgaagagattccgcaaggagtatattcagcctgtacagctgagagtactcaacgtgtgccggcattgggtggagcaccacttttatgattttgagcgagacgcatacttgctgcagcggatggaagagtttatcgggaccgttcgcggcaaagcgatgaagaagtgggtggaaagtattaccaaaattatccagcgaaaaaagatcgcccgtgataacggacccgggcacaacatcacgttccagagctcccctccaactgtggagtggcacatctcacgaccagggcacattgagactttcgatcttctaacacttcatccgattgagatcgcaaggcaacttactctattggaatccgatttgtatcgggctgtccagcctagcgaactggtgggcagcgtgtggaccaaagaggacaaggagattaactcccccaacctattgaaaatgatccggcacactaccaacctgaccttgtggtttgagaagtgcatagttgaaacagaaaatctggaagaaagagtggccgtcgtctcgagaataatcgagattctgcaggtgtttcaggagttgaacaacttcaacggagtgctggaggtggtgtctgcgatgaattccagccctgtgtatcgcctggaccatacctttgagcagatccctagtcggcaaaaaaaaattctggaggaagctcacgagctgtcagaagaccattacaagaaatatctggccaaactgagatctattaatccaccatgcgtgccgttcttcgggatctacctgacgaacatccttaagaccgaagaggggaatccagaggtgcttaagcgacacgggaaggaactgatcaatttttcaaagcggcgaaaggtggccgagatcacaggggagattcaacagtaccagaaccagccctattgtctgcgagtcgagagtgatataaaacgattttttgagaatctgaaccctatggggaattcaatggaaaaagagttcacagactacttgttcaacaaatctctcgagattgagcctaggaacccgaagcctctgccccggtttcctaagaagtatagctaccccctgaagtctccgggtgttcgcccttctaaccctaggcctggaactatgcgccaccctaccccattgcagcaagagccccggaaaatcagttactccagaatccctgaatctgagacagagtctacagcctcagcgccaaactcccctcggacccccctgaccccccctccagccagtggagccagtagcacaacagatgtttgctcggtctttgacagcgatcattctagcccattccactccagcaacgacaccgtctttatacaggtgacactgccacatggaccgcgctccgccagtgtgtctagcattagtcttacaaaaggcacggatgaagtgcccgtgccaccaccagtgcctccaagaagaagacctgagtccgctcccgccgaaagtagccctagcaagatcatgtctaagcacctggactctcctccagccattccaccccgacaaccaacctccaaagcttacagccccaggtactccatcagtgaccgaacttccatcagcgacccacctgaatcccctccattgctgcccccacgtgaacccgtaaggactcccgacgtatttagcagctcaccattacacctccagccaccgcctctcggcaagaagagtgatcatggaaacgcctttttccctaactcaccaagtccatttactccaccgcccccccagaccccatcacctcacgggactaggcggcacctgccttcacccccactgacccaagaggtcgacctgcacagtatagcgggcccccctgtgccaccaaggcagagcacctcacaacacattccaaagttacctcccaagacgtataagagggaacacacccacccgagcatgcatagggatggcccgcccctgctggagaatgcccactcaagttag

SEQ ID NO: 26466 - DNA, 945 bp, synthetic construct
  misc_feature 1..945: note = Description of Artificial Sequence: Synthetic coding sequence
  source 1..945: mol_type = other DNA
atgctgtgccaggcccagccccggagcgccagcgacgtggaggagcgagttcagaagtcctttccccaccccattgataagtgggctatcgcagatgcacagtccgccatcgagaagaggaaaaggaggaatcccctgagtttgccagttgaaaaaatccacccactgctgaaagaagtgcttgggtataagatcgatcatcaggtcagtgtttacattgttgctgtactggaatacatttctgccgatattttaaagttagtaggcaattacgtgcgcaacattcgacactatgaaattacgaaacaagacattaaagtggcgatgtgtgccgacaaagtgctcatggatatgttccaccaggacgtggaagatattaatattctttccttaaccgacgaagagccctccacatcaggggaacagacatactatgacctcgtgaaagcgtttatggccgaaataaggcaatacatcagagagttaaatctgatcattaaagtgtttcgcgagccgtttgtttctaattccaagctgtttagtgcaaacgatgtggagaacatctttagtcgtattgtggatatacacgagttgtccgtcaaactactgggtcacatcgaggatacagtggaaatgactgatgagggaagtccccatcccctcgtgggctcttgcttcgaggatctggccgaagaactggcttttgatccgtatgagagctacgcccgcgatatcctccggcccggattccatgacagatttctctctcagttgtctaagccaggagctgccctttacctacagtccattggcgaaggttttaaagaggctgtccagtacgtacttcctcgacttttgctcgccccagtctatcactgcctgcattacttcgagctgcttaagtttccttttggcgatctatcccgcctacgcgacagtgtgtag

SEQ ID NO: 26467 - DNA, 3153 bp, synthetic construct
  misc_feature 1..3153: note = Description of Artificial Sequence: Synthetic coding sequence
  source 1..3153: mol_type = other DNA
atgaccgacgagggcagcccccaccccctggtgggcagctgcttcgaggacctggccgaagagctggcgtttgacccatatgagagctacgcccgggacattttgaggcccggttttcacgaccgcttcctctctcaactgtctaagcctggcgccgcactgtacctacagagcatcggtgaggggttcaaggaggcagtgcagtacgtattgccgcggctgttgttggcccccgtttaccattgtctccactactttgaattgctcaagcagctggaggaaaagtctgaggaccaggaggacaaggagtgccttaagcaagcaatcacagcgctgctgaatgtgcagagcgggatggagaaaatctgttccaagtcactcgcgaagcggcgactctctgagagcgcatgcaggttttacagccagcagatgaaaggtaagcagctggccattaaaaaaatgaacgaaattcagaaaaatattgacggttgggaaggaaaagacattggacaatgttgcaatgagttcattatggaaggaacgttaaccagagtgggcgccaaacatgagcgtcacatatttctgttcgacgggctgatgatttgctgtaaaagtaatcacggccaaccgcgcctgccaggggcctccaatgcagagtacagacttaaagagaaattcttcatgcggaaggtgcagatcaacgataaagacgacaccaacgagtacaagcacgcctttgaaattattctcaaggatgagaattccgtgatcttcagtgcgaagtccgccgaagagaaaaataattggatggcagcactgatttccctgcagtaccggtcaaccctagaacgcatgttagatgtgacaatgctccaggaagagaaggaagaacaaatgcgactgcccagtgctgatgtgtacaggttcgccgaaccagatagcgaagagaacatcatcttcgaggaaaatatgcagcccaaagcgggcatccccatcattaaggccggcacagttatcaagctgatcgagcgtcttacctatcacatgtatgccgacccgaatttcgtccgcacctttcttacgacctatcgaagcttttgtaagccacaggagctgctttctctgataattgagcggtttgaaatacccgaaccggagcccacagaggccgatcggatcgctatcgagaatggcgaccagcccctcagtgctgagcttaagaggtttcgaaaggagtacatacagccggtgcagctcagggtgttgaacgtgtgccgccactgggtggaacaccacttctatgactttgagcgcgacgcatacttgcttcagcggatggaagagttcatcggcacagttcgcggcaaggccatgaaaaagtgggttgagtcgataactaaaattatccagcgaaagaaaattgcgagggataacggtcctggccataacataaccttccaatctagcccccccacggttgaatggcacatatcaaggcctgggcatatcgagacctttgacttgttgaccctgcatcctatcgaaattgctagacaactcactctgctggagagtgacctatatcgagctgttcaaccatctgaattagtaggaagcgtgtggaccaaggaggacaaggagattaactcacctaacctgctgaaaatgatccgtcataccaccaacttgacactctggtttgaaaaatgcatcgtggagacagaaaacctggaggaacgcgtggcagtggtctcccggattatcgagatactgcaggtgtttcaggaactcaacaatttcaatggggtattagaggtggtttctgctatgaacagttccccagtttaccggctggatcatacgttcgaacaaatccccagccgccaaaaaaagatactggaagaggcccacgagttatccgaggatcactacaagaagtatttggccaagcttcggagtatcaatccgccatgcgtgccattcttcggtatttatttaactaatatcctcaaaaccgaggaaggaaatcccgaggtcttaaagcggcacggcaaggagcttattaatttttcaaaacggagaaaggtagccgagatcaccggggaaattcaacagtatcagaatcagccttattgtctgcgcgtcgagtctgacattaaaagatttttcgaaaatctaaacccaatgggaaacagtatggaaaaggaattcactgactacctgtttaacaagagcctggaaattgagcctcgaaatcctaagcccctgccacggttccctaagaagtattcctatccactgaaaagccccggcgtgaggccctcaaatccacggcccgggacaatgcgacaccccaccccgttgcagcaagaaccccggaagataagttacagcaggatccccgaatcagaaacggagagtactgccagcgcacctaactccccccgaacccccctgaccccccccccggcaagcggcgcgtcgtcaacaacggacgtctgctcggtgtttgatagcgaccattcgtccccattccatagcaggtccgcttcggtatcctctatatccctgaccaaaggaacagacgaagtccccgtgcctccgcccgtccccccaagaaggcggcccgagtccgcgccggccgagtcctccccttccaagatcatgagcaagcacctagactccccaccagctatcccgcctagacaacctacaagtaaagcctactctccccggtactctatctccgaccgaacttctatcagcgatccccctgagtcaccacctttgctgccgcccagagagccagtccgcactcccgacgtgttctcctctagtccactccatttacaaccacccccgctggggaagaagtcagaccacggcaatgcgttttttcccaattcccccagtccctttacaccacctccacctcagacaccttcaccacacggtaccaggcgtcacctcccctccccgccactgacgcaggaagtcgatctgcattctatcgcaggtcccccagtgcctcctcgacaatcaacctctcaacacattccgaagcttcccccgaagacctacaaacgagagcatacccacccgagcatgcaccgagatggtcctcctttactggagaatgcgcacagtagctag

SEQ ID NO: 26468 - DNA, 2358 bp, synthetic construct
  misc_feature 1..2358: note = Description of Artificial Sequence: Synthetic coding sequence
  source 1..2358: mol_type = other DNA
atgagcgaccaggaccacagcatggacgagatgaccgccgtggtgaagatcgagaaaggagttgggggcaacaacggagggaacggaaatggcggcggagcttttagccaggccagaagctcatcgactgggtcgagttctagtactggaggaggtggtcaggaatcccagccaagccctctcgccctgctcgccgccacatgttcacgaattgagtcacccaacgagaacagcaataattcccaagggccctcccaatctgggggcacaggtgagctagatctgaccgccacccagctctcccagggagctaatgggtggcagataatttcaagctcaagtggtgccactcctacctctaaggagcagagcggctccagcactaatggcagcaatggtagcgaatctagcaaaaacaggaccgttagtggaggacagtacgtggtggccgccgcccctaaccttcagaaccagcaggtgctgacaggactgccaggcgtgatgccaaatatacagtaccaagtcatcccgcagttccagaccgttgacggccagcagctccagtttgccgcaaccggagcacaagtgcagcaggacggctctggacagatccagatcattcccggtgctaaccagcagataatcactaatcgtggatcaggtggcaacatcattgctgccatgcctaaccttctgcaacaagcagtgcctctgcaggggcttgctaataatgtgctcagcggccagacacagtacgtaacaaatgtgccagtggccctgaacggaaatatcaccctgctgccagttaattccgtgtcggccgcaaccctaacaccttcttcccaggctgtgacgatcagcagcagtggcagccaggaatccggttcccagccagtgactagtggaactaccatcagctcagcatccttagtttctagccaggcttcaagcagctccttctttactaatgctaactcttattcaacaacaaccactactagcaatatgggcatcatgaattttacgacatccggctcatctgggactaactctcaggggcagacacctcagagggttagtggcctccagggcagcgatgctctgaatattcagcagaaccagaccagtggcggcagcctgcaagctggccagcagaaggaaggtgagcaaaatcagcagactcagcagcagcagattctaatacagccccagttagtacagggtggccaggccttgcaggcgttgcaggctgctccactgagtgggcagaccttcaccacgcaggctatttcccaagagacactccagaatttgcaactccaggccgtgccgaacagtggccctatcattattcgtaccccaaccgtcggccctaacggccaggtcagttggcagaccctccagcttcagaacttacaggttcagaatccacaagcccagacgattacactggctcctatgcagggcgtctcactgggacaaactagcagctctaacaccacactgaccccgattgcctctgccgccagcattccagccggtactgtaacagtgaacgcggcacaactctcctccatgcctggcctccagaccattaacttaagcgcccttggcacctccggaatccaagtccaccccatccagggactgcccctggccattgctaacgcgccaggcgatcatggagcccagcttgggctgcacggtgccggcggcgatggcatccacgacgacacagctggaggagaggagggggaaaacagtccagatgcccagccacaggctgggcgcaggactaggagagaagcttgcacatgcccgtattgcaaggactcagaaggtcgtggaagcggggacccgggcaagaaaaagcaacacatctgtcatatacagggctgcgggaaagtatacggaaaaacgagccatctcagagcacatttacggtggcacactggggaacggccttttatgtgtacctggtcttattgcggcaagagattcacccggagcgatgagttgcaaagacataagcgcacgcataccggcgaaaagaagtttgcatgccccgagtgccccaagaggttcatgcggagcgatcacctctccaagcatatcaagacccaccaaaataagaaaggcggacctggtgtggcgctgtcggtcggcacacttcccctggatagcggcgctgggtcagaaggaagtgggaccgccactccttccgctctgatcacaacgaacatggtcgccatggaagctatatgtcccgagggcatagcccgactggccaactccggcataaacgtcatgcaggtggccgacctgcaaagcattaacatatcagggaatggcttctag

SEQ ID NO: 26469 - DNA, 2337 bp, synthetic construct
  misc_feature 1..2337: note = Description of Artificial Sequence: Synthetic coding sequence
  source 1..2337: mol_type = other DNA
atggacgagatgaccgccgtggtgaagatcgagaagggcgtgggcggcaataatgggggtaatggcaacggaggcggtgccttttcacaggcacgctccagttctactggaagttcaagcagtaccggtggcggcggccaggagtcccaaccttcacctctcgctctgctagccgccacctgctctagaatcgagtccccaaacgagaactcaaacaactctcagggcccgagtcagagtgggggaacaggagaactggatctcacggccactcagctgtctcaaggcgctaacgggtggcagattataagttcatcgagcggcgccacaccaacatcgaaggagcagagcgggtcttccactaatgggagcaacggttccgagtccagcaaaaaccggacagtgagcggcgggcagtatgtggtggcagccgctcctaacctgcagaaccagcaggtactcactgggctgcccggcgtgatgcccaacatccagtatcaggtgatccctcagttccagaccgtagacggccagcagctgcagttcgcggcaacaggtgctcaggtccagcaagatggctcaggacagatccagattattccgggagccaatcaacagatcattacaaacagaggctcaggagggaacatcattgccgccatgccaaatctactccaacaggccgtgccccttcagggtctcgctaataacgtgctttccggccagactcaatacgtgaccaatgtccctgtggccctgaatgggaacattaccctactccctgtcaatagcgtgtccgctgcaacacttacacccagcagtcaggccgtcacaatctctagctcgggatcccaggagtcaggatctcagcctgtgaccagtggcacaaccatctcatcagccagtttggtttcgtcccaagccagcagctcaagcttcttcactaatgccaatagctattcaaccacaacaaccacctctaacatgggcataatgaatttcacaacctccggtagcagcggtacaaactcccaaggacaaactcctcagcgcgtgtccggactccagggcagcgacgctctcaatattcaacagaatcagacttcaggcgggtcactccaagcaggccagcagaaggagggagagcagaatcagcaaacacagcagcagcagattctgatccagccgcagctagtccaaggcggccaggcgctccaggctctgcaagcagcgcctctatctgggcagacctttactacccaggctattagccaagaaaccctacaaaatctccagcttcaagctgtgcccaattctggacctattataatacggacacctactgtgggccccaatggacaggtgagctggcagacacttcaattacaaaatctgcaggtgcaaaacccccaagcacaaactatcactcttgctcctatgcagggcgtgtcactggggcaaacgagctcatcgaacacaaccttgacacctatcgcatctgccgctagcattccagctggtacggtcaccgtgaatgccgcgcagctgtcaagcatgcctgggctgcaaaccatcaacctgtccgcactgggtacatcaggaattcaggtgcatcccattcagggtctgcccctggccattgccaatgcccccggagaccatggcgcacagctgggactgcatggggctggtggagacgggattcacgacgacacagctggaggggaggaaggcgaaaattccccggacgcacagccccaagcaggacgacggaccagaagggaggcctgtacctgtccttactgtaaagactccgagggaagagggagcggcgatcccggcaagaagaaacagcacatctgtcatatccagggctgtgggaaagtgtatggcaaaactagccacctgcgggcacatctgcgctggcacaccggtgagaggccttttatgtgcacatggtcttactgcggtaagagatttacacgcagtgacgaattgcagcggcacaagagaacacacaccggcgagaagaagttcgcctgtcccgagtgccccaaaaggtttatgcggtccgatcacttatctaaacacattaagactcatcagaacaagaagggtggacctggagtcgcactgtcagtggggacactgcctttggatagcggggcaggcagtgagggctcaggaacggcgacccctagcgccctcatcacaacaaatatggtggccatggaggctatctgtcccgaaggaatcgcgagactggctaatagtggaattaatgtgatgcaggtggctgatctgcagtccatcaatatctccggtaatggcttctag

SEQ ID NO: 26470 - DNA, 1413 bp, synthetic construct
  misc_feature 1..1413: note = Description of Artificial Sequence: Synthetic coding sequence
  source 1..1413: mol_type = other DNA
atgagcgcccaggtgctgggcttcctgcggagctggacccccctgccgctggctgctccgcgcggcccggcagccgccgggaacgacgctggggcgccagctgcaactgccccgggcggtgaaggcgagcctcatagcagaccgtgtgacgccaggctgggctcaactgacaaggaactcaaagctggtgccgccgccaccggctctgcccccaccgcgccagggaccccatggcagagggaaccacgcgttgaagtgatggatccagctggtggccccagaggagtgctgccacgcccgtgccgggttcttgttctgctcaacccacgcggaggaaaaggcaaagcactgcagctgttccggtcacacgtgcagcccttgctcgccgaggctgaaatctcattcaccctgatgcttactgagaggcgcaaccacgcccgagaactggtacgaagcgaagagttaggacggtgggatgcactggtggtaatgtcaggggatgggcttatgcatgaggttgtgaacggacttatggagcgccctgactgggaaacggctatccagaagcccctgtgtagcctgccagcaggatccggtaacgcccttgccgcttcgctgaaccactacgcaggctacgaacaggtgactaatgaggacctactcacgaattgtactttgctgctgtgccgccgactgttatcgcctatgaatctactgagccttcacaccgcatctgggttgcgcttattcagcgttctcagcctggcatggggattcatcgctgatgtggacctcgagagtgaaaaataccgccgacttggcgaaatgagattcaccctgggtacatttctccggctggcggcgctacgtacttatagaggcagactggcttaccttcccgtcgggagagtcggctcaaagacaccagccagcccggtcgtggtgcagcagggcccagtggacgcccacctagttcctctcgaggaacccgtccctagccactggaccgtggtgcccgatgaggacttcgttctggtcctcgcacttctccacagccacctagggagcgagatgtttgccgcgccaatgggacgttgtgctgccggagttatgcatctgttttatgtaagagcgggcgtttctagggcaatgctgctgcggctgtttctggccatggaaaaagggaggcatatggagtacgagtgtccctatctggtgtatgtgcctgtggtcgcattcagactggaacctaaggatggcaaaggcgtgtttgctgtggatggcgaactcatggtaagcgaggccgtccagggccaagttcatcccaactacttctggatggtgtccggctgcgttgaaccccctccgtcctggaaaccacagcagatgcctccacctgaggaaccactttag

SEQ ID NO: 26471 - DNA, 1155 bp, synthetic construct
  misc_feature 1..1155: note = Description of Artificial Sequence: Synthetic coding sequence
  source 1..1155: mol_type = other DNA
atggaccccgccggcggcccccggggcgtgctgccccggccctgcagagtgttagtcttgttaaatccaagagggggtaagggcaaggctcttcagctgtttcgcagtcacgttcagccactcttggcggaagccgaaatatcatttactctgatgctcaccgaacgacggaatcacgctcgcgaacttgtccgtagcgaagaattggggagatgggatgctctggtagtgatgagtggggatggtcttatgcacgaggttgttaatgggctgatggaacgacccgactgggaaaccgctattcagaagccactctgttccctgcctgcaggctccggaaacgccctggccgcttccttaaatcactacgctggatatgagcaggtcacaaatgaggacctgctgaccaactgcaccctcctattatgccgcagactcctcagccctatgaacttactgagcttgcacaccgcctctggcctgcgcctattttctgtgcttagcctagcatggggcttcattgccgacgtggacctggagtcagaaaaatacaggcggcttggggagatgcggtttaccttaggtacattccttaggctggcagccctccggacctacaggggcaggctggcctatttgcctgtcggccgggtggggtcaaagaccccggccagcccagtggtggtgcagcagggcccggtggacgcccacctcgtgccgctcgaggaacccgtgccctctcattggacagtggtcccagatgaggactttgttctggtgctggctctgctgcacagtcaccttgggagcgagatgtttgctgcaccgatgggccgctgcgccgctggcgtgatgcatctcttctatgtgcgggcaggagttagccgagctatgctgctccggctctttcttgccatggagaagggacgacacatggagtatgagtgtccctacctggtgtatgtgccagtggtggcattccggcttgaacccaaggacgggaagggcgttttcgccgtggatggagagttaatggttagcgaagcggtgcagggtcaggtacatcctaattacttttggatggtatccggatgtgtcgaacctcccccatcttggaagcctcagcaaatgccaccacccgaagaacctctctag

SEQ ID NO: 26472 - DNA, 1152 bp, synthetic construct
  misc_feature 1..1152: note = Description of Artificial Sequence: Synthetic coding sequence
  source 1..1152: mol_type = other DNA
gagcccaccggcggcccccggggcgtgctgccccggccctgccgggtcctggtacttctgaacccccgaggaggaaaaggaaaagctctgcagctcttccgctcccacgtgcagcccttactggctgaagctgagatttcattcacattgatgctcaccgagcgtagaaatcacgcccgcgaactggtgcgaagcgaggagttggggaggtgggatgctctggtcgtgatgagtggggacggcctcatgcacgaggtggtgaatggactgatggagagacctgattgggaaactgccattcagaaacctctctgtagcctgcccgccggttccggcaatgcactcgctgcctccctgaatcattacgcgggctacgaacaggttactaacgaggatctgttgacaaactgtaccctgctgctttgtcgccgcctcctgagcccaatgaacctgcttagcctacataccgcttctgggttacgcctgttctctgtactctcactggcttgggggttcatcgctgacgtggacctggaaagtgaaaaatatagacggctgggcgagatgcggttcactcttggcaccttcctccggctggccgccctcaggacttacagaggtcgcctagcctatctgcctgtgggtagagtaggaagcaagacaccagcaagcccagtggtcgtgcagcagggccccgttgacgcgcatttagtgccactggaggagcccgtgccgtctcattggactgtggttcctgacgaggatttcgtcctcgtcttggctctgttgcacagtcatctcggaagcgagatgtttgccgcccctatgggccgctgcgcagccggggtaatgcacttgttttacgtccgcgcaggggtcagccgggccatgttgctgcgattgtttctggcgatggagaaaggaaggcacatggaatacgaatgcccatatctggtctatgtgcctgtagtggcattccggttggagcctaaagatggaaaaggtgtgtttgccgttgacggtgagcttatggtctctgaagccgttcaggggcaagtacatcccaattatttttggatggtgtctggctgcgtggaaccgccgccatcctggaaaccgcagcaaatgcccccacctgaagagcctttatag

SEQ ID NO: 26473 - DNA, 1155 bp, synthetic construct
  misc_feature 1..1155: note = Description of Artificial Sequence: Synthetic coding sequence
  source 1..1155: mol_type = other DNA
atggaccccgccggcggcccccggggcgtgctgccccggccctgccgcgtactggtcctgcttaatcccagaggagggaaaggcaaggccctgcagttgttccgaagtcatgtgcagcccctcctagctgaagcagaaatatccttcacccttatgctcacagagagaagaaatcacgctagagaattggtgagaagtgaggaactggggcgatgggacgccctggtggttatgtcaggcgacggtttaatgcatgaggtggtgaacgggcttatggaacggccagattgggagacagccatccagaagcccctctgttccttacccgccggtagcggaaacgccctggccgctagccttaaccactatgccggctacgagcaggttaccaacgaagaccttcttaccaactgtacccttctgctgtgcagacgcctgctttcaccaatgaatctgttatctctgcacaccgcaagcggacttaggctattttctgttctttccttagcgtggggcttcattgctgatgtggacttggagtctgaaaaataccgccgcctgggtgaaatgaggtttacgctcgggaccttccttcgcctggcagctctgaggacatatcgtggtcgattggcgtacctgcccgtgggtagagttgggtccaagacacccgcgtcaccggtggttgtccagcagggtccagtagatgcacaccttgttcctctggaggaacccgtccctagccattggactgttgttcccgatgaggatttcgtactggtgttggcactcctccattcccacctgggttccgagatgttcgccgcgcccatgggtaggtgtgccgctggcgtaatgcatttgttctacgtaagggctggcgtatcccgggcaatgttactgcgactctttctggccatggaaaaagggcgtcatatggaatacgagtgcccctatctggtgtacgtacccgttgtagctttcaggctcgagccgaaagacggcaaaggcgtgttcgcagtcgatggggagctcatggtgtctgaagccgttcaaggccaagtgcacccaaattatttttggatggtgtctgggtgcgtcgaaccccctccttcatggaaaccccaacagatgcctcctcccgaagaaccactgtag

SEQ ID NO: 26474 - DNA, 1197 bp, synthetic construct
  misc_feature 1..1197: note = Description of Artificial Sequence: Synthetic coding sequence
  source 1..1197: mol_type = other DNA
atggaccccgtggtgggctgcggccggggcctgttcggcttcgtgttctctgccggagggccacgcggggtgcttccgcgcccttgccgcgtccttgtccttctgaatccccgcggaggaaaagggaaagccctccaattgttccgaagccacgtgcagccgttgctagccgaagcagagatttcattcaccctgatgttaaccgagcgccgaaaccacgcccgcgagctggtgcggtcagaggagctcggtcggtgggacgccctcgtagtcatgtccggcgatggtctgatgcacgaggtggtgaacggactcatggaaaggccagattgggaaaccgcaatccaaaagcccctctgttctttacccgcaggttcaggcaacgccctggcagcgtctctgaatcactatgctggatacgaacaagtcactaatgaagacctgctcactaattgtaccttgctgctctgtagaagactgcttagcccaatgaatcttctgagcctgcacaccgcttcaggcctgaggctgttttcggtactgtcacttgcttggggattcattgccgacgtcgacctcgagagcgagaagtatagacgccttggcgaaatgcggttcaccctggggaccttccttagactggcagccctcaggacatacagaggtaggctcgcttatctccccgtaggaagagtaggcagcaagaccccagcctctcccgtggtggtgcagcagggtccagtggacgcccatctggtacctctggaggagccagttcctagtcactggactgtggtcccagatgaagattttgtactcgtactggcactgctgcattcacatctgggtagtgagatgttcgcagccccaatgggcaggtgcgccgccggcgtcatgcatctgttctatgtcagggccggagttagcagggccatgctgctccggctgtttcttgcaatggagaagggacgtcatatggagtacgaatgcccctaccttgtatacgtccctgtcgtggctttccgtcttgagccaaaggatgggaagggagtatttgctgtagatggagagttgatggtgtccgaggccgttcagggccaggtgcaccccaactacttctggatggtgagtggttgtgttgaacccccgccctcatggaagccccagcaaatgccacctcctgaggaaccactgtag

SEQ ID NO: 26475 - DNA, 1155 bp, synthetic construct
  misc_feature 1..1155: note = Description of Artificial Sequence: Synthetic coding sequence
  source 1..1155: mol_type = other DNA
atggaccccgccggcggcccccggggcgtgctgccccggccctgcagggttctggtattgctgaacccaagaggcgggaaaggcaaggcactgcaattatttcgctcgcacgtgcagccactgttggctgaggcagaaatttcttttactttgatgctgaccgaacgcaggaaccacgcgcgcgagctcgtacggtccgaggagctggggcggtgggatgcgctagtcgttatgagcggagacggactgatgcacgaagttgtcaacggattgatggaacgcccagattgggagactgccattcaaaagccgctctgttctctcccagctgggtcaggaaatgctcttgcagcatcactgaaccattacgcaggttacgaacaagtaaccaacgaagatctgctcaccaactgtaccctgctgctgtgcagaagacttttgtctcccatgaatctgttgtcgctgcacacggcatcaggactcagactgttcagcgtcctttctcttgcgtggggcttcatcgcagacgtggacctcgaatcagagaaatatcggcgactgggagagatgagattcaccctgggtacctttttgagacttgcagccctgcgcacttaccgcggtaggctggcttacctgcccgtgggacgagtagggtcaaagacaccagcatcccctgtggttgttcagcaaggcccggtggatgcccatctggtgccacttgaggaacccgtgccaagccactggaccgtggtacccgacgaagatttcgtcctcgttctcgccctcttgcacagccatctgggcagcgaaatgttcgccgcgcccatggggaggtgcgctgctggagtgatgcacctcttttacgttagggcaggagtgtcacgagccatgctattaagactctttctggccatggagaaaggcagacacatggaatatgaatgcccatacctggtatatgtacctgtcgtagcatttaggctggagccaaaagacggcaaaggagtgttcgccgttgacggcgagcttatggtctctgaggccgtgcagggccaggtgcatcctaactatttctggatggtgagcgggtgtgtggagccaccgccttcttggaagcctcagcaaatgccaccccccgaagaacccttatag

SEQ ID NO: 26476 - DNA, 1965 bp, synthetic construct
  misc_feature 1..1965: note = Description of Artificial Sequence: Synthetic coding sequence
  source 1..1965: mol_type = other DNA
atgaacggccacctggaggccgaggagcagcaggaccagcggcccgaccaagaattaaccgggtcctggggccacggtcctagatctaccctggtgcgagctaaggctatggccccaccaccgcccccacttgccgctagtaccccccttctgcatggcgaattcggcagttaccccgcccggggcccgagatttgctctgaccttaacctcgcaagccttgcatatacagcggcttagaccgaaaccggaagctagacctcgggggggtctcgtcccactggcagaagtgtccgggtgctgtacactgaggagtcggtccccatcagattctgcggcatacttctgtatttatacctacccaagaggtaggaggggagcccgaagacgcgccacccgcacgtttagggctgatggggcagccacctacgaagagaaccgcgccgaagcacagagatgggccacagctctcacttgcttacttcggggactaccactgcccggggacggagaaattactcccgacctgctccctagacctcctcggctactcctgctcgttaaccctttcggagggcgtggactggcctggcagtggtgcaagaatcatgtgctgcccatgatctcagaggctggtctgtcctttaacctaatccaaactgagcggcaaaaccacgctcgggagctcgtacagggtctgagcttgtccgaatgggacgggattgttaccgtcagcggagacggtctccttcacgaggtgctcaacggactgctcgaccggcccgactgggaagaggccgtgaagatgccggtgggcattctgccatgcggtagtggtaacgccctggccggggcagttaatcaacacggtggatttgagcccgctctgggcctagacctgcttctcaattgctcattactgctgtgtcgcggcggcggccatcccttggacctgctgagcgtcacattggcgtctggtagcaggtgcttcagctttctttctgttgcctggggcttcgtgtcagatgtggacattcagtccgagcgattcagagccctgggatccgctaggttcaccttggggaccgtgctgggtctcgctactctgcacacctatcggggcaggctgtcctacctgcctgcaaccgtagaaccagcctcccctacacctgcgcattcactccccagagctaaatcagagttgactttgactcctgaccccgcccccccaatggcacattcaccacttcacagatctgttagtgatctgccccttcccctcccccagccagcacttgcttcaccagggagccccgaacctttacccatcctgagcctgaacggtggcggaccagaactagccggagactgggggggcgccggtgacgctcccctgagcccggaccccctgctgagctctcccccaggatcccctaaagcagctcttcattccccggtgagcgagggggcccccgtcatcccgccaagctctgggttaccgctgcctacgccggacgccagggtcggcgctagcacctgtggcccgccagatcatttgttgcctccactggggacacctttgccacccgactgggtgaccctggagggagactttgttctgatgctggcaatttcacctagccacctgggtgctgatctagtggccgccccgcacgctcggttcgacgacggtctggtgcacctctgctgggtgcgtagcgggatttcacgagccgcgctcctaaggctgttccttgccatggagcgcggaagtcactttagtctagggtgcccacaattaggttacgctgccgcacgcgctttccggctagagccgcttactccccgtggcgtgctgactgtggacggagaacaggtggagtacggccctttgcaggcccagatgcatcccggaatcggcacccttctcacagggcctcccggatgtcccggaagggagccctag

SEQ ID NO: 26477 - DNA, 1851 bp, synthetic construct
  misc_feature 1..1851: note = Description of Artificial Sequence: Synthetic coding sequence
  source 1..1851: mol_type = other DNA
atggcccccccccccccccccctggccgccagcacccccctgctgcacggcgaattcggctcatacccagcccgggggccccggtttgctctgactcttacctcccaggctcttcatatccagaggctgagacctaaaccagaggcccgccctagggggggcctagtgcctcttgctgaagtgagcggctgctgcactctccgttcgcgctcccccagcgactccgccgcttacttctgtatttacacttaccctcggggccgtcggggagctagacgccgcgctacccgaacctttagagctgatggagccgccacctatgaagagaatagggcggaagcccagagatgggccacagccttgacgtgcttgctgagaggcctgcccttgcctggtgatggagagatcaccccggaccttctaccgcgaccaccccgcctgctgctgttagtgaatccatttggtgggcgcggcctggcatggcagtggtgcaaaaatcacgtcttgccaatgatatcagaagccggactgtccttcaacttaatccagacggaacgccagaatcacgccagagagcttgtccaggggctctcactgtccgagtgggatggtattgtgactgtgtctggcgatggactcctgcacgaggtgttgaacggcctgctggacaggccagactgggaggaagcagttaaaatgcctgtcggaattctgccgtgtgggtccgggaatgctcttgcgggcgcagttaaccagcacgggggccccagctggggtgatagagacccatatatctcccactcagcgaaaccaacagtttcccaggtgaaccaaccggcctgcggcatgctcaccccttcatcctggacatttctcccagcttgttttcctgcagttagtagagcacctagaactctgcccggcatgggtggcactcaggcactgggctcagccagatttaccctcgggacagttctcggattagctaccttgcatacttaccgggggcgtctttcttatttgcctgccaccgtggaacctgcctctcccactccggcccattctcttcccagagcaaagagtgaattgactctgacccccgatcctgcccctccaatggcccattctccattacaccgctcagtgtctgaccttccactacctctgccccagccggctttggccagcccaggatctccagagccgctgcctatcctgtctctgaatggcgggggacctgagctggccggagactgggggggtgccggcgacgcgcccttgagccctgatcctctgttgtcaagccccccaggctcacccaaagccgcattacattcaccagtgtcagaaggggcgccggtgattccaccaagtagtggcctgccgcttcctacccctgatgcccgggtgggtgcatctacatgcggccctcccgaccacctgctcccccctttggggacccccttgccgcccgattgggtgactttagaaggggacttcgtcctcatgctagctatctccccctcgcatcttggggctgacctggtggcagcgccgcacgcgcgatttgacgacggactggtccatctgtgttgggtgaggtccggaatttccagggctgctcttctacgcctttttctggctatggaacggggatcacacttctcgctggggtgtccccagctcgggtacgctgccgcacgggcctttaggctagaacccctgacgccgcgtggagtgctgaccgtggacggagaacaagtggagtatggccctttgcaagcgcagatgcatccggggatcggtacgctcttgacaggaccgccgggttgtcccgggcgggagccgtag

SEQ ID NO: 26478 - DNA, 1884 bp, synthetic construct
  misc_feature 1..1884: note = Description of Artificial Sequence: Synthetic coding sequence
  source 1..1884: mol_type = other DNA
atgaacggccacctggaggccgaggagcagcaggaccagcggcccgaccaagagcttacaggttcctggggtcatgggccacgctctacgctggtgagagctaaagctatggcccctccccccccgcccctggccgccagcactcctctcctccacggcgagtttgggtcttaccctgcgagaggacccagattcgcactgactctgacatcacaggccctacatatacaacgcctccgccccaagcactcagcagcttacttctgcatctacacctatccccggggacgccgcggcgcccggaggcgcgcaacccgtactttccgggccgacggggccgctacatatgaggagaatagggccgaagcccaaaggtgggccactgccctgacttgcctgcttcggggcctgcccctcccaggggatggtgagattacacctgatctcctgcctcggccacccaggctcctgctactggtgaatccattcgggggacgggggctcgcctggcaatggtgtaaaaatcacgtcctgccgatgatctcagaagccgggttaagctttaacctcatccagaccgaacggcagaaccatgctagggagctggtgcaaggcctgagcctgtctgagtgggacggcattgtgactgtaagcggagacgggcttcttcacgaggtgctgaacggcctcctggaccggccagactgggaggaggcagtcaagatgccagtgggtatcctgccatgtggtagcggcaatgcactggccggggcggtgaaccagcacgggggatttgagccagcccttggactcgacctgctacttaactgctccttactgctgtgtagaggcggcgggcaccccctcgaccttctcagtgtaacattggcatcgggctcccggtgcttctcctttctgtctgttgcttggggtttcgtgtctgatgtggatatccagtctgaacgtttccgagcccttggatctgcccggttcacactcggaactgtgctgggccttgccacccttcatacttatcgtggtaggcttagctatcttcccgcaaccgtagaacccgcgtcccctacccctgctcactctctgccaagagccaaaagcgagcttacattaacaccggacccagccccgccgatggcacattcaccgttgcaccgatccgtttcagacctgccactcccactgccccagccagctctggcctccccaggttctcccgagccattgcctattctgtccttgaatggcggagggcccgagctcgcaggtgattggggaggagccggcgatgctcccctgagtcctgaccccctgctgagttcaccaccgggatcgcctaaggccgctctgcatagccccgtaagcgaaggggccccagttattccaccgtcatcggggctcccgcttcccaccccagatgctcgcgtgggggctagcacgtgtggcccacctgaccacttattgccacccctgggcacacccctgccacccgattgggtcacactggaaggcgattttgtgctcatgttggccatttctccatcgcacctgggtgccgatctggtcgccgccccccacgcccggttcgatgatggcttggttcatctgtgctgggtcaggagtggcatctctcgcgcagcactgctgagactgttcctcgcaatggagaggggctctcactttagcttaggatgtccccagctgggatacgcggccgctcgggcatttagactggagcctctgactcctaggggggttcttacggtggatggcgagcaagtggagtacggcccattacaggcacaaatgcaccccggcattggaacgttactgacaggacctcctggttgcccagggcgcgaaccgtag

SEQ ID NO: 26479 - DNA, 150 bp, synthetic construct
  misc_feature 1..150: note = Description of Artificial Sequence: Synthetic coding sequence
  source 1..150: mol_type = other DNA
atgaacggccacctggaggccgaggagcagcaggaccagcggagccctctcacttgttacttagggcgacctggctgcttctattggtccattcctttaggggtcggagcatggcctggatcaggggtgcggacgacgtgttttccatag

SEQ ID NO: 26480 - DNA, 2286 bp, synthetic construct
  misc_feature 1..2286: note = Description of Artificial Sequence: Synthetic coding sequence
  source 1..2286: mol_type = other DNA
atgatcggctgcctgcacgcccgggtgagcggccccctgtgggacgccggactgtgccctgcttctagcagaagcgcacacacctgcttgagcctcagtgttagcgacgcccctgtatctccagctaccgcgccccactgtctgctactgtcaaccgcaccagccccaccctgtccgtgtcacggggttcttaactcacatccctttagccctccgttcccgcagagaccggatcaggagttgacagggagttggggccatggccctaggtctacattagtacgggccaaagcgatggcccctccacccccacctctagctgcatctacgccgctgctccacggagagttcggaagttatcccgcccggggtccccggtttgccctgaccctcacatctcaagctctccatatccagcgactacggcccaagcccgaggctagacccagaggaggcctggttcctctcgccgaagtgtcggggtgctgcacactgcgatccagatcaccttctgatagcgctgcctacttttgtatatacacatatccccgtggccgccgcggcgcgcgccgtcgggcaactcggactttcagggcagatggtgcagctacctatgaggaaaacagagctgaggcccagcggtgggcaacagccctgacgtgcctcttgcgcggcctgcccctccctggggacggggaaatcacgcctgatcttctgcctcgccccccgagactgctcttgctggtcaacccctttgggggtcgcgggctcgcctggcagtggtgtaagaaccacgtgttgcccatgatttccgaggccgggctgagcttcaacctcattcagaccgaaagacagaatcacgctcgcgagctggtgcagggtctctcactctcagagtgggacggcattgtcaccgtaagcggcgacggcctgctacacgaagtgctgaatggcctgctcgaccgccctgactgggaggaggcggtgaaaatgcccgtggggatcctgccctgtggtagcggaaacgccctcgccggcgcggtgaatcagcatggaggattcgagccagcgctcggattggatctgttattgaactgcagtctgcttctttgtcggggtggtggtcaccctctggatctgttgtccgtgaccctcgccagtggaagtcggtgcttctcttttttgagcgtagcatggggcttcgtctctgacgtagatattcagagcgagagatttcgggcgctgggctcggccagatttaccctcggcactgtgctgggcttggctactctgcacacataccgtggaagactaagctatctgcctgctacagtggagcctgccagccctactcctgcacactccctgccacgggccaagagtgagttgactctgacacccgatcccgcccccccaatggctcactcccccctccatagatcggtgagcgacctgccattgcctctgcctcagcctgctctggccagcccaggcagtcctgagccgctgcctatcttaagtctcaacgggggtggaccagagctcgccggtgactggggcggggcgggtgacgcgcccctgagcccagaccccctgctctcctctccaccaggatccccaaaggcagcacttcattcccccgtatccgagggcgcgcctgtgattccaccttcttcaggattaccactacccactcccgacgcccgtgtgggcgcatctacatgcggaccccctgaccacctcttaccacccttgggcacccccctgccacctgactgggttaccttggagggagatttcgtgctgatgctcgcaatatcacctagccacctaggtgcagaccttgtggctgcccctcatgcccgtttcgatgatggcttggtacatttgtgttgggtgcgttccggcatttcacgcgcagccctcctgcgactgttcctcgcaatggaacgtggctcacacttttctcttggatgtccgcagctcggctacgcagcagcccgggccttccgcctggaaccccttacgcctaggggcgttctcacagtggacggggagcaggttgagtacggacccctgcaggcgcaaatgcatcctgggatcgccaggggacggacacaaaccccagctctacccgctgccccggcactgtatggaaggcaacccggcgctgcacatggacttcagcctgtctgtcagggtgctgcactcttctttcataatagctggctttggggatcccaggacctgtttcggattgtgctgaccgaggccgtcggaggctag

SEQ ID NO: 26481 - DNA, 1965 bp, synthetic construct
  misc_feature 1..1965: note = Description of Artificial Sequence: Synthetic coding sequence
  source 1..1965: mol_type = other DNA
atgaacggccacctggaggccgaggagcagcaggaccagcggcccgaccaagaactaactggcagctggggccacggaccacggagtactctcgttcgtgccaaggctatggccccgccccctcccccactggctgccagcaccccacttctgcacggtgaatttggcagctatcctgcccgcggcccacgttttgcgctcaccctaacaagccaggctctccacattcaacgcctaaggcccaagcctgaggcaaggccaaggggcggcctggtcccactcgcagaagtgtcggggtgttgcactctgagatctcggtctccgagcgattccgctgcctacttctgcatctatacctatccaagaggcaggcgcggagcaaggcgaagggccaccaggacctttagggccgatggagccgctacttacgaggagaacagagctgaggcccagcgctgggctactgctctcacttgtctacttcgcggccttccactgcccggggacggggaaatcacgcccgacctgcttccccgaccacctagactcctgctcctcgtgaatccatttggcggcagaggcttagcctggcagtggtgcaagaaccacgtgctcccaatgatctcagaagccgggctgtcattcaaccttatccaaaccgagaggcagaatcacgcaagagaactggtccaaggactgtcactgtccgagtgggacggaattgtgaccgtaagtggtgacggactgcttcatgaggtcctgaacggacttctggacagacccgattgggaagaagccgtgaagatgcccgtcggcatcctgccatgtggctccggcaatgccctcgcaggcgccgtgaaccagcacggtggatttgagcctgctctcggcctcgacctgcttctaaattgctctttgctgctctgtagagggggtggtcaccccctcgacctgctgtccgtgaccctagcctcaggatcccgctgctttagcttcctttcagtagcctggggtttcgtatccgacgtcgacatccagagtgaaagatttcgcgctctcgggagcgcccggttcacactggggactgtgctgggcctggccaccttgcacacctaccgcggtcggctgtcctacctgcctgccacggttgaaccagcatcaccaactccagcccattccctccctagggcaaagtctgagctcacactgactcctgaccctgcaccaccaatggcccatagtcccctacacagaagcgtctcagatctccccctgccattaccacaaccagcactggcaagtcctggtagtccagaacctttacctatcctctcactgaatgggggaggtcccgaattggcgggagactggggaggcgctggtgacgccccccttagccccgatcctctgctcagctcgcctcctggatctcctaaggccgctctgcatagcccagtttccgaaggtgcccccgtgatcccaccatcaagcggcctgccattgcctacccccgatgcccgtgtgggcgccagtacatgcggtccccccgatcacctcctcccccccctcggtaccccgctcccacccgactgggtgacactagagggagacttcgtcctcatgctagcaatttcaccctcgcatttaggggccgatctggtggctgccccgcacgcccgatttgacgatggcctggtgcacttgtgctgggtcagatccggtattagtcgggcagctcttctgcgccttttcctcgcaatggagagaggctcccacttttctctcggctgcccccagctcggatatgctgccgctagggccttcagactggagccgctgacgccgagaggtgtccttacagtggacggtgaacaggttgagtacggcccactgcaagcccaaatgcatccagggattggaactttactcacaggccctccggggtgtcctggacgcgagccctag

SEQ ID NO: 26482 - DNA, 1857 bp, synthetic construct
  misc_feature 1..1857: note = Description of Artificial Sequence: Synthetic coding sequence
  source 1..1857: mol_type = other DNA
atggcccccccccccccccccctggccgccagcacccccctgctgcatggagaattcggatcatacccggctagggggcctaggttcgcactgacgctgacctcacaagccctccacatacaaaggcttcggccgaagcccgaggcccgtccccgcggaggcctcgtccctctcgccgaagtttcagggtgttgcacacttcgcagcaggtcacctagcgacagtgccgcgtatttctgcatttatacatacccgcggggacgacggggggccaggcggcgagcaacccgtacctttcgagctgatggagctgctacttatgaagagaatagagcagaggcccagcgatgggccacagctttgacatgcctcctccggggactaccactgccgggggatggtgagattaccccagacctgctgcctcgtcctccgagactgcttctattagtgaacccctttggtgggcgaggtctggcctggcaatggtgcaagaaccatgttctgccaatgattagtgaagcaggactgtccttcaacctgatccagaccgaacgacagaatcatgcgcgggaactggtccagggtctttccctgtccgagtgggacggcattgtgactgttagcggcgatggactgctccacgaggtcctcaatggcttactagataggcccgactgggaagaagccgtgaagatgcccgttggaatcttaccgtgtggcagtggcaatgccctagcaggggcggtcaaccagcatggaggatttgagccggccctcgggctggacttgctgctcaattgctctcttcttctttgccgtgggggcggacaccctctagatctgctttccgtcacactcgcctccggttctcggtgtttctcttttctaagtgtagcgtggggattcgtgagtgatgtggatattcaatcagagcgatttcgagcacttggaagcgctcggttcaccttgggaaccgttctcggcctggcaacactgcacacttacagaggccgcttgagttacctgcccgccactgtggagcccgcgtcacctactcccgcccattccctccctcgcgccaagagcgagttgactctcacgccagatccggcacctccgatggcacactctccgctccatcggtcggtctcagatctgcccctgcccttaccacagccagccctggctagcccagggagccctgagccactcccaattctctccttgaacggcggcggtcctgagttggctggggattggggcggtgccggcgatgctcccttgagtccggaccccttactgtctagtccaccaggaagtcctaaggccgccctccatagccccgttagtgaaggcgcgcctgtcatccctccttccagcggcctccccttaccaacgccagacgctagggtgggtgcttctacttgtggtcctccagatcatctccttccgcccctgggtacccctttgccccccgattgggtcacactggagggagacttcgtgctcatgcttgccataagccctagtcatctgggcgcggatctggtcgccgctcctcatgcccgatttgatgatggtcttgtgcacctttgttgggttaggagcggtattagcagggcagctttgctgcggctgtttttggcaatggagcgggggtcacatttctctcttggatgtccccaactggggtatgcagcggcgcgcgctttccgcctggagccgctcaccccgaggggcgtgctgactgtagacggagaacaggttgaatacggaccactgcaggcccagatgcatcctggcataggaaccttactgaccgggcctcccggctgccccggaagagagccctag

SEQ ID NO: 26483 - DNA, 1149 bp, synthetic construct
  misc_feature 1..1149: note = Description of Artificial Sequence: Synthetic coding sequence
  source 1..1149: mol_type = other DNA
atgggccccaccagcgtgcccctggtgaaggcccaccggagcagcgttagcgactacgtcaattacgatatcatagtccggcactacaactacactggcaagctgaacatatctgcggacaaggagaattcaatcaaactcacctctgtggtttttatcctgatctgttgcttcattatactggagaatatctttgtgcttcttacaatttggaagaccaagaagtttcacaggcccatgtactactttatcgggaacctggctctgtcggacctcttggccggggtcgcgtatactgcgaatcttctactaagtggtgctaccacatataagcttacacccgctcagtggtttctgagggaaggctcaatgtttgttgcgctttccgccagcgtgttttctctgcttgccattgcgatcgagagatacatcaccatgctgaagatgaaactgcataacggttccaacaacttcaggttatttctgttgatctccgcctgttgggtgatcagcctcatcctaggcgggctgccaattatgggttggaactgtattagtgcactgtccagttgtagcacagtgttgcctctgtatcacaaacactacattctattctgcaccacagtattcacgctactgctgctgtccattgtgattctgtactgccggatctattctctcgtgcggactcggtctaggcggctgacctttcgcaaaaatatatctaaggcctctagaagcagcgaaaagtcactcgcacttctgaaaaccgtcatcatcgtgctgtcagtgtttatcgcatgctgggcccctctttttattctgctacttctggacgtgggatgcaaagttaagacgtgcgatatcctctttagagccgagtacttcctggtgcttgctgtactcaactctggaactaaccccatcatttacactcttaccaacaaagaaatgcggagagcttttataaggatcatgtcatgctgtaaatgcccctccggcgactccgccggtaagttcaagaggccaataattgccggaatggaattcagcagaagcaaaagcgacaattcctctcaccctcagaaggatgagggtgacaacccggaaactattatgagctctggaaacgtgaattctagctcttag

SEQ ID NO: 26484 - DNA, 1353 bp, synthetic construct
  misc_feature 1..1353: note = Description of Artificial Sequence: Synthetic coding sequence
  source 1..1353: mol_type = other DNA
atgggccccaccagcgtgcccctggtgaaggcccaccggagcagcgtttctgactatgttaactacgacattatcgttcggcactataactataccggcaagctgaacatttccgccgacaaggaaaactctatcaagctgactagcgttgtcttcattctgatctgctgttttattatcctagaaaatatcttcgtgcttttaaccatttggaagaccaaaaagttccaccggccaatgtactattttattggtaatctcgccttatccgacctgctcgccggggtggcctacaccgccaacctgctgttgtctggcgccacgacctataagctcacgcctgctcagtggttcctcagagagggttccatgtttgtggccctgagcgccagcgtgttctctctgctagcgatagctatcgaaagatacatcaccatgttgaagatgaagctccacaacgggagtaataattttaggctgttcctcctgatctccgcctgttgggtcatcagcttaatcttaggtggccttcccattatgggctggaattgcatctcagctctctccagctgttcaacggtgttgccactttatcacaagcactatatccttttttgcaccactgtctttacgctgctgctcctgtccatcgtcattctgtattgtcgcatctactctctagttcggacgagaagcaggagactcacgttccggaagaacattagcaaggcgagcagaagctcagagaaaagcctcgccttacttaagaccgtgatcatcgtgcttagtgtgttcatcgcttgttgggctccactgttcatcctcctgctgttagatgtcgggtgcaaagtcaagacctgcgatattttatttcgcgccgaatactttctagtgttggctgtcctgaattcagggactaaccccatcatttataccctgactaataaagagaccctactggccaactcttccgacccctcctcccccgcctggaactcggccgctgccaaccggacgatccccccaaccccccggaagaccaaaggtacgacccaaaggcccttgtgcttactggagacgagcaccctgctgccacgtactggcagttgtccacccacaggctcagccctctatctagtggctggccaccctagcgtgtggaagaagatatctgggcttaggctccttcctggacgcagttgctgcaaacccgagggcggcagaggcaggatccggaccgcctggtggtgtcgtgtgctcgtggggagagtgtcatcttgtgaacagtgcacaggtaaaggtggagatcaagtcccagcttggaacatattcagcacacccttggagctatag

SEQ ID NO: 26485 - DNA, 726 bp, synthetic construct
  misc_feature 1..726: note = Description of Artificial Sequence: Synthetic coding sequence
  source 1..726: mol_type = other DNA
atggccaccctgaaggaccagctgatctacaacctgctgaaggaggagcagactcctcaaaataaaataactgtcgtgggtgtgggggctgtcggaatggcctgtgcgattagcattcttatgaaagacttagcagatgagctggccctggtagatgtcatcgaagataaactcaagggggagatgatggacctgcaacacgggtctttgttcctgaggacaccgaagatagtatcaggcaaggactataacgtgaccgctaacagcaagctcgtgattattaccgcaggcgctcgtcaacaagaaggggagtcgcgccttaacttagtgcagagaaacgttaatatctttaagtttatcatccccaacgtagtgaagtacagccccaactgtaagctgttaatcgtaagcaacccagtagacatcctgacatatgtcgcatggaagatctctgggttcccgaagaacagagtaatcggaagtggatgtaaccttgattcagctcgatttaggtacctgatgggcgaacggctgggcgtacaccccctgtcttgccacgggtgggtgctaggcgaacacggtgatagctcagtcccagtgtggtccggcatgaacgtggctggggtaagccttaaaaccttgcaccccgatctcggaacagacaaagataaagaacagtggaaggaggttcacaaacaggtggtggaacgcgtctttacagaatag

SEQ ID NO: 26486 - DNA, 813 bp, synthetic construct
  misc_feature 1..813: note = Description of Artificial Sequence: Synthetic coding sequence
  source 1..813: mol_type = other DNA
atgctgcaggcctgcaagatggagggcttccccctggtgccccccccttcagaggatctggtgccgtatgatactgatttgtatcaacgtcagacccatgaatattacccatatctatcgagtgatggggaaagtcattcagaccattactgggacttccaccctcaccatgttcattccgaattcgagagtttcgccgagaacaattttacagagctccagagtgtacaacccccccagctgcaacaactttaccggcacatggagctagagcaaatgcatgttttagatacgccgatggtccctccacatccatctcttggccaccaggttagctacctgccccgcatgtgtctacaatatcccagcctttcacctgcccaaccctcatccgacgaagaggagggggagcgacagtcaccccccctggaagtctccgatggagaggcagatggcctggagcccggccctggtctgttgcccggggagaccggtagcaagaaaaagattagactatatcagtttttgctggatctgctgcggagcggtgacatgaaggattccatctggtgggtagataaagataaaggaacatttcagttttcgtccaaacacaaagaggccctggcgcataggtggggcatccagaaagggaatagaaaaaagatgacttaccaaaaaatggctagagcgctccgtaactacgggaaaaccggcgaggttaagaaggtcaaaaaaaagttgacatatcagtttagtggagaagtactcggacgcggcggtctcgctgaaagaaggcaccccccccattag

SEQ ID NO: 26487 - DNA, 2403 bp, synthetic construct
  misc_feature 1..2403: note = Description of Artificial Sequence: Synthetic coding sequence
  source 1..2403: mol_type = other DNA
atgggcagcagcaagaagcaccggggcgagaaggaggccgccggcacaacagccgctgcgggcacaggaggcgctaccgaacagcccccaagacatagggaacacaaaaagcacaagcacaggtctggagggtcggggggctccgggggagagcgcaggaaaagaagccgtgagaggggaggcgagcgcggaagtgggagaagaggagctgaagccgaggcccggagttctacccatggacgtgagcgaagtcaagctgagccctccgaacgtcgggtcaagcgagagaaacgggatgacgggtatgaggctgctgcgagttccaaaacgagctctggcgacgcctcctctctctcaattgaagaaacaaacaagttgcgcgctaagctggggctgaagcctctggaagtgaacgcaatcaaaaaggaggctgggactaaggaggaaccagtgaccgccgacgtcataaatccgatggcattgcgacagcgtgaagagttacgggagaagctggcagccgccaaggagaagaggcttctgaaccaaaaattggggaagatcaagaccctgggggaggacgacccctggcttgacgacaccgctgcatggatcgaaagatctaggcagctacagaaggagaaggatttggctgagaaaagagcgaaactgttagaggagatggatcaagagtttggggtgtcgactcttgttgaggaagagtttggtcagcgtcgccaggatctgtactccgctagggatctgcagggcctgaccgtcgagcacgccattgactcttttcgcgaaggtgagaccatgatacttacgttaaaggataagggagtactccaggaagaagaagatgtcctcgtaaatgtgaacctcgtagataaggagcgggctgagaaaaacgtcgaactgagaaagaaaaaacctgactacttaccatacgccgaggacgagtccgttgacgatcttgcccaacagaagcctcggtctatcctatcgaaatacgacgaggaactggaaggcgagagaccccacagctttagactcgaacaagggggtacagccgacggtctacgggagagggagctggaagagatacgcgccaagttacgcttacaggcccagtcactgtccactgtcggaccccgcctagcctccgaatatttaacacctgaggaaatggtgacgtttaaaaagactaaacgcagagttaaaaagataagaaaaaaagaaaaggaggttgtggtgagggccgacgacctgcttccgctcggagatcagacgcaggacggcgatttcggcagccgactcaggggcaggggacggcgccgggtgagtgaggtggaagaggagaaggagccagtgccccagcctttgcccagcgatgacacaagagtagaaaacatggatatctccgatgaagaagagggaggtgcgcccccacccggtagcccccaggttctcgaagaggatgaggcagagttagagctccagaaacagctggaaaaaggccgccgcctcaggcaactccaacagctgcagcagctcagggactctggagagaaagtggttgaaattgtaaaaaagctggaatctagacaacgcggctgggaggaagatgaggatccagagcgtaagggtgcgatcgtgtttaatgccacctccgagttctgcaggaccctgggcgagatccccacctacggtctggccgggaacagggaagagcaggaggagcttatggatttcgagcgtgacgaagagcggagcgctaacggtggctctgaatcggacggagaagaaaacatcggatggtcaactgtgaacctcgacgaggagaaacagcagcaagacttttcagcatcttctacaacaatcctggacgaagagccgatcgtcaatcggggccttgccgcagctctcctgctatgtcaaaacaaaggacttctggaaactactgtccaaaaggtcgcccgcgtcaaggcacctaataaatcactcccctccgccgtgtactgcatcgaagataagatggccatcgacgacaagtatagccgacgggaggaatatagaggattcacacaggactttaaagaaaaggatggatataagcctgatgtgaaaattgagtacgtcgacgagactggtcgtaaactaacccctaaggaggcctttagacagctgagccatcggttccacggtaagggtagtggcaaaatgaagacagagcggcggatgaaaaaactggatgaggaggccctcctcaagaaaatgtctagctcggatacaccactgggtaccgtagctttgctgcaggagaagcagaaggcgcagaagacaccttacatcgtactatccggctctgggaagagcatgaacgcgaacaccataacaaaatag

SEQ ID NO: 26488 - DNA, 1929 bp, synthetic construct
  misc_feature 1..1929: note = Description of Artificial Sequence: Synthetic coding sequence
  source 1..1929: mol_type = other DNA
atggccctgcggcagcgggaggagctgcgggagaagctggccgccgctaaggagaaaagactcctgaatcaaaagctgggcaagattaagaccctgggagaagatgatccctggctcgatgacaccgccgcatggatcgagagaagtcgccaactgcagaaggagaaggatctggcggaaaaacgagccaagctgctagaagagatggatcaagagttcggagtatccaccctagtggaagaggaatttgggcagcgccggcaagacctgtactccgcacgggatctgcagggattaactgttgagcacgccatcgatagcttcagggaaggcgagactatgatccttacacttaaggacaaaggagtcctccaggaggaggaggatgtgctagtgaatgtcaacctggtagacaaggagcgcgccgaaaagaacgtggagttacggaagaagaagccggactatcttccttatgcagaagacgaatctgtcgacgaccttgcgcaacagaaaccgcgatctatcctgtccaagtatgacgaagaattagagggcgaacgtccacactcgttccggctggagcaaggcgggacagccgatggtctgagagagcgggagctggaggagattagagctaaattgcggctccaagcacaaagtttgtccaccgtaggccctagactggcctcagagtacttaacgcccgaagagatggtgaccttcaaaaaaactaagaggagagtgaaaaaaattcgaaagaaggagaaggaagtcgtggtcagagccgatgacctcctgccgttgggggaccagacccaagacggtgacttcgggtctcggttgaggggcagaggacgtaggcgtgtttctgaggttgaagaagaaaaggaaccagtcccacaacccctgccctccgacgataccagagtggaaaacatggatatcagcgacgaggaggaaggaggcgcccccccccccggatccccccaggtgctggaggaagacgaagctgaattagagctgcaaaaacagttagagaagggcaggaggctgcgccagctacagcagcttcagcagctgagagatagcggggaaaaagtggtcgaaatcgtgaagaagctcgaaagccgccagagaggatgggaggaggatgaggacccagagcgtaagggcgccatagtgttcaacgccacaagcgaattctgtagaacgttaggggagatcccgacgtatggactggccgggaatagagaggagcaggaggagctcatggactttgagagggatgaggagcggtccgctaacgggggctctgagagcgatggcgaagagaacatcgggtggagtaccgtgaatctggatgaagaaaaacagcagcaggacttctctgcttctagcaccactattctggacgaggaacctatcgtgaaccggggacttgctgccgcactgcttctctgccagaataaaggattactggagactaccgtgcagaaagtggcgcgggttaaagctccgaacaagtccctgccttccgccgtatactgcatcgaagataagatggcaatcgacgacaaatacagcaggcgcgaagagtatagaggatttacccaggacttcaaagagaaagacgggtacaagcccgacgtcaaaatcgagtacgtagatgaaaccggcaggaaattaacccctaaagaagcatttcgtcagctctctcaccggtttcatggaaagggttctgggaaaatgaaaactgagcggcgaatgaagaaattggacgaggaagcccttttgaagaaaatgagcagctccgatacaccgctgggaacagtggcactcctgcaggagaaacagaaggctcaaaaaacgccctatatcgtgctgagcggttcggggaaatctatgaatgctaataccattacaaagtag

SEQ ID NO: 26489 - DNA, 4392 bp, synthetic construct
  misc_feature 1..4392: note = Description of Artificial Sequence: Synthetic coding sequence
  source 1..4392: mol_type = other DNA
atgaagaagaagaccgtgtgcaccctgaacatgggcgacaagaagtatgaagacatggagggtgaagagaatggggacaacaccatctccactggcctactctactcagaggctgataggtgtcccatctgtttgaactgtctgcttgagaaggaagtgggtttccccgaatcttgcaaccacgttttctgcatgacctgcattctgaagtgggcggaaaccttggcttcatgccctattgacaggaaaccgttccaggccgtttttaagttctcagccctggaggggtatgtcaaggtgcaggtgaaaaaacagctgagggaaaccaaagataagaaaaacgagaactcattcgagaagcaggtgtcttgccacgaaaactcgaagagctgcatcaggcgtaaggccattgtgagagaagacctgctgtcagcaaaggtgtgtgacctaaaatggatccaccgcaatagtctatatagcgaaacaggcggcaaaaaaaacgccgcaatcaagattaataagccacagaggagtaactggagtaccaaccaatgctttcgcaattttttcagcaatatgttcagtagcgtctcccattcgggggagagttcgttcacctatcgcgcttactgtaccgagtttatcgaagcctctgaaatctctgctttgatcagacaaaagagacacgagcttgaactgagctggttccctgacaccttgccgggtattggacgcatcggctttataccttggaacgtcgaaacagaggtcttgcccttgatttcctcggtcttaccccgaactatctttccgacctccacgatcagttttgagcactttgggacaagctgtaaaggttacgccctggcccatacccaggagggcgaggaaaagaaacagacttcaggcacaagtaacactcgcgggtctcgtagaaagcccgctatgacaactcctacacgaaggtctacgagaaataccagggcagaaaccgctagccagtctcagcggtcccctatttcggacaactccggttgcgacgcgccaggcaattctaatcctagcctgagcgtgccctccagcgccgagtctgagaagcagacacggcaggctcccaagaggaagagcgtgcgacgagggcggaagccccctctgttgaaaaagaaactaaggtccagcgtggccgccccagaaaaaagctcctcaaatgattccgtagacgaggagactgctgagtcggacacgtcgcccgtcctcgagaaggagcatcagccagacgtggacagtagtaatatttgcacagtacaaacccatgttgagaaccagagcgctaattgcctgaagtcttgcaacgaacaaatagaggagtccgagaaacacactgcaaactacgacaccgaagagcgcgtaggcagcagctcctcagagagttgcgcacaggatttacccgtgctggtgggcgaagaaggagaagttaagaagctggagaacactggaatcgaagctaacgtcctttgcctggagagcgaaatcagcgagaatatactggagaagggaggcgatccactggagaaacaggatcaaatcagcggactgagccagtctgaagtgaaaactgatgtgtgcacagttcaccttcctaatgattttcccacttgtctgaccagtgaatcaaaagtgtaccagccagtgtcctgtccgttaagcgacctctccgaaaacgtcgagtcagtggtgaacgaagaaaagatcacggaatctagtttagtggaaattaccgaacacaaggacttcactctgaaaacagaagagcttatcgagtcccctaagctggaaagtagcgagggagagatcatccaaaccgtcgacagacagtcagtaaagtccccagaggtacagctactgggtcatgtagaaactgaggacgttgagattattgcgacatgcgacactttcggcaatgaggactttaacaatatacaagattccgagaataacctccttaaaaataatcttttgaatacaaaactggagaagtctttggaggagaagaatgagagccttaccgagcaccctagaagtactgagttaccgaagacccatattgaacagatccagaaacatttctcggaagacaataacgagatgatcccgatggagtgtgatagcttttgctcagatcagaacgaatctgaggtcgaaccctcagtgaatgctgacctcaaacagatgaacgaaaatagcgtgacccactgtagtgaaaataatatgccctccagcgacctggccgacgagaaagtggagaccgtctcccagccttctgagagtcccaaagacaccatcgataagacaaaaaagccccgcaccagaaggagtcggttccatagccctagtacgacctggtcacccaacaaagacacaccacaagagaagaaaaggccacagtcacccagccctcgccgcgagactggcaaagaatcaaggaagagccagagtccatccccaaagaacgaatctgctagaggcaggaaaaagtccagatcgcagtcccccaaaaaggacatagccagagaacggcgccagtcccagagtcggagccccaagagggacactaccagggaaagcagaagatctgaaagccttagcccccggagagagacttcacgggagaataagaggtctcaaccaagagtgaaggatagctctcctggagagaagtctagaagccaaagcagagaaagagagtcagaccgggatggacagagacgtgagcgcgagcggcggacaaggaaatggagtcgaagtcgaagccactcccgcagtccatcaaggtgtagaactaagagcaaatcgagttcattcgggagaatagatcgcgattcctattccccaaggtggaaggggagatgggctaatgacggctggcggtgcccgaggggcaacgataggtaccggaagaatgaccccgaaaaacaaaacgaaaacacacggaaggagaaaaacgatatacatctggacgctgatgaccccaattcagcggataagcaccggaacgactgtcctaactggatcacagaaaaaatcaactcaggccctgatccaagaaccagaaaccccgagaagttgaaggaatcacactgggaagaaaacagaaatgaaaattctggaaattcttggaataagaactttgggagcggatgggtgtccaatcggggacgagggcgaggaaatagggggcgtggaacgtatcggagcagctttgcttacaaggatcaaaatgagaatcgctggcagaatcgcaagcccctttctgggaactccaattcgagtggttctgagagcttcaaattcgtagaacagcagagttataagcgtaagagcgagcaggaattttcttttgatactccggccgaccgcagcggctggacctcagcgtcatcatgggcagttagaaagacccttcctgccgacgtccagaactattattcccggcgggggcgcaacagctctggcccacagagcggatggatgaaacaggaagaagagacctcagggcaggattcatccctgaaagaccaaactaaccaacaggtagatggatcacagctgcctattaatatgatgcagcctcagatgaacgtgatgcaacagcagatgaacgcccagcaccagcctatgaacatctttccatatccagtaggcgtgcacgctccactgatgaatattcagagaaatcccttcaatatacatccccagctgccgctccatctgcatacgggagtgcccctcatgcaggtcgctacccctacgtcggtgtcccagggcctccctcccccacctccacctcctcccccatcccagcaggtgaattacatcgcctcacagcctgacggaaaacagctgcaaggtatccccagctcaagccacgtgagtaataacatgtctactccggtgctgccagccccaacagccgcccctggaaatacaggtatggttcaagggcctagcagcgggaatacatcaagcagctctcatagtaaagcaagtaatgccgccgtgaagctggcagagagcaaagtgtcggtagctgtggaagcctcagctgactcatctaaaactgacaagaagttacaaatccaagaaaaggccgcacaggaggtgaaacttgcaataaaaccgttttaccagaacaaagatattacaaaggaagagtataaggaaattgtccggaaagcagtggacaaagtatgtcacagtaagtcgggagaggtcaactccaccaaggtcgccaatctggtgaaagcttacgtggacaagtacaagtattcccggaagggtagccagaagaagactcttgaagaacctgtatccaccgaaaaaaatataggatag

SEQ ID NO: 26490 - DNA, 4392 bp, synthetic construct
  misc_feature 1..4392: note = Description of Artificial Sequence: Synthetic coding sequence
  source 1..4392: mol_type = other DNA
atgaagaagaagaccgtgtgcaccctgaacatgggcgacaagaagtacgaagatatggaaggtgaagaaaatggggacaataccatttctacgggactgctatacagtgaagccgaccgttgccccatttgtttaaactgcctgctcgaaaaggaggtcggctttccagagtcttgtaaccatgtgttttgcatgacttgcatcctgaaatgggctgaaactctggcatcctgtccaatcgatcgtaaaccttttcaggcagtattcaaattctccgctcttgaaggatacgttaaggtacaggttaagaagcaactgcgcgaaaccaaagataaaaagaatgagaactctttcgagaagcaagtgtcctgccacgagaattccaaatcttgcattcgccgcaaggccatcgtgcgcgaggatcttttaagtgctaaagtgtgtgacctgaagtggattcaccgaaactcactgtactcagaaaccggaggcaagaaaaacgcagctatcaaaattaataagcctcagagatctaactggtccaccaaccagtgttttcgcaattttttttctaatatgttctcctctgtgtcgcactcaggcgaatccagcttcacctaccgggcttattgtactgagttcatcgaggcatcagaaatctcggccttgattaggcagaagcgccacgagctcgagctcagttggttccccgacaccttgccagggattggaagaatcggatttatcccatggaacgtggaaacagaggtgttgcccctgatttcctcggtgctcccccggactatatttccgacttctactattagctttgagcactttgggacaagttgtaaaggttacgcactggctcacacccaggagggggaagaaaagaagcagacatcgggtactagcaatacaaggggtagccggcgtaaaccggccatgacgacacctactcgcaggtccactcggaacacccgcgcggagacggcatcccaatcacaacggtcacccatttccgacaatagtgggtgcgacgctccagggaattcgaatccatcactcagcgtaccgagctcggcagagagcgaaaaacaaacgcgacaagctcccaagaggaagtcagtcaggcggggcagaaagcccccactcctcaaaaaaaaattgcgatcatctgttgcggctcctgaaaagtcaagctcaaatgacagcgtagatgaagagacagcggaatccgatacctccccggtcctcgaaaaggaacaccagccggacgtggactccagcaacatctgcacagtccagactcatgtcgagaaccaaagtgccaactgcctcaagtcatgcaatgagcagatagaagagagcgaaaaacacacggccaattatgataccgaggagcgagtgggttctagttcttctgaaagttgcgcccaggacctacctgtactggtcggggaagagggcgaagtaaaaaagttagaaaacactggcatagaagctaatgtgctgtgtctggagtccgagattagtgaaaacatactggagaagggaggagacccccttgaaaagcaggaccaaatctccggcctgagccaatcagaggtgaaaactgacgtgtgtactgtccatctaccaaatgactttcccacctgccttacgagtgagagtaaagtatatcagcctgtgtcctgcccactgtcagacctgtcagagaacgtggaaagcgttgtaaatgaagagaagatcacagaatctagcctggttgaaatcactgaacacaaagattttacgctgaagacagaagaactgatagaatctcctaaactagaatcctccgagggcgagataatccagacagtcgatcgccagtcagtgaagtctccggaagtccaactgttgggtcacgttgagactgaggacgtcgaaattatcgccacgtgcgatactttcgggaacgaagactttaacaacatccaagacagtgagaataacctcctcaagaacaatctcctgaataccaaattggaaaagtcactcgaggagaagaatgaaagcctgaccgagcacccccgtagcaccgagctaccgaagacgcacatcgaacagatccaaaagcatttctccgaggacaataacgagatgatacccatggaatgtgatagcttctgtagcgatcagaacgagagcgaggtcgaaccctctgtgaacgctgaccttaagcagatgaatgaaaattctgtcacgcattgtagcgaaaacaatatgccatcctccgatctcgcagatgaaaaagtggagaccgtgtcccagccctcagaaagccccaaagatactattgacaaaacaaaaaaaccccgtaccagacgatcgagatttcacagcccatcgacaacatggtctccaaacaaagacactccccaggaaaagaagagacctcaatcacccagtccacggagagagacagggaaggaaagccgcaagtctcagagcccctcccctaagaacgaaagcgcccggggacggaagaagagcagaagtcagtcacccaagaaggatatagcaagggagcgccgccagagccagtctcggagccccaaaagagatactacgagggaatcgagaaggtccgaaagcctgagtccacggagagagacatctcgcgagaacaagaggagtcagccccgagtgaaggacagttctccgggcgagaagtctcgctcccagtccagagagcgcgaaagcgatagggatggacaaaggcgtgaacgcgagcggcggaccagaaagtggtctcgctccagatctcattcaaggtcaccttcccgatgcaggaccaagtcaaaatcaagctctttcggtagaatcgaccgcgatagctattcaccccgctggaagggtaggtgggccaatgatgggtggcgatgccccaggggtaatgacaggtaccgaaagaatgatccagaaaagcagaacgagaatacgagaaaggagaagaatgacatccatctcgatgccgacgatccgaattctgcggacaagcaccgaaacgactgcccgaactggatcaccgaaaaaattaactccggtccagaccccagaacaagaaatcccgagaaactcaaggagtctcattgggaggagaatcgaaacgagaatagcggcaactcctggaataagaattttgggtccgggtgggtctccaataggggtcgcggccgggggaacaggggaagagggacatatagatctagtttcgcttataaagatcagaacgagaatcgatggcagaaccgcaagccactctccggaaactccaattcgagcggttccgaatcatttaagtttgtggaacagcaatcctacaagcgaaagtccgagcaggagttcagcttcgacacccctgccgatcgctctggatggacttcagcatccagctgggccgtcagaaaaacacttccagccgatgtgcagaattattactcccgacgaggcagaaatagttcaggccctcagagtggatggatgaaacaggaagaggagacctctggacaggactctagcctgaaggatcagaccaaccagcaggtagacggaagccagctgcctataaatatgatgcaacctcaaatgaacgtgatgcagcagcaaatgaacgcacagcaccagcccatgaacatctttccttatccagtcggggttcacgctcctctgatgaacatccaaagaaaccccttcaatatacacccccagctgccactgcaccttcatactggcgtgcccctgatgcaagtcgctactcctacctccgtgtcacagggattgcccccccctcctcctccaccccccccgtcacagcaagtgaactacattgccagtcagcccgacggcaagcagttgcaaggcattccatcctcatcccacgtctctaataatatgagcactcccgtgcttcctgctcctaccgctgctcctggcaacactggtatggtgcaggggccttcctctggaaacacgtcctcaagttctcacagcaaagcaagcaatgccgcagtcaagttagctgagagcaaggtatccgtggccgtggaggcttccgcagacagctctaagacagataaaaagctccagatccaggagaaggcagctcaagaagtgaagttagcaattaaaccattctaccagaacaaggacatcactaaggaagaatacaaagaaatcgttaggaaggctgtcgacaaggtctgccacagtaaatccggcgaggtgaatagcaccaaggttgccaaccttgtcaaggcatacgttgacaaatataaatacagcagaaaaggctctcagaaaaagactcttgaggagccagtttctacagagaaaaacatagggtag

SEQ ID NO: 26491 - DNA, 3447 bp, synthetic construct
  misc_feature 1..3447: note = Description of Artificial Sequence: Synthetic coding sequence
  source 1..3447: mol_type = other DNA
atgaccacccccacccggcggagcacccggaacacccgggccgagactgcatcacaatcccagaggagcccaatatccgacaactcaggctgtgatgccccaggtaatagcaacccttccctgtccgtcccctccagtgctgagagcgaaaaacaaacccgtcaagcacctaagagaaagagcgttagaagaggcagaaagccacccctgctaaagaaaaaactgcgctccagcgtggcagcccctgagaagtcctctagcaatgattccgtcgatgaagaaactgcagaaagtgacacatcacccgtgctcgaaaaggaacaccagcccgacgtggattcctcaaatatctgcactgttcagacacacgtagaaaatcaatctgctaactgtttgaaaagttgcaacgagcagattgaggaatctgaaaaacataccgcaaattatgacacagaggaaagggtgggatctagttctagcgagtcttgcgctcaagacctccccgtcctcgttggcgaggagggtgaggtcaagaaactggagaatactggaatcgaagccaacgtgttgtgtctggagagtgaaatcagcgagaatatactggaaaaagggggggacccattagagaagcaagaccaaatcagcgggctgagccagtctgaggttaaaaccgatgtgtgtaccgtccacctgccaaacgactttcccacctgccttactagcgagagcaaggtataccagcccgtctcatgccccttgtccgatttatctgagaacgtggagtccgtcgtgaatgaggagaaaattactgagtcaagcttggttgaaattacagagcacaaggacttcacgctcaagaccgaggaactgatcgagagtcccaaacttgagtcttccgagggagagatcatacagaccgtcgatcgacagagcgtgaagtcccccgaagtgcagctactcggccatgttgagaccgaagacgtggaaatcatcgccacctgtgacacgtttggcaacgaggactttaataacattcaagactcagaaaacaacctgctgaagaacaaccttcttaataccaagttggagaaatccctcgaggaaaagaacgagtctctgacagagcaccctagaagcactgagctgccaaaaacccatatcgagcagattcaaaagcacttcagcgaggataacaatgaaatgattcccatggagtgcgactccttttgctccgaccaaaacgaaagcgaggtcgagccaagcgtcaatgcagatctcaagcagatgaacgagaatagcgtcacccactgcagcgaaaataatatgcctagctccgacctggctgacgaaaaggttgaaaccgtgtcccagccatcagagtcacccaaagatacaatcgacaaaaccaaaaagcccagaacacgccggagccgctttcacagtcctagcaccacctggtcccctaataaggacacaccacaggagaagaagcgtccccaatccccatccccgaggagagaaacggggaaggagagcagaaagtctcaatcaccgagtcccaaaaatgagtccgctcggggaagaaaaaagagccggtcccagagcccaaaaaaggatattgctcgggagcgcagacaatcccagtcccggtccccaaagcgagacactactagggagtcaaggagatctgaatccctctctcctagacgggagacctctcgggagaataaacgaagtcaaccacgtgtgaaagattccagccccggggagaaatccagatcccagagccgggaaagagagagtgatagggacgggcagcggagagagagagagcggcgcacgagaaagtggagccgatccagaagtcatagccgctctccttcgaggtgcaggaccaagtcaaaatcatcaagttttggtaggattgaccgcgattcctattctccaaggtggaaaggccgttgggcaaatgacggatggcgttgtccccggggcaacgaccgatatcgcaagaatgacccagagaagcagaatgagaatacacggaaagagaagaacgatatccacctcgacgccgatgaccctaatagcgcagacaagcatcgaaatgattgtcctaactggattaccgaaaagatcaacagcggacccgacccgaggactcgcaatcccgagaagcttaaggagagccactgggaagaaaaccggaatgaaaattcaggtaactcttggaacaagaacttcgggtctggatgggtgtccaacaggggccgcgggcgcggtaacagaggtagaggaacttacaggtctagcttcgcctacaaagatcagaacgagaacagatggcaaaacaggaagcccctgtccggtaattctaactcctccgggtccgaaagttttaaatttgtggagcagcagtcctacaagcgtaaatcagagcaggaattctcatttgacactcccgcagaccgctccggttggacctcggcctcttcctgggccgtccggaagaccttgccagcagatgtgcagaattattattctcgcagaggacggaattcctcagggccacagtctgggtggatgaagcaggaggaggagaccagcggccaggacagcagcctcaaggaccagacaaaccaacaggtggatgggtcccaactgcccataaatatgatgcaaccacagatgaacgtgatgcagcagcagatgaacgctcaacaccagccaatgaacatattcccttatcctgtcggcgttcacgccccgttgatgaatattcaaaggaaccccttcaatatacatccccaactgcccctacacctccacaccggtgtccccttgatgcaggtggctacacctaccagcgtttcacaaggcctgcctcccccccctcctccaccccccccctctcaacaggtgaactatatcgcctctcagcccgatggcaagcaactccagggaatccccagctcgagtcatgtgtctaacaatatgagcaccccggttctgcctgctccgacagctgccccaggaaacacaggaatggtgcaagggccctcttcaggaaatacaagttcatccagccactccaaagcatcaaatgccgccgtgaagttggctgaatctaaagtttctgtagcggtggaggctagcgccgatagctcaaagaccgataagaagctgcagatccaagagaaagccgcacaagaggtgaagctggcgataaaacccttctaccaaaataaggatattacgaaagaagagtacaaagagattgttaggaaagccgtggacaaagtttgtcattctaagagtggggaggtgaactctacaaaagtggcaaacctggtcaaagcatacgtggacaagtacaaatattcaagaaaaggatcacagaagaagacattggaggaaccagtttctaccgagaagaatatcgggtag

SEQ ID NO: 26492 - DNA, 1401 bp, synthetic construct
  misc_feature 1..1401: note = Description of Artificial Sequence: Synthetic coding sequence
  source 1..1401: mol_type = other DNA
atggccgaggagcaggacctgagcgaggtggagctgagccccgtggggtctgaggaaccgaggtgcctcagcccaggctccgctcctagtctggggccagatggcggagggggaggttctgggctgcgggcttcacccgggcccggtgaattgggaaaggttaagaaagagcagcaggatggggaggccgatgacgataagtttcctgtgtgcattcgcgaagcggttagccaagtcctcagtgggtacgattggactctagtgccaatgcccgtgagggtcaatggcgccagtaaaagcaagcctcacgtgaaacggccgatgaacgcattcatggtctgggctcaggcagccaggagaaaactcgctgatcagtacccccacctacacaacgcggagctcagcaagacccttgggaaactgtggcgattgctaaacgaatccgacaagagaccatttatcgaggaggcggaacgcctacggatgcagcacaaaaaggaccaccccgactataaataccagccccgtcgccgcaaaaacgggaaagcagcccagggggaggcagaatgtcctggaggagaagctgagcagggcggcaccgcagcaattcaggcccattacaaatccgcacacttagatcaccgccatccaggggagggctctccaatgagtgacggaaaccccgagcaccccagcggacagtcgcacggtcctccgacacctccgacaacaccaaaaaccgaactacaatcaggtaaagcagatccaaagcgagatggccgaagcatgggggagggcggaaaacctcatattgattttggcaatgttgatatcggggagattagccacgaagtgatgagcaacatggagacttttgacgtggcagagctggaccagtacttacctccaaacggccatcccggacacgtgtcctcttactcagccgctggctatgggctgggcagcgccctggctgtcgcatcggggcacagtgcttggatttctaaaccacccggtgtcgctttacccactgtgtcccccccgggagttgacgcgaaggcacaggtgaagaccgagacagccggtccccaggggccaccacactatacagatcaaccaagcacaagtcagatcgcctatacaagtctgtccttgccgcactatgggtccgcctttccaagtatcagtcgccctcagtttgactacagcgatcatcagcctagcggtccttattatgggcatagtggccaggcctcgggtctgtacagcgcattcagttatatggggccttctcagagaccactgtacaccgcaatctctgatccctcaccaagtggccctcagtctcacagcccaacccattgggaacagccagtctacacgacactcagtcgaccttag

SEQ ID NO: 26493 - DNA, 1401 bp, synthetic construct
  misc_feature 1..1401: note = Description of Artificial Sequence: Synthetic coding sequence
  source 1..1401: mol_type = other DNA
atggccgaggagcaggacctgagcgaggtggagctgagccccgtggggtcggaggagccacggtgtctcagcccaggttctgccccatccttggggcctgatgggggcggcggtggaagcgggttaagagcttcaccaggacctggtgagttgggcaaggtcaaaaaagagcagcaggacggtgaggctgatgacgacaagttcccggtttgcatacgcgaggccgtgtcacaggttctatctggatatgactggacccttgtacccatgcccgtgcgcgttaacggcgcctctaaatctaaaccccacgtgaaacgacctatgaacgctttcatggtctgggcacaagctgcaagaaggaaactggccgaccagtacccacaccttcataatgccgaactcagcaagactctgggtaagctgtggcgacttctcaatgagagcgacaaaaggcctttcatagaagaagcagaaaggctgcgaatgcagcataaaaaagaccaccccgactacaaataccagccaaggcggcgcaaaaacggaaaagccgcgcagggcgaagctgagtgtcccggcggggaggccgagcaaggtggtaccgcagccatacaagcacactataaatcggcccacctcgatcatcggcatcccggagagggcagtcctatgagcgatggtaatcccgagcacccatccgggcagtctcatggaccccccacacccccgacgacacctaagacggagcttcagagtggcaaagcggatcccaaacgagacggtcgaagcatgggggagggcggcaagcctcatatcgattttggcaacgtcgatattggcgagatcagtcacgaggtaatgagtaacatggagacgtttgacgtggcagagctagaccagtacctgcctcccaacggccatccaggacatgtcagctcttactccgctgctggttacggattgggtagcgcactagcagtggcatccggacactccgcatggattagcaaacccccaggagttgccctccctacagtatcaccccccggcgtcgatgccaaagcccaagtgaagactgagacagccggtccccagggcccacctcactacaccgatcaaccgtctaccagccagatcgcctatacctctctgagtctgccccattacggatcagctttcccatctatctcccggccccaattcgattactccgaccaccagccttccgggccatactacggccatagtggccaagcttccggcctgtacagtgcattctcatacatgggccctagccaaagaccgctctacacagctatttctgacccctctccttctgggccacagtctcactctcccacacactgggaacagcctgtgtatactaccctttccaggccctag

SEQ ID NO: 26494 - DNA, 861 bp, synthetic construct
  misc_feature 1..861: note = Description of Artificial Sequence: Synthetic coding sequence
  source 1..861: mol_type = other DNA
atggccgaggagcaggacctgagcgaggtggagctgagccccgtgggatccgaagagccaagatgtctgtcacctggttcagctccaagcctggggccggatggcggtgggggcggctctggcctgcgagcctcacctggacctggggagctggggaaggttaagaaggaacagcaggacggggaggccgacgatgataaattcccagtttgtattcgagaggcagtgtcacaggtcttgagcggctatgactggaccctggtcccaatgcctgtcagagttaatggtgcctctaaatctaagccacacgttaagcgcccaatgaatgcttttatggtttgggcgcaggccgcacggcgaaaactggcggatcagtatcctcacctgcataatgctgagctctccaagacacttggtaaactgtggagattgctgaacgaatccgacaagagaccctttattgaggaagcggagagacttcgaatgcagcacaaaaaggatcaccccgactataagtatcagccgagacggcggaagaatgggaaagctgcacagggtgaagcagagtgtcctggtggcgaggccgagcaagggggaactgcggcaatccaggcacattataaaagtgcccacctcgatcatcggcacccaggggagggttccccaatgtccgatggcaatcccgaacaccctagcgggcagtcccatggacctcctacccctcctaccacaccaaagacagagctccagtcagggaaggctgacccaaagagggacggcaggcccagcccctcaggtccgcaaagccactctcccactcattgggaacagcctgtatataccacactgtcccggccctag

SEQ ID NO: 26495 - DNA, 642 bp, synthetic construct
  misc_feature 1..642: note = Description of Artificial Sequence: Synthetic coding sequence
  source 1..642: mol_type = other DNA
atggccgaggagcaggacctgagcgaggtggagctgagccccgtgggctccgaagagccacgttgtctttctcccggctccgccccgtctctggggcccgatggcggtgggggagggtcaggcttgcgggcctcccccggccccggagagcttggcaaagtaaaaaaagagcagcaggatggtgaggcagacgatgacaaattccccgtttgcattcgcgaagcagtgagccaagtcctgtcaggctatgattggaccctagtgcccatgccggtgcgggttaatggagcaagcaagagcaagccgcacgtgaaacgacccatgaatgcctttatggtctgggcccaagccgcccgcaggaaacttgccgatcaatatccccacctccacaacgccgagttatctaagaccctggggaaactgtggcgcctccttaatgagtctgacaaacgacctttcatcgaggaggctgagaggctaaggatgcaacacaagaaagatcaccctgactacaaataccagcctcgcaggcgcaaaaatgggaaggcggcccagggggaggccgagtgtcctgggggtgaagccgagcagggcggcactgccgctatacaggcgcactataagagtgcccatttggactag

SEQ ID NO: 26496 - DNA, 1425 bp, synthetic construct
  misc_feature 1..1425: note = Description of Artificial Sequence: Synthetic coding sequence
  source 1..1425: mol_type = other DNA
atggtgcagcagaccaacaacgccgagaacaccgaggccctgctggccggagaatctagtgactcgggagctgggttggagctcgggatcgcgagttcccccaccccgggatccactgccagcaccgggggaaaagcagacgatccaagctggtgtaagaccccctccggccatatcaagcggcccatgaatgcattcatggtgtggagccagattgaaagacgcaaaatcatggaacagtctcctgatatgcataatgctgagataagtaagcgactggggaagcgctggaaactactgaaagactccgacaagatccctttcatccgcgaagccgaacggctgcgtctgaaacacatggccgattatcctgattataaatatagacccaggaagaaagtgaagtctggaaacgctaactcctcctcctctgctgcagccagtagtaaacctggggaaaagggggataaggttgggggttctggcggtggaggacatggtggtggcggagggggaggatcatcaaacgctggcggcggaggcggaggagcatctggagggggcgccaactctaaacctgcccaaaagaagagttgcggctctaaggtggcgggtggcgccggcggaggagtgagcaaaccacacgccaagctaattttggctggtggaggtggagggggtaaggcggccgcggcagccgctgccagcttcgccgccgagcaagcaggcgccgctgcgctcctacctctgggggccgccgccgaccaccattctctttataaggctcgtacaccttccgcctcagcctccgcctcttccgctgcaagcgcctcagcagctttagccgcccctggcaagcacctggccgagaaaaaggtgaagagggtttacctgttcggagggctgggaacatcctcttccccagtcggaggcgtgggagccggtgctgaccctagtgacccactgggcctctacgaagaggagggcgctggctgctcaccagacgccccgtctctgtcaggaaggtcatccgctgccagctcacctgctgccgggcgttctcccgccgaccatcgtggctatgctagtctgagagccgcaagtccggcgccctcatctgcaccctcccacgcatcgtcctccgcctcatcgcatagcagttctagctcgtcatctggaagttcttcatcagacgacgaattcgaggacgacctgttagatctgaacccttcaagcaacttcgaatctatgtccctcggaagcttttcttcatcttccgccctagatcgggacctcgattttaatttcgagccaggaagcgggtcgcactttgagttcccagactattgcacacccgaggttagcgaaatgatcagcggtgactggttggagagctcgatatcaaacctggttttcacatattag

SEQ ID NO: 26497 - DNA, 1425 bp, synthetic construct
  misc_feature 1..1425: note = Description of Artificial Sequence: Synthetic coding sequence
  source 1..1425: mol_type = other DNA
atggtgcagcagaccaacaacgccgagaacaccgaggccctgctggccggagaatcctccgactccggtgcagggctggagctagggattgcatctagcccgaccccaggctctaccgcttcaactggaggcaaagcggacgacccaagctggtgtaagacaccttccgggcatataaaaaggcctatgaatgccttcatggtgtggtcacaaatagaacgtaggaagatcatggaacagtcaccagacatgcacaacgccgagatttcgaaaagattgggaaagcgctggaagctcctgaaggactcagacaagataccttttattagggaagccgagcggctgaggctgaaacatatggctgactatcccgactataagtaccgtcctagaaaaaaggtgaagagcgggaacgcgaatagctcctcgtcagccgcagcctcaagtaagcctggggagaagggagataaggtcgggggaagtggcggaggaggtcacgggggggggggcggtggcgggagctccaacgctggaggaggcggggggggggcctcagggggaggcgcgaactcaaaaccggcccagaaaaagtcatgcggctccaaagtggccggcggagctggcggcggagtcagcaagccccacgccaagctaatcctggctgggggcgggggcggcggaaaggcggccgccgcggccgcagccagctttgccgctgaacaagcaggcgccgccgcgctgctccctctcggcgctgcggcagaccaccactccctttataaagcgcggaccccatcagctagcgcatcggcctcttcggccgcttcggcgtcagcggcgttggcagcacctggcaaacatctggcagagaagaaggtgaaacgagtgtatctgtttggcgggttgggaaccagctcctctccagttggcggcgtcggggccggcgccgacccctccgaccctctgggactgtacgaggaggagggcgctggctgctcccctgatgccccatcactctccgggagatcgtctgctgcgagctccccggccgcaggtcgaagccccgcagaccaccggggatatgcctcactgcgggctgcatctccggccccaagctctgccccatctcacgcttctagctccgcctctagtcactcatctagttctagcagttctggtagtagttctagtgacgatgaattcgaagacgatctgcttgatctgaacccttcttctaacttcgagagtatgagccttggttccttcagttcatcctcggccctggatagagacctggatttcaattttgagccagggtccggttcacacttcgagttcccggattactgcacacctgaggtgtccgagatgatttccggagactggctagagtcttctatctcaaaccttgtctttacctattag

SEQ ID NO: 26498 - DNA, 3318 bp, synthetic construct
  misc_feature 1..3318: note = Description of Artificial Sequence: Synthetic coding sequence
  source 1..3318: mol_type = other DNA
atgctggagcccagcagcgtgctgcacgccaacgtgaaccaggcccccttgtggtgtcttgtcttgcgttggtgtcgggagtgcaaggacaccgtctgcggagggaaacaaaaatcgcgggtgaatcacacgtttcagagacgggaaatcgaagcaaaagaagcctgcgactggcttagagccgcggggttcccccagtacgcacaactgtatgaagattcccagttcccaatcaatatcgtggccgtgaaaaacgatcatgactttttggaaaaagacctggttgaacccctttgccggagactgaatactctgaataaatgcgcaagcatgaagctggacgttaactttcagcggaagaaaggagatgattctgacgaagaagacctttgcatcagcaacaaatggactttccagcggacatctagacggtggtcacgagttgatgacctgtacacgctcctgcctcgcggagacaggaacgggtcacccggcgggacaggtatgcggaacaccaccagctccgagagtgtcctcaccgacctgagtgagcccgaggtgtgtagtatccattccgagtcaagtggaggctctgattctaggagccagcccggacagtgctgtacagataatccagttatgcttgacgccccattggtgagttccagcctgccacaaccccctcgcgacgtactcaatcatccttttcaccccaagaacgaaaaaccaactcgagccagggctaaatccttcctgaagagaatggaaaccctgagaggcaaaggcgcacacggcaggcacaaggggtcaggaagaactgggggccttgtgatatctggccctatgctccaacaggagccggaaagctttaaggctatgcagtgtattcagattcctaatggagacctgcaaaatagcccacctccagcctgtcgaaagggacttccttgcagcggcaaatctagcggcgagtcttccccctctgaacactcatcgtccggcgtttcgaccccttgcttaaaggagaggaaatgccatgaggcaaataagaggggaggaatgtacctagaagacctggatgtccttgccggaaccgccctccctgatgccggagaccagtcacggatgcatgagttccattcccaggagaacttggttgtgcatatccctaaagatcataaacctggtacctttccgaaggctctctccattgaatccctctctcctaccgacagctccaacggcgttaattggaggaccgggagcatttccctggggcgggagcaagttccaggtgcccgggagccccgcttaatggcctcttgtcaccgcgcatcgcgagtctcaatctatgataatgtgcctggttcccatttatatgccagcaccggggatctgctggatctggagaaggacgacctatttcctcacctggatgatatcttgcaacacgtgaatggcctgcaggaagtcgtagacgactggagcaaagacgtgctcccagagttgcaaactcacgacactctggtgggggaaccaggactgtctaccttcccaagcccgaatcagatcacattggattttgagggaaattccgtgagcgagggccgcaccaccccaagtgatgttgaacgcgatgtgacaagtctcaacgaatccgagcctccgggcgtccgcgaccggagagacagtggcgtgggtgcctcactgacaaggcccaacaggcgcctcagatggaacagctttcagcttagtcatcaacctagacctgccccggccagtcctcatatcagttcccagacagcatctcaactctccctgttgcagcgttttagcttattgcggctgactgcaataatggaaaaacatagcatgtctaataaacacggatggacatggagtgtcccgaaattcatgaaacgcatgaaagttcctgactacaaggacaaggctgtgttcggtgtaccgctcatcgtacacgtccagcgcactggtcaaccactgccgcagagtattcagcaggctttgagatatctgcgttcaaactgtttggaccaagtgggattattccgaaagtctggcgttaagagccgcatccatgcactgcgccagatgaatgagaacttcccggagaatgtcaactacgaagaccagagcgcatacgacgtcgcggacatggtgaagcagttttttagagaccttcccgaacctctctttacaaacaagctgagcgagacattcctccatatatatcagtacgtgagcaaagagcagcggttacaggccgttcaggccgcaatacttttgctggctgacgagaaccgggaggtcttgcaaaccctcttgtgttttctcaacgatgtggtgaacctggtggaagagaaccagatgacacctatgaacctggctgtgtgcctcgcccctagcctatttcacctgaatctgctcaaaaaagaaagttctccgcgggtgatccagaagaagtatgctacaggaaagccggaccagaaagatcttaacgagaacctggccgcggctcaggggcttgcccatatgatcatggaatgcgacaggctcttcgaagtcccccacgagcttgttgcccagagcaggaattcctacgtggaggccgagatccacgttcctacactggaggaactcgggacacagctggaggagagtggcgcaacatttcacacttatctcaaccatctgatccagggactgcaaaaagaagctaaggaaaaatttaaagggtgggttacttgttccagcacagacaacactgatctcgctttcaagaaggtgggcgacggaaatcctctgaagctttggaaagcttcggtggaggtggaagcaccccccagtgtcgtgctgaatcgagtgctgcgggaacgccacttgtgggatgaagattttgtgcaatggaaggttgtggagaccctagatagacagaccgaaatataccagtatgtgcttaactctatggccccccaccccagtcgagacttcgtcgtcttgaggacatggaagacagacttgcccaagggaatgtgtacccttgtgagtctgtctgtcgaacatgaggaggcccagctgctcggaggagtgagggccgttgtgatggattctcagtacctgatcgagccatgtggatcaggaaagagtcgcttgacacacatctgcaggatcgatttaaaggggcactctccagagtggtactccaaagggttcggccacctatgcgccgctgaagttgcccgcataagaaattccttccaaccactgatcgccgagggccctgagaccaagatttag

SEQ ID NO: 26499 - DNA, 3342 bp, synthetic construct
  misc_feature 1..3342: note = Description of Artificial Sequence: Synthetic coding sequence
  source 1..3342: mol_type = other DNA
atgttcagccaggtgccccggacccccgccagcggctgctactacctcaattctatgacccctgaaggacaggagatgtatttgcggtttgatcagactactcgtagatccccctatcgtatgagtaggattcttgctagacatcaattggtgactaaaatccaacaggagatcgaagctaaggaagcctgtgattggctgagagctgccgggttcccgcaatatgcccagttatacgaggattcgcagttccctattaatatagtggccgtgaaaaacgatcatgatttcctcgagaaggatttggtggagccactgtgcagaagactgaatactttgaacaaatgtgccagtatgaagcttgatgttaacttccagcgcaagaagggagatgattccgacgaggaagacttgtgcatttctaataagtggacctttcagcgcacctcacggcgatggtcccgggttgatgacttatacaccttactacctagaggtgacagaaacgggagtcctggcggcacaggaatgcggaatacaacgtcgtcagagtcagtattaacagacctgtcggaaccagaagtgtgttcaatacactcggagagttctggcggaagcgattcacggagtcagcctggacagtgttgcaccgataatcctgtcatgctagacgcccccctcgttagctccagcttgccccagccccctcgggatgtgctaaatcatccattccatcccaagaacgaaaaaccaacaagagcacgagccaaaagtttcttgaagcgcatggagactctgagagggaagggtgcccatgggcggcacaaaggatcaggcaggactggtggactggtgataagcggccccatgctccagcaggaaccagaatcgtttaaggctatgcagtgtatccaaatccccaacggggatctacagaatagtcccccccccgcttgtcgaaagggcctgccctgctccggaaagagttctggtgagtcttctccctcagagcattccagcagtggcgtgagtaccccttgcctgaaagagcgcaaatgccatgaggcaaacaaacgcgggggcatgtacttggaggacttagacgtactggccggcaccgctctcccagatgcaggggaccagagtcgcatgcacgaattccattctcaagagaacttggtggtgcacatcccaaaagaccacaagcccgggacatttcctaaagctctgtcaattgagtcccttagcccaaccgacagtagtaacggcgtcaattggcgaactgggtctatctccctcggcagagagcaggttccaggcgctcgcgagcctcgtctgatggcctcctgtcaccgagccagcagagtctctatttacgacaatgtgccaggctcgcacctttacgcaagcaccggggacctcctcgacttggaaaaagacgacctgtttccacatctggatgacatactccagcacgtgaacggcttgcaggaggttgtggatgactggagtaaggacgtcctaccagagctccaaactcacgacactctagtgggggagcctggtttgtctactttcccatcccctaaccagataactctggacttcgagggaaatagtgtcagcgaggggagaacaaccccctctgatgtcgagcgggatgtgacgtctctgaacgagtcagagcccccgggcgtgagagatcggagagatagcggagtgggcgcctcactgacccgtcccaatcgcagactgcgatggaattccttccaactgagccatcagccgaggccagcccctgccagtccacacatttcctcccagaccgcctcccaattgagcctgttgcaacgcttttccctgctgagactgaccgctattatggaaaaacactccatgtcaaataaacatggatggacgtggtccgtgccaaaatttatgaaaagaatgaaagtgcccgattacaaggataaagccgttttcggcgttccgctgatcgttcatgtgcaaagaacaggacagccgctgccacagagtattcagcaagccctccgttatttgaggagtaattgccttgaccaggtgggcctctttagaaagagcggagtgaagtctagaattcacgcgttgaggcaaatgaacgagaacttccccgagaacgtaaactacgaggaccagagcgcttatgatgtggcagatatggtgaagcagttcttccgtgatctgccagaaccactctttacaaataaacttagcgaaacctttctgcacatttaccagtacgtgagtaaggagcagagactccaggcagtccaagccgcaattctgttattagccgacgagaacagagaagtcctgcagacactgctgtgttttctgaatgacgtcgtgaacctggtggaggagaaccagatgacaccaatgaacctggcggtctgcctggcgccttccctgtttcacctaaacttgcttaaaaaagaatcaagcccccgggttattcaaaagaagtacgccactggaaagccggaccagaaagacctcaacgagaatttagcagcagcacagggattagcacatatgattatggagtgtgaccgtctgtttgaggttcctcatgaactagtggcacagtcgagaaatagttatgtcgaggccgaaattcacgtcccgactcttgaagaactggggacccagctggaagaatccggtgctacgttccatacttacttgaaccatttaattcagggcttacagaaagaagccaaggagaaattcaaggggtgggtgacgtgttccagcacagacaatactgaccttgcatttaaaaaggtgggggatggaaaccccctaaagttatggaaagccagcgtggaagtggaggctcctccatcagtggtactgaatcgggttctccgcgagagacatctgtgggacgaagactttgtgcaatggaaggtggtggagacacttgatcggcagacagagatttatcagtatgtgctcaacagtatggcccctcacccttcccgtgattttgtggttttgcggacctggaagaccgatctgccaaaggggatgtgtactctcgttagcctgagcgtagagcatgaagaagcccagctgttaggaggggtgagagctgtggtcatggacagccagtacttgattgagccatgcgggtcaggcaaatccaggcttacccatatctgtagaatcgacttaaagggacattctcctgagtggtattccaaagggttcggacacttatgcgccgctgaagttgcccgaatccgcaatagttttcaaccactgatcgccgagggtccagaaactaaaatctag

SEQ ID NO: 26500 - DNA, 2064 bp, synthetic construct
  misc_feature 1..2064: note = Description of Artificial Sequence: Synthetic coding sequence
  source 1..2064: mol_type = other DNA
atgctggagcccagcagcgtgctgcacgccaacgtgaaccaggccccactgtggtgtttggttttgcgctggtgcagagagtgcaaggacacagtatgtggcggcaaacaaaaaagccgtgttaaccacacttttcagaggagagaaatcgaggccaaggaggcttgtgattggctgcgcgcggctggtttcccccagtacgcccaattgtacgaagattcacagtttcctatcaacatagtcgccgtgaagaatgatcatgacttcctcgaaaaggacctggtggaaccactgtgtcgcaggctcaacaccttgaataaatgtgcttctatgaaactggatgtcaacttccaaaggaaaaagggtgatgattccgatgaggaagatttgtgtataagtaacaaatggaccttccagagaaccagtcgcagatggagtagggtggacgacctctatactctgttacctcggggagatagaaacgggtcgcctggtggcacagggatgcgaaacacgacatcttctgagagcgtgctgacggacctgtcagagcctgaagtgtgcagcatccactccgagtctagcggggggtccgacagtcggagccaacccggtcagtgctgcacagataatcctgtgatgctggacgcccccctcgttagttctagtctcccccagccacctcgtgatgttctgaatcatccattccatcctaagaatgaaaagcctacccgggccagagctaaatccttcctcaagagaatggagaccctcagagggaaaggggctcacgggagacataaaggctccggacgaacggggggtctggtgataagcggacccatgctgcagcaggagcctgaatcttttaaggctatgcagtgtatacagattcccaacggagacctccagaattcccctccccccgcctgccgcaaaggcttaccgtgctcaggaaagagtagtggtgagagcagtccatctgagcactcgagctccggagtgtcgaccccatgtctgaaggagcgcaaatgccatgaggcaaacaagcggggggggatgtacctggaggaccttgatgttttggctggcaccgctctacccgatgctggcgaccagagcaggatgcacgagttccactcccaggagaacttagtggtgcacattcccaaagaccacaagcccggtactttcccgaaagccctttcgatcgagtcactcagccccaccgacagttcgaacggagtaaattggcgcaccgggagtatatctctgggcagagagcaggtacccggagcccgcgaaccacgcctgatggcgtcgtgtcaccgggcgtcaagagtatctatctatgataatgtgcctggctctcatctgtatgcaagtaccggcgatctactagatctggagaaggacgatctatttccccacctcgacgatatcctccagcacgtcaatggcctgcaggaagtagtggatgattggagcaaggacgtactgcctgagcttcagactcacgacacgctcgttggcgaacccggactgtctacctttccgagcccaaatcagataacactggacttcgagggaaattctgtaagcgaaggacgaacgactccctccgatgtggaaagggatgtcacatcactcaacgaaagcgaaccacctggtgtccgcgaccggagagatagtggtgtgggggcatcccttacacggcctaaccggcggttacggtggaattctttccagctgtcccaccaacctagaccagctcctgcctctcctcacatctcttctcaaaccgccagccaactgagcctacttcagcggtttagcttgctgcgccttacagccattatggagaagcactccatgagcaacaaacatggctggacctggtcagtacctaagttcatgaaacggatgaaggtgccagattataaagacaaagctgtgttcggggtgccattaatcgtgcacgtgcagcgtacagggcagcccctgccacaaagcatccagcaagcactcaggtatctccgcagtaactgccttgaccaggagtag

SEQ ID NO: 26501 - DNA, 2988 bp, synthetic construct
  misc_feature 1..2988: note = Description of Artificial Sequence: Synthetic coding sequence
  source 1..2988: mol_type = other DNA
atgaagctggacgtgaacttccagcggaagaagggcgacgacagcgatgaagaggacctctgcatctcaaataaatggacattccagaggacatcccggcgatggtcccgggtcgatgacttatatactctgctcccacgaggcgatagaaacggttctccagggggaaccgggatgaggaacaccaccagcagcgaatccgttcttactgacctttcggaacccgaggtgtgcagcatacattcagaatccagtggcggtagtgactctcggagccagcccggccagtgttgtaccgacaaccctgtcatgctggatgccccacttgtaagctcttcccttccccagcctccaagagacgtgttaaatcaccccttccaccccaagaatgaaaagcccacccgggcaagagcaaaatcgttccttaagcggatggaaacattgcgaggcaaaggggcccacggccgccacaaaggttcagggagaacagggggattggtaatttctggaccgatgctgcagcaggaacccgagtcatttaaagccatgcagtgcattcagatcccgaacggagacctacagaattctccccccccggcctgcagaaagggcctaccttgctctgggaaatcttcgggtgagtcttctcctagtgagcacagctcctccggagtgagtacaccttgcctaaaagaacggaagtgtcatgaagctaataaaaggggcggaatgtatctggaggatctcgacgtgctcgccggcaccgcactcccggacgctggtgatcagtccagaatgcacgaattccactcccaggagaatttagtggtgcacatccccaaagaccacaagcccggcacctttccgaaagcactgtccattgagtcacttagccccaccgattccagcaatggcgtgaactggcgtacaggatcgatatctctgggtagagagcaggtgcctggcgcccgtgaacccagacttatggcctcctgtcatcgggctagcagggtctcaatctacgacaacgttcctgggagtcatctgtacgccagtacaggggacttgctggatctggaaaaagatgatctttttccccacctcgatgatattctgcagcatgtaaacgggcttcaggaagtggtggacgattggtctaaggatgtgctgcccgaactgcagacccatgatactcttgtgggcgaaccaggattgtctacatttcccagccccaaccagataactctggactttgagggaaactctgtctccgaggggcggactacaccaagcgatgttgaaagagatgtgactagtctgaacgaatctgagcctccaggagtaagagatcgaagagattcaggggtgggggccagccttactcggcctaaccggaggttgcggtggaactcttttcaactttcacatcagccaagaccagccccagcatctcctcatatttcatcgcagacggcaagccagctaagcctgctccaaagattctccctgctgaggttgactgccattatggagaagcacagcatgtctaataagcacggatggacgtggtcagtacccaagttcatgaaacgaatgaaggtgccagactacaaggataaggcggtattcggtgtcccactgatcgtgcacgtccagcgaacaggtcagcctctgcctcaatctattcagcaggctctgcgatatctccgatcgaactgcctggatcaagtgggcctattccggaagtccggggtcaaatcccgaattcacgccctccgacagatgaacgaaaatttcccagagaacgtcaactatgaggatcagagtgcttacgacgtcgcagacatggtgaagcagttttttcgagatctgccagagcccctgtttactaataagctatccgagaccttcctgcacatttaccagtacgtttcaaaagaacagcggctgcaggcagtgcaagccgcaatcctcctcctggcagacgaaaatagggaagtgttgcagacattattgtgcttcctgaacgatgtagtgaatctagtggaagagaatcagatgaccccgatgaacctcgcagtgtgcctagccccctcattattccatctgaatcttctaaagaaagaatcatcacctagggttatccagaagaagtacgccaccggaaagcctgaccagaaagaccttaacgaaaacttggccgcagcacagggtctggctcacatgatcatggaatgtgaccgcctctttgaggtaccccacgagttagtagctcagagccgcaactcctacgtcgaagcggaaatccacgtgcctactctggaagaactggggactcaacttgaagaatcaggtgcgacttttcacacttatctgaaccatctcattcagggtctccaaaaggaggcgaaggaaaagtttaaaggctgggtcacatgcagctctaccgacaataccgatcttgcctttaagaaggtcggggatggaaacccactgaaactgtggaaggcttcagtggaagtggaagctcccccctcagtcgtgcttaaccgggtgctgagggagagacacctctgggatgaagacttcgtccagtggaaagtcgtggaaactctggataggcaaacagagatatatcaatacgtgctgaattcaatggcccctcacccaagtcgagactttgttgtgctgcgcacttggaaaacagatttgcctaagggaatgtgtactctggtctccctttccgtcgaacacgaggaagcccagttgcttgggggcgtgagagcggtggtaatggacagtcagtatctgatcgaaccatgtgggagcggtaagtcccgcctcacacatatctgtagaatcgatctcaagggccactcgcccgagtggtattcaaaaggcttcggccatttgtgcgccgcagaggtggctagaatccgcaactcttttcagccgcttatcgcagagggtcctgagactaagatctag

SEQ ID NO: 26502 - DNA, 450 bp, synthetic construct
  misc_feature 1..450: note = Description of Artificial Sequence: Synthetic coding sequence
  source 1..450: mol_type = other DNA
atggccagcagcgacatccaggtgaaggagctggagaagcgggcctcgggccaagcatttgaacttatactttctcccagaagcaaagaaagcgtgccagagtttccattgagccccccaaaaaaaaaggacctgtcgctggaggagatccagaagaagctggaagccgccgaagagagaagaaaaagccacgaagccgaggtattaaagcaacttgcagaaaagagggaacacgaaaaagaggtcctgcagaaggcaatcgaggaaaataacaatttttcgaaaatggccgaagaaaagctgacccacaaaatggaggccaataaggaaaatagagaggcccagatggctgcaaaactggagcgcttgcgggagaaggataagcacatcgaagaagtgcggaagaacaaggaaagtaaagatcccgcagatgaaaccgaagccgactag

SEQ ID NO: 26503 - DNA, 450 bp, synthetic construct
  misc_feature 1..450: note = Description of Artificial Sequence: Synthetic coding sequence
  source 1..450: mol_type = other DNA
atggccagcagcgacatccaggtgaaggagctggagaagcgggccagcgggcaggctttcgagttgatcctatccccaaggagcaaagagtccgtgcccgagttcccactgtcaccgccaaagaagaaagatttgagtctcgaggaaatccagaagaaattggaggccgctgaggaaagaaggaagagccatgaggctgaagtgcttaagcagcttgctgagaagcgggagcatgagaaagaagtcttgcagaaggctatagaggagaataacaatttttcaaagatggctgaggagaagttgacccacaagatggaggccaataaagagaatagggaggcacagatggccgctaaactggaacgcctcagagaaaaagataaacacatcgaagaggtgcggaagaacaaagagagcaaggacccagccgacgagactgaggccgactag

SEQ ID NO: 26504 - DNA, 450 bp, synthetic construct
  misc_feature 1..450: note = Description of Artificial Sequence: Synthetic coding sequence
  source 1..450: mol_type = other DNA
atggccagcagcgacatccaggtgaaggagctggagaagcgggcctctggacaagcttttgagcttattctgagcccacgcagtaaggaaagcgtgcctgaatttcccctgagccccccaaagaagaaagatctatccctcgaggagatacagaagaaattggaagcggcagaggagcggagaaaatctcacgaggccgaggtgcttaaacagctggcagagaagcgcgaacatgagaaggaagtactgcagaaggctattgaggagaataacaatttcagcaagatggccgaggagaagctgacccataaaatggaggccaataaggagaaccgagaggcccaaatggccgccaaattggagcggcttcgagaaaaagataagcacatagaagaagtacgtaagaacaaggagtccaaagaccccgctgatgagaccgaagctgattag

SEQ ID NO: 26505 - DNA, 525 bp, synthetic construct
  misc_feature 1..525: note = Description of Artificial Sequence: Synthetic coding sequence
  source 1..525: mol_type = other DNA
atggccagcagcgacatccaggtgaaggagctggagaagcgggcctccggccaggcgttcgaattgatcctgagcccacgtagcaaggagagtgtcccagagttcccattgtcccccccgaagaagaaagacctgtccttggaagaaattcaaaaaaaactagaggccgccgaggaaagaagaaagtcgcatgaggcagaagtgctgaagcagctggccgagaagcgggagcacgagaaggaggtgctccagaaggccattgaagagaataacaactttagtaaaatggctgaggagaagttgacccacaaaatggaggcgaacaaggagaatagggaagcacagatggctgcaaagctcgaaaggttgcgggagaagatgtacttctggactcatggtcctggcgcccatccagcccagatatctgctgagcagtcgtgcctgcacagtgtgcccgccttgtgtcccgccctgggtctgcagagcgctctgataacttggagtgacttgtctcatcatcattag

SEQ ID NO: 26506 - DNA, 261 bp, synthetic construct
  misc_feature 1..261: note = Description of Artificial Sequence: Synthetic coding sequence
  source 1..261: mol_type = other DNA
atggccagcagcgacatccaggtgaaggagctggagaagcgggcctccgggcaggcgttcgagctcattctatctcctcgctccaaagaatccgtgccagagttcccgcttagccctcccaagaagaaagacctctcattggaagaaatccagaagaagctggaggctgccgaggaaaggcgtaaatctcacgaagcagaggttctgaaacaactagcagaaaaaagggagcatgaaaaagaagtgctccagaaggcatag

SEQ ID NO: 26507 - DNA, 450 bp, synthetic construct
  misc_feature 1..450: note = Description of Artificial Sequence: Synthetic coding sequence
  source 1..450: mol_type = other DNA
atggccagcagcgacatccaggtgaaggagctggagaagcgggcctccggccaggctttcgagctaattcttagccccaggagtaaggagtctgtgcccgagtttcccctgagccctccaaaaaagaaggacctcagcctggaggaaatacaaaagaagctggaggccgcggaggaacgcagaaagtctcatgaggctgaggttctgaagcaactcgcagagaagagagaacacgagaaagaagtgttgcagaaggcgattgaggagaataacaattttagcaaaatggctgaggagaaactcacgcataaaatggaggccaacaaagagaatcgcgaggcccagatggctgcgaagttggagagactgcgggagaaagataaacacatcgaggaggtgagaaaaaacaaggagagtaaagatccagctgatgaaactgaggccgactag

SEQ ID NO: 26508 - DNA, 3615 bp, synthetic construct
  misc_feature 1..3615: note = Description of Artificial Sequence: Synthetic coding sequence
  source 1..3615: mol_type = other DNA
atgagcttcttcaacttccggaagatcttcaagctgggcagcgagaaaaaaaaaaagcagtacgagcatgtgaagcgggatctgaacccggaagatttttgggaaattatcggagagctcggggacggcgccttcggcaaggtgtacaaagcccaaaacaaggagacaagcgtgctggcggctgctaaggtcatagataccaagtctgaggaggagctggaagattacatggtggaaatcgacatcctcgcttcttgtgaccaccccaacattgtcaaacttctggacgcgttttactatgagaacaatctttggatactgattgaattttgcgccggcggtgcagtcgatgccgtgatgctggaattagagaggcccctcactgagtcgcaaatccaggtagtgtgtaagcaaaccctcgacgccctaaactacctgcacgacaataagataatccatcgggatctgaaggcagggaatatcctgtttactctggatggcgatataaagctcgctgactttggcgtgtctgcaaagaacacacggactatccagaggagagacagtttcatcgggacgccatactggatggcccccgaggtcgtgatgtgcgagacatccaaagaccgcccctacgactataaggccgatgtttggagtctggggatcaccctgattgaaatggctgaaatcgagcccccacaccatgagttgaatcctatgcgtgtgttgctgaagatcgctaagagtgagcctcccaccctggcccagcccagccggtggagttctaatttcaaagacttcctgaaaaagtgtctggaaaagaatgtggacgccagatggactacgtcgcaactgctccaacatcctttcgtgaccgtggattccaataaacctatccgcgaactgattgccgaggcgaaggctgaggtgaccgaggaagtggaggatggcaaagaagaagacgaagaagaggagactgaaaattcgctgcccatccccgctagcaaacgcgcttcctccgacctgtctatagcatccagtgaagaggacaaactgtcacagaatgcctgcattctggaatctgtgagcgagaaaaccgagcggtctaactctgaagacaagttgaatagcaagattttgaacgaaaagcctacaaccgatgagcctgagaaggcagttgaggatataaacgaacacattaccgacgcccagctcgaggctatgactgaactgcatgacaggactgcagttataaaggaaaacgagagagagaagaggccaaaactagaaaacctgccagataccgaggaccaggaaaccgtggacatcaattctgtgagtgaaggtaaggaaaacaacatcatgatcaccctggagacaaacattgagcataacctgaaaagcgaggaagagaaagatcaggaaaaacaacagatgtttgaaaacaagcttatcaagtcagaggagatcaaagatactattctgcagactgtcgacctcgtgtctcaggagacgggagagaaggaagccaacattcaggctgtagactctgaggtcggactgaccaaggaggacacgcaggaaaaactaggggaggacgacaagactcagaaagacgttataagtaacacatcagatgtgatcgggacatgtgaggctgcggacgtcgcccagaaagtcgatgaagacagcgcagaagatacccagtccaacgatggcaaggaagtggtggaggtgggccagaagctgatcaacaaacccatggtcggtccggaggctgggggtacaaaggaggtgcccataaaggagattgttgaaatgaatgaaatcgaggaaggaaagaacaaagagcaggcaatcaactcctcagaaaacatcatggatataaacgaagaacctggcaccacggagggcgaggaaatcaccgagagttccagtacagaggaaatggaggttagatcggtggtagcagatacagaccagaaggctctcggcagcgaggtccaggacgcttccaaagtaaccactcaaatcgacaaagagaagaaagagattccggttagcatcaaaaaagaacctgaagtcacagttgtgtctcagccgactgagcctcagcctgtgctgatcccatcaatcaatatcaactccgactccggagaaaacaaagaggagattgggagtctgtccaagactgaaaccatcctgccccccgaaagcgaaaatccaaaagagaatgacaacgatagtggcaccgggtcgaccgctgatacatcgagcatagatttgaatctgagcatcagctcatttttgtccaagaccaaggacagtggttcaatttcgctccaggagacaagaaggcagaagaagaccttgaaaaaaacccgtaaattcatagtggacggagtcgaggtctctgtgacgacatctaaaatcgttactgattctgacagcaagacagaggaacttagattcctccgcaggcaggaactccgggaacttaggttcctccagaaagaggagcaacgagcacaacaacaactcaactccaaactgcaacagcagcgggagcaaatcttccgacgatttgagcaggagatgatgtccaagaaacgtcagtacgatcaagagattgagaatctggagaaacaacaaaagcagaccatagagcggttggagcaagagcacacgaaccgactgagagacgaggctaagcggatcaaaggtgaacaggaaaaagagttgtccaagtttcaaaatatgcttaaaaatcgaaaaaaagaagagcaggaatttgtgcagaaacagcagcaagaactagatggctccctgaagaagatcatccagcagcagaaagctgagcttgccaacatcgagagggaatgcctcaataataagcagcaactcatgagggcacgcgaggcagccatttgggagctcgaagaaagacacctgcaggagaagcaccaactcttaaaacagcagctcaaggatcaatacttcatgcaacggcatcaactgctgaagcgacatgaaaaagagaccgagcagatgcagagatataaccagaggcttatcgaagagcttaagaacaggcagacacaggaaagggcgaggctgccaaagatacagaggagcgaggccaaaactagaatggcaatgttcaaaaagtccctgcgtatcaacagcaccgccacacccgaccaagatcgggataaaattaagcagttcgcggcacaagaggagaagcgtcagaagaacgaacggatggctcagcaccagaaacacgagaaccagatgagagacctgcagctgcaatgtgaagccaatgtccgcgagctgcaccagctgcagaatgaaaagtgccatctgctggtagagcacgagacccaaaagttgaaagagttagacgaggagcactcccaagagcttaaggaatggagggagaaactgaggcctcgaaagaagacactcgaagaagaatttgcgcgcaaactccaagaacaggaagtgttttttaaaatgaccggcgaatccgagtgcctaaacccctcaactcaatcccgtattagcaaattctacccaataccttcactgcacagcaccggatcgtag

SEQ ID NO: 26509 - DNA, 3708 bp, synthetic construct
  misc_feature 1..3708: note = Description of Artificial Sequence: Synthetic coding sequence
  source 1..3708: mol_type = other DNA
atgagcttcttcaacttccggaagatcttcaagctgggcagcgagaaaaagaaaaagcaatacgagcacgtgaaaagggacttgaaccccgaggacttctgggagatcatcggtgaactgggggatggcgccttcgggaaggtctacaaggctcagaataaagaaacctcagtcctggcggctgcgaaagtgatagacactaagagtgaagaagagcttgaggattatatggttgagatagacattttagcctcctgtgaccacccaaatatcgtgaaactgctggacgccttctactatgagaacaatctgtggattctcattgaattctgcgccggcggggctgtggacgcagtaatgctagagctcgagcgtcctctaactgaatcacagatacaggtagtttgcaaacagaccctcgacgctctgaactatttgcatgataacaagataatacacagagatctgaaggccggcaacattcttttcaccctagacggggatatcaagctcgccgatttcggcgtgtccgctaaaaatacacgaaccatccagcgtagagatagcttcataggcacgccatactggatggcaccggaagtggtcatgtgtgaaaccagtaaagaccggccttacgactacaaggccgatgtctggagcttaggaataaccctgatcgagatggccgagattgagcccccccaccatgaactgaaccctatgcgggttctgctgaagatagctaagtcggaaccccccaccttagcccaacctagtcggtggtcctccaacttcaaggattttttgaagaagtgtcttgaaaagaatgtggatgccaggtggacaacctcccagctcttacagcacccattcgtgaccgtagatagcaacaagccaattagagagcttatcgccgaggccaaggctgaagtcaccgaagaagtggaggacggcaaggaagaagatgaggaagaagagacagagaatagtctgcctatccccgcctccaagcgcgcgtcaagtgacctctcaattgcctcctcggaggaggataaactcagtcagaatgcctgtattttagagtccgtttccgagaaaacagagaggagtaactccgaggataaacttaacagcaaaattctgaacgaaaaacccacaacagacgagcctgaaaaagccgtagaagatatcaacgagcatatcactgatgctcagttggaagcgatgactgagctacacgaccgcacagccgtgatcaaggaaaacgaacgggagaaacgccccaagcttgaaaatttaccagacaccgaggaccaggagactgtcgatattaatagtgtcagcgagggcaaggagaataatatcatgatcaccctcgaaactaacatagaacacaatttgaagagtgaggaggaaaaagaccaggaaaagcagcagatgttcgagaacaagctgattaaaagtgaggagattaaggatactattctacaaactgtagatctcgtcagtcaggagacaggggagaaggaggccaatatccaagccgtggattccgaggtgggcctgactaaggaagatacccaagaaaagctgggtgaagacgataagactcagaaagacgtcatcagtaacacctcggacgtgatcggaacctgcgaagctgctgatgtcgcgcagaaagtggatgaagactccgctgaagacacgcagtccaacgacggcaaggaagtcgtcgaagtgggccagaagttaataaataaacccatggtcggaccagaggcagggggaaccaaagaagtccccatcaaagaaatagtcgagatgaacgagattgaggaagggaaaaacaaagaacaggccattaattcctctgagaacatcatggacataaacgaagagcctggaaccaccgaaggagaagagatcaccgaaagttccagtacagaagaaatggaagtgcgttccgttgtggccgacaccgaccagaaagccctgggctcggaagtacaggacgcctcgaaggtgacaacacagattgacaaagagaaaaaagagataccggttagcattaaaaaagaacccgaggttaccgtggtgtctcaacctactgaacctcagcctgtcttgatcccgtcgatcaacatcaattctgatagcggtgaaaacaaagaggaaattgggagtctgtctaagacagagacaatcctgccccccgaatcagaaaaccctaaggagaatgataacgatagtgggactggcagcaccgccgacacctcttctatcgatttgaacctgtcaatttcatcatttttaagtaaaacaaaggactcagggtccattagtctgcaggagaccagacggcaaaaaaaaaccctgaaaaagacgaggaaatttatcgtggatggagttgaggtcagtgtgacgacttcgaagattgtgaccgattctgattccaagaccgaggagttgcgcttcctaaggagacaagagttacgagagcttcgctttcttcaaaaagaggagcagcgcgcacaacagcagctgaacagcaaattgcagcagcagcgcgaacaaatctttcgccgtttcgaacaggaaatgatgtccaagaaacgtcagtatgatcaggaaatagaaaacctggagaaacagcagaagcagacaattgaacgtctggagcaggagcataccaatagactgcgagatgaggccaagcggatcaagggtgagcaggaaaaagagctgagcaaattccagaacatgctaaagaataggaaaaaggaggtcataaacgaggtcgagaaggcccccaaggaattaagaaaagagctaatgaagcgccgcaaggaagagctggcccagtctcagcatgcccaggagcaagagttcgtgcaaaagcagcagcaagaactcgatggatccttgaagaagataatacagcagcaaaaggccgaactggcaaacatagaacgagagtgcctcaacaacaagcaacagctgatgcgggccagggaagcagccatttgggagctcgaagagcgacacctgcaagagaaacatcagttgttgaaacagcagcttaaagaccagtacttcatgcagaggcaccagctgcttaagcgccatgagaaggagacagagcagatgcagcgctataaccagagacttatagaggaactgaaaaatcgccaaactcaggagcgagcacgtcttcccaagatacagcgttctgaagccaaaaccaggatggcgatgttcaaaaaatccctgcgtattaactccactgcaaccccagaccaggatagggacaagatcaagcaattcgctgcccaggaggagaagagacagaaaaacgaacgcatggcccagcatcagaaacacgagaatcagatgagggatctgcaattacagtgcgaggctaacgtcagagagctgcaccaactgcagaacgaaaaatgtcatttactggtcgaacacgagacacagaaactcaaggagctcgacgaagagcattcacaggagttgaaggagtggcgagaaaaattgaggccacgcaagaagaccctcgaagaagaattcgctaggaaactccaggagcaagaggtttttttcaaaatgaccggggagagtgagtgtcttaatccatctacccaatcgcggattagcaagttctatccgatcccctcgcttcattcaacaggtagttag

SEQ ID NO: 26510 - DNA, 3444 bp, synthetic construct
  misc_feature 1..3444: note = Description of Artificial Sequence: Synthetic coding sequence
  source 1..3444: mol_type = other DNA
atggacgagccccccttcagcgaggccgccctggagcaggccctgggggagccatgcgacctggacgccgctcttctgaccgacattgaggacatgctgcagctcatcaacaatcaggactcagactttccaggactctttgatcctccatacgctggatcaggggctggagggacagaccccgcttctccagatacctcctcccccgggagtctgagccccccccctgcaaccttgtcctcaagtctcgaggcattcctctccggcccacaggccgcccctagtcctctctcgcccccccagcctgctcccactcccctcaaaatgtatccatctatgccagcgtttagcccgggccccggtattaaagaggagtccgtgcccctctctatactgcaaacccccactccacaaccactgcctggcgctctattgccccagtccttccccgcaccagctcccccgcagttttccagcacccctgttttaggttatccatcgcctccaggcggcttcagtaccggctctccacctggcaacactcagcagcccttaccgggtttgcctctggccagccccccgggggtaccccccgtgtctttacatacccaggtacagtccgtggtccctcaacaactcctgacagtcaccgctgcccccacagcggctccagtcactacaactgtgacttcacagattcagcaggtgccagtcttacttcagcctcacttcataaaagccgattcgctcctgctcactgcgatgaagacagacggcgccactgttaaggccgctggcctgagccctttggtttctggaactacagtgcaaacaggacccctgcctactctagtatctggaggcaccattctagctactgtgcccctggtggtcgacgccgaaaagctgccaatcaatcgcctggccgctggaagcaaagcccctgcatctgcgcagtctcgaggggagaaaaggaccgcacacaacgcgatagagaaacggtaccggtcctcaattaacgacaagattattgagctgaaggacctcgtggtggggactgaagccaaactgaacaagtcagccgtacttagaaaagctatagactacattagattcctgcagcattccaatcagaagttaaagcaggagaacctgagtctgcgaaccgccgtgcacaaaagcaaaagcctgaaagaccttgtatctgcatgtggcagcggcggtaataccgacgtgttaatggaaggggtaaaaactgaggtggaagacaccctcaccccccccccaagcgatgctggaagtccctttcagtcatctccactaagcctcggcagcagaggctccgggagtggtggaagcggctcagactctgagcccgattcaccagttttcgaagatagcaaggccaaacccgagcagaggccctcgttacactccagaggaatgttggatcggtctcggctggcactctgcaccttggtattcctttgcctcagctgtaacccattagccagcttgctcggcgctagaggtctgccatctccttctgacacgacctccgtgtaccattccccaggtagaaacgtgcttggcaccgagagtagggatgggcctggctgggcacagtggttgctgccgccagtagtctggttgttgaacggtctgcttgtgttggtctccctcgtactactgttcgtctacggcgaacccgtcacgcggcctcattctggcccggcagtttacttttggcgacatagaaagcaagcagatctggatctcgctcgtggggattttgctcaggcagcccaacagctgtggctggcactccgcgcactgggcaggccactacccacgtctcatctggacctcgcttgctcactgttgtggaacctcatccgacacctactgcagaggctgtgggtggggagatggctggccggccgtgcagggggcctccaacaggactgcgctctcagggtcgacgcctcagccagtgcaagagatgcagccctggtgtaccacaagctgcaccagctgcatacgatgggtaaacatactggcggacacctgaccgccaccaatcttgccctctccgcactgaacttggccgagtgcgctggggacgctgtaagcgtagcaactctagccgagatatacgtagcggctgccctacgggtaaagacctctctgccaagagctttgcacttcctcacccggttcttccttagttctgccaggcaggcttgtctggcccagagcggatcggtcccgccggctatgcaatggctctgccatccagtgggccataggtttttcgttgacggcgactggtccgtgttatctacaccatgggagagcctgtacagtcttgcgggaaatcctgtggatcccctggctcaggtgacacagctttttagagaacacctcctggagagggctctgaactgcgttacacagccaaatccctcccccggcagtgccgatggcgacaaggagtttagtgatgctttggggtacctgcagctgctcaattcatgcagcgatgccgccggggcccccgcgtactccttcagtatctcctccagcatggcaacaactacaggggtcgaccccgtagcgaagtggtgggcttccctcactgccgtggtgatccattggctgcgtagggacgaggaagccgcggaacgtctgtgtcccctggtggaacatttgccaagagtgctacaagagtctgagaggccactgccacgggctgccctacattccttcaaagccgccagggctctcctgggctgtgccaaagccgaaagtggtccagcatccctgaccatctgtgagaaagcatccgggtacctgcaggatagcctcgcaaccacccctgcctctagctcaatagataaggcagtgcaattgttcctgtgcgacctgctgctcgtcgtgcgaactagcctgtggcggcagcagcagcccccagctccagcccccgcagcacagggaacatcgtcaagaccacaggcttcagctcttgagctgcgggggttccagcgcgacctcagctccttgcgacgcctggcgcagagcttccgcccggcaatgcgaagggtgtttctgcatgaggcgacagcccgtctgatggctggggcaagccccactaggacacatcagcttctggatcgctcacttcgaagaagggcaggaccgggagggaagggaggggctgtcgctgagttggaacccagacccaccagacgcgagcatgctgaggccttgctgctggctagctgttatttacctccaggattccttagcgcaccagggcagagggttggcatgctggccgaagccgcccggaccttagagaagttgggtgataggcgattgctccacgactgccagcaaatgcttatgcgactcggcggtgggacaaccgtcacaagttcatag

SEQ ID NO: 26511 - DNA, 3216 bp, synthetic construct
  misc_feature 1..3216: note = Description of Artificial Sequence: Synthetic coding sequence
  source 1..3216: mol_type = other DNA
atggacgagccccccttcagcgaggccgccctggagcaggccctgggagagccatgcgacctggacgccgcgctcctcacagacattgaagacatgctccagctgatcaataatcaggatagcgattttccaggtctcttcgatccaccctatgccggatcaggagccggtggcactgatcccgccagtcccgacacctccagcccaggctccctgagcccaccacccgccactctgagttcctcgcttgaggccttcctcagcggaccacaggcagccccctcgcccctgtcccccccacagcctgcccccactcccctcaagatgtatccgagtatgccagctttttcgccagggcccggcatcaaggaagaaagcgtgcctctgagcatcttgcagacacctacgccccagcctctgcctggtgcgctgcttccccagtctttccctgcgcctgccccccctcagttcagctctacaccagtcctgggctacccttctccaccaggcgggttttccaccggatctccccctggcaatacccagcagccccttccaggactgccactcgcctctcctcccggcgtgccccctgtctctctccacacccaggttcagtcagtcgttcctcagcagcttctgactgtcaccgccgctcccaccgccgctccggtgaccacaacagtgacttcccagattcagcaggtgcccgtgctgctacagccgcatttcataaaggcggatagccttctgctgaccgccatgaaaacggacggcgctacggtaaaggccgctggcctgtctccccttgtatccggcacaaccgtccagactggaccccttcctaccttagtgtccggtggaacgatactggccactgtaccgctggtggtggatgccgagaaactgcctattaatcgtctagctgctggatcgaaagcaccagcctcagctcagagccgtggggagaagcggaccgcccataacgcgatcgaaaagagatatcgctcgtctattaatgataaaatcattgaactgaaagatttggtggttggaacggaagctaaactcaataagtcggcagttctgcggaaggccatcgactacatcaggtttctgcagcatagtaatcaaaagctcaaacaggaaaatctctccttacggacggccgtgcataaatctaagtcgctcaaagatctggtgtctgcttgcggctctgggggcaatacagacgtcttgatggagggcgtaaagaccgaagtggaggacaccttaactccccccccttcagacgccggatcgcccttccagagcagcccactgtccttaggtagccgcggctcgggatccggtggctctggcagtgactccgaacccgacagtccggtttttgaggacagcaaagctaaaccagaacagcgaccttccctgcacagtcggggaatgctggataggagtagactcgccctatgtaccttagtgtttctctgtctgagctgcaatccacttgcttctctgctgggcgctcgcggcttgccatctccctccgataccactagcgtttatcacagccccggaaggaatgtattggggactgaatcccgagacgggcctggctgggcgcaatggttgctgcctccagtggtttggctgctgaacggcctgctagttttggttagccttgtactgcttttcgtctatggcgagcctgtgacccggcctcactccggacctgcggtctacttctggcggcatagaaaacaggctgaccttgatctggcccggggggactttgctcaggcagcacaacagctctggctggcactccgtgcactggggaggcccctgccaacttcgcaccttgatttagcctgcagcctgttatggaacctgatcaggcaccttctgcagaggttgtgggttggaagatggctggctggaagggccggcgggctccagcaagactgcgctctgagagtggatgcatcagcgtcagctcgcgacgccgccctggtataccacaagctgcaccagttacacacaatgggtaaacatactggaggccatcttacagccacaaaccttgccctgtccgccctcaatttggccgagtgcgccggcgacgctgtctccgttgcgacactggccgagatttatgtcgccgcggccctaagagtcaagaccagtttgccccgggccttgcattttctcactcgcttttttctctcttccgctcgacaagcttgtctcgcccagtctggtagcgtgcccccagccatgcaatggctgtgccatcccgtgggccaccgcttctttgtggacggagactggtcggttctgtctaccccctgggagtcgctttacagtctagctggcaaccccgttgacccattggcccaggtcacccagcttttccgcgaacacttacttgagagagcactgaattgcgttacccagcctaatcccagtcctggatcggcagatggggacaaagaattctccgacgcgttaggctacttacagttgctgaattcatgtagcgacgctgcgggtgcgcccgcttattccttttctatctcttcaagtatggccacgaccactggtgtggatccagtggccaagtggtgggcctcccttacagccgtggtgatacattggctcagacgggacgaagaagccgccgaacgcctttgccccctggtcgaacacctgccccgggtgctgcaagagtccgagcgaccactgccccgcgccgctctccattcttttaaagctgcgagggcactgttgggctgtgccaaagctgaatctggaccagcctctctgacgatctgtgagaaagcatccgggtacctgcaggactccctggccacaacccctgcaagtagcagcattgacaaagccgtacagctgttcttgtgtgacctgctgctggtggtcaggacaagtctgtggcggcagcagcagcctcctgccccggctcctgcggcgcaaggaacatctagcaggccacaggcttcagctctagaactgcgggggttccagcgagacctctcttctcttcggcgcctcgcccagagtttcaggccagcaatgcggagattgatggatgtcctgaccagcgagtcggcctgggcccttcctcagcacctgggcaaaggttttcccagccctagcggacacaaagtgcctggatggcatggtagaatggactag

SEQ ID NO: 26512 - DNA, 3534 bp, synthetic construct
  misc_feature 1..3534: note = Description of Artificial Sequence: Synthetic coding sequence
  source 1..3534: mol_type = other DNA
atggacgagccccccttcagcgaggccgccctggagcaggccctgggagagccctgtgatcttgacgctgccctgctgacagacattgaaggtgaagtgggggctggtcgagggagagcaaacggcctcgacgcacctcgcgcgggtgcagaccggggcgcaatggattgcacattcgaagacatgctccagcttataaacaatcaggattccgacttcccaggtctctttgaccccccatatgcgggatccggggccggggggacggatcccgctagccctgataccagcagccctgggtccctttctcctcccccggcgacattatcctcctcattagaggcatttctctctgggccacaagccgccccttcacccttatccccaccccagccggctcccacgccactcaagatgtacccttcgatgccagccttctctcctgggcctggcatcaaggaggaatctgttccactatctatactgcagacacccacaccccagcctctgccaggagcgctgctccctcagtcatttcctgcccctgccccacctcagttctcgtccacacccgtcctgggctatccttctccccccggtggcttcagcaccggttcccctcctggcaatacccaacaaccgttgcctggactccccctagccagtccgcccggggtaccaccagtgagtctccacacccaggtgcaaagcgtggtgcctcagcagctgcttacagttacagccgccccaaccgcagcacctgtcaccactacggtcacgtcgcagatccagcaggtgcctgttctcctgcagccacacttcatcaaggctgactcgctgcttctgaccgcaatgaagacagatggtgcaacagtgaaggctgccggattatcccctctggtgtccggtacgacggtccagactggtccactgcccaccctggtaagcggcggaaccattctggccaccgtgcctctggtggtcgatgcagagaagctccctataaaccgtctggccgctggttccaaagctccagcctctgcgcaatctagaggagaaaagcgcacagctcacaatgccatcgagaagcgctacagatcctccattaacgataaaatcatcgaactcaaggatctggtggtcggcacagaggcaaaattaaataagtcagctgtactccggaaggcgatcgattatatccggttcttgcagcacagcaatcagaagctcaaacaggagaatctgtccctcagaacagctgtacacaaatcaaaaagcctgaaagatcttgtttccgcttgcggaagcggaggtaataccgatgtactgatggagggcgtgaagactgaagtggaagacacgctgacaccgcccccctcagatgccggaagcccctttcaatcttccccgctaagtctgggttcgcgcggcagtggctctggggggagtggctctgattctgaacctgattctccagtgttcgaggactccaaagccaaacctgagcagcggcctagcctccactcaagaggaatgctggatagatccaggctcgctctgtgtactctggtgtttttgtgtctctcatgcaaccctcttgcctctctgctgggcgcacgaggcctgccttcaccatcagacactacttctgtctatcactcgcctgggagaaatgtactcggcactgaatctagagatggcccaggctgggcgcagtggctacttcctccagtggtgtggctgctcaatgggctacttgtcctcgtgtccctcgtattactttttgtctacggtgagccagtgacccgcccacacagcggccctgccgtctatttctggcggcatcgtaagcaggctgatctggacttggcaagaggcgatttcgcccaggctgcccagcaactgtggcttgctctgagagccctgggacgaccactccccacgagccacctggatctggcctgcagtctgttgtggaacctaatacgacacttactgcagcgtctgtgggttggacgctggctggcgggaagggctggcggtctccaacaggactgcgccctgcgcgtcgacgcgtccgctagcgcacgtgatgcggctctggtataccataagctccaccagctgcacacaatgggaaagcacacaggaggccaccttacagcaaccaatctggccctgtcagccctcaaccttgcagagtgtgcaggagacgctgtgtctgtggcaaccctggctgagatttacgtcgctgcagctttgagagttaaaacctctcttccacgagctcttcattttctgacccgatttttcctgtcctctgcccgtcaggcgtgcctggcccagtctggcagcgtcccgcctgctatgcagtggctgtgccatcccgttggccataggttttttgtcgacggcgactggagcgttttgtccactccgtgggaaagtctttattcattggctggaaacccagtggatccactcgcccaagttacgcagcttttccgagaacacttacttgaaagagccctgaactgtgtcacccagcctaatccaagtccagggagtgccgacggagacaaggaatttagcgatgctttagggtacttgcagctgctaaactcttgcagtgacgcagctggtgctcccgcatattccttcagcatcagttcatccatggctactactactggggtagatcctgtagcaaaatggtgggcctctttaaccgccgtggtgattcattggcttagaagggacgaggaggcggcagagaggctttgtccactggttgagcacctccctcgggtgctgcaggagagcgaaagaccactgcctcgggctgccctgcattcattcaaagccgcccgggccttgttgggctgtgcaaaggccgagtcaggacccgcctcactgacaatctgtgaaaaggcatccgggtacctccaggactccctcgcaacaacaccggcctcctcatccattgacaaggccgtgcagctgtttctctgcgacctgctgctggtggtaaggaccagcttatggcggcagcaacagccaccggcccccgcaccggccgcacaaggcactagcagccggcctcaggcctcagcccttgagttgaggggattccaaagggacctgtcttctctgcgccgactcgcacaaagcttccggccagctatgaggcgagtatttcttcacgaggccaccgcgcggctcatggctggagcttcgccaacacgtacacaccaattgctggataggtccctcagacgacgagctggccccggcggtaagggcggagctgtagctgagctggagccccgcccaacgagacgggagcacgcagaggccttattactagcctcctgctacctgcccccaggcttcctcagtgccccgggccagcgggtcggaatgctggctgaagcggcaaggacactcgaaaaattgggtgacaggagattgttgcacgattgtcaacagatgctgatgagactggggggcggcaccacagtgacctcttcctag

SEQ ID NO: 26513 - DNA, 3468 bp, synthetic construct
  misc_feature 1..3468: note = Description of Artificial Sequence: Synthetic coding sequence
  source 1..3468: mol_type = other DNA
tgaaagatccggcgggccctgaccggcgaggtgggcgccggccggggtagagcaaacgggcttgacgctccccgagccggagccgatagaggcgcaatggactgtacattcgaggatatgttgcaattgattaataaccaggattccgactttccaggcctgtttgaccccccctatgctggaagtggagcaggcgggaccgaccccgcatcccccgacacatctagccccggctcactgtccccaccaccggcaaccctttcttcttcgctggaagctttcttatcaggcccccaagctgcccccagcccgttgagccctcctcagcctgcacctaccccacttaaaatgtacccaagcatgcctgccttttcccctggcccagggatcaaggaagaatccgtgccactgtccatactgcagaccccaaccccccagccccttccaggggcccttctgcctcagtcctttcccgcgcctgcacccccacagttttcctcaactccagtgctggggtacccttctccaccaggcgggttttctaccggttcgcctcctggtaatacacagcagccactgccaggactgcctctggcctccccacccggggtgcccccagtgtccctgcacacccaggtgcagagtgtggtaccccagcagttgttgacagtgaccgccgctcccaccgccgctccagtcaccacaacagttacctctcagatccagcaggttccagtgctgcttcagccacacttcatcaaggcagactctttgctgcttacagccatgaaaactgatggcgcgacagttaaggccgccggactgagccctctagtctccgggacgacagtgcagaccggacccctcccgactctcgtgtccggcggcaccattcttgccaccgttccactggtggtggatgcagaaaaattacccattaaccggctagcggccggctcgaaagcccctgcttccgcgcaatctcgaggcgaaaaacgaaccgcccacaacgctattgaaaaacggtacaggagctccatcaatgataagattatcgagctcaaagatttagtcgtaggtactgaggcaaagctgaataaatctgctgtgctgcggaaagcaatcgactacataaggtttcttcagcacagcaatcagaagctgaagcaggaaaacctctctcttcggaccgccgttcacaagtccaagtcactgaaagacttggtgagcgcatgtgggtcaggcgggaataccgatgtccttatggaaggcgtgaaaaccgaagtggaggataccctcacccccccaccttctgacgcgggaagcccatttcaatcctctcccctgtcactgggatctcgcggctctggtagtggcggctccgggagcgatagtgaaccagacagtccagtttttgaggatagtaaagccaaaccggagcagcgaccctccctgcattctagagggatgctcgacagatctaggctcgccctctgcacactcgtcttcttatgcctgtcttgtaaccctctggctagtctcctgggcgcaaggggcctaccatccccttcagatacaacatccgtttaccactctcctggtagaaatgtactgggaacagaatcccgggacgggcccggctgggcccagtggctgcttccccctgtggtgtggttactgaacgggcttctcgtgctcgtgtccctggtcttgctctttgtgtacggcgagccagtaacaagaccccactctgggccggcggtgtatttctggcgccacaggaaacaagcggacctggatcttgcaaggggcgactttgctcaagccgcacaacaactgtggctggcccttagagctttaggccggcccctccctaccagtcacctggatctggcctgtagcctactgtggaacctcattcggcatctgttgcagagactttgggtgggtcgctggttggcaggtcgcgctggtggtttgcagcaggattgcgcgcttcgagtggatgcgtcagcttcagctcgcgatgccgcactggtttatcacaagctgcaccagttacacacaatgggaaaacacactggtggccatctgactgcaacaaacctggctttgtctgcactcaaccttgcggagtgtgccggcgatgcagtcagcgtggccaccctggccgagatttacgtggccgctgcgctgcgagtcaagacttcgctgcccagagccctccactttctgaccagattcttcctctccagtgcacggcaggcctgcctagctcagtccggatccgtccctccagccatgcaatggctctgccatcctgtgggccatcgctttttcgttgatggcgactggagtgtgctcagtaccccctgggaatcactgtacagtctcgccggtaacccagtagaccctctggcccaggtcacacagttgtttcgcgaacacctgctggagcgggctcttaactgcgttacgcaacccaatccctcaccaggttcggccgacggggataaagaattcagcgatgcgcttgggtacctgcaactgctcaacagttgctctgatgctgccggggcccccgcgtacagtttctcaatcagctcttcaatggctaccacaaccggcgttgaccccgttgccaagtggtgggcaagcctgacagctgtcgttattcactggctcagacgggacgaggaggccgccgaacgtctgtgccccttagtcgaacatttaccaagggtgctgcaggaatcagagaggccactgcctagagcagccctgcacagctttaaggccgcgagggccctcttgggatgtgccaaggcagagtctggccccgcttccctcacaatctgcgagaaagcttcaggatacttgcaggattccctggcgacgactcctgcttccagtagtatcgacaaggccgttcagctttttctgtgcgacttgttgttagtggtgagaacttccttatggcgccaacagcagccacctgcccccgcccccgcggcacaaggaacctcaagtaggccgcaagcctcggccctggaactgagaggatttcagagagacctgtcctccctgaggcgtctggcccagtcttttcggccggcgatgcgacgggtattcttacacgaagcaacggctagactgatggccggagcctcccccacgaggacccaccagctgctggatcggagcctccgcagacgggccggccccggtggaaaggggggcgccgtggccgagctggagccacgccccactcgccgtgagcacgctgaggctctccttttagctagctgttacctccctccaggtttcctttccgcacctggccagcgcgtcgggatgttggctgaggctgccaggaccctggaaaagctgggcgaccgtaggctgttacacgactgccagcagatgttgatgcggctgggaggaggtactacagtcacaagcagttag

SEQ ID NO: 26514 - DNA, 2301 bp, synthetic construct
  misc_feature 1..2301: note = Description of Artificial Sequence: Synthetic coding sequence
  source 1..2301: mol_type = other DNA
atgctggcccacctgagccgggccgccccctgccccctggccgccggcgcggtggccgctgtggccgtggcagtcacccgatcattgacggctcaatctctccggaccgccagacttgggcctgcgacggtgccaccttcaccccttcccgcaatcagcagcgaaccacacgatagggccgggaagactctgaccgaccccactagtcattttattgatcgcattaccgaagcctggtcccacgtgggatctcactccaaggccaagccagagcagcgacccagcctacatagccgaggcatgctggaccgttcaagattggctctgtgcactctggtctttttatgtctgagttgcaatcctctggcgagccttttgggagccagggggcttccttccccatcagacacgaccagcgtctaccactctccgggacggaacgtgctaggtacagagtccagggatggccctggctgggcccagtggttgctccctccagtcgtttggcttctcaatggacttctcgttctagtcagtctcgtactgctcttcgtttacggagaacctgtgacacgccctcattcaggccccgccgtgtatttctggcgccatcgtaagcaggccgatctggacctggcaaggggagacttcgctcaggcagcgcaacagctgtggctagctttgagagcacttggccggcccctgccaacctcccaccttgacctggcatgctctctgctgtggaatctcatccgccatctcctgcagcgtctatgggttggtcgttggctggccgggcgcgccgggggactacagcaagattgcgccctgagagttgacgctagtgccagtgcgcgagatgctgcactcgtataccacaagctgcaccagctccacactatggggaaacataccggaggccaccttaccgccacaaacctggctctgtctgcattgaacttagcagaatgcgccggagacgctgtctccgtggctaccctagccgaaatatatgtcgcagcggccttgagggtgaagactagtctgccccgcgcactccacttccttacacgctttttcctgagcagtgcccggcaggcatgcctggctcagtccggcagcgtaccccccgctatgcagtggttatgccaccctgtcgggcacagattcttcgtggacggtgattggagcgtgttgagcaccccctgggagagtttatatagcctggccggcaatcctgtcgatccccttgcccaggtgacccagctttttagagaacaccttcttgagagggcgttgaactgtgtaacccagccaaacccctcccccggctctgcggacggcgataaggagttttccgatgcactgggttatttacagttactcaatagttgcagtgacgcagcgggtgcccctgcttacagtttctccatctcatctagtatggccacgacaacgggtgtagatccagtagcaaaatggtgggccagtctcacagctgtcgtgattcactggctgagacgggatgaggaggccgctgaacgcctctgccctctagtcgagcacctgcccagagtgttgcaggagtctgagcgcccattgcctcgcgccgccctgcacagtttcaaagcagctcgcgcccttctgggctgtgccaaggccgaatctggccccgctagcctgacgatctgtgagaaggcttctggctacttacaggatagtctcgcaacaactcctgcatcctctagcatcgataaggcggttcagctctttctatgcgatctgctgctagtggttaggacctctctatggcggcagcagcagccaccagcacctgcccctgctgcccaggggacaagcagccggccgcaggcctcagccctcgaactcagagggttccaacgtgacttgtctagcttgcgtcggcttgcccagtcatttaggcctgccatgcgccgggtctttctgcacgaagccacagccagactgatggcaggggcttcacctacccggacccaccaattgttggacaggagtctgcggagacgggcaggacccggaggcaagggaggcgcggttgccgagctggaacccagacctaccaggcgggaacacgccgaggctctactcttggcttcttgctatctgcccccgggcttcctgagtgcgccgggccagagggtaggcatgctggctgaggcagcccgcaccctggagaaacttggcgacaggcggcttctgcatgactgccaacaaatgctgatgcgcctgggtgggggcaccaccgtcacctctagctag

SEQ ID NO: 26515 - DNA, 2682 bp, synthetic construct
  misc_feature 1..2682: note = Description of Artificial Sequence: Synthetic coding sequence
  source 1..2682: mol_type = other DNA
atgaagaccgacggcgccaccgtgaaggccgccggcctgagccccctggtcagcggcactaccgtccagactggccctctgcctactctggtaagtggggggactatcctggccactgtccctctggtggtggacgcagagaagctgccaatcaacaggctagccgccggcagtaaagcgccagctagcgcgcagagccggggcgagaagcggacagcgcataacgcaatagaaaagcgttaccgcagcagcatcaacgataagatcattgaattgaaggatctggttgtgggtactgaagctaagctgaataaaagcgccgtcctcagaaaggcaatagattatattcgattcctgcagcactccaaccagaagcttaagcaggagaacctgagtcttaggaccgccgtgcacaagtcgaagtctctgaaagatctcgtgagcgcatgtggcagtggcggcaacactgacgttctgatggagggagtgaagacagaggtcgaagacacactgaccccacctccgagcgacgcaggctccccttttcagtcaagtcccctctccctcggatctcgcggatccggttcaggtggatcagggtcagattccgagccggacagcccggtgttcgaagactcaaaggcgaagccagaacagcgcccatcattgcacagtagagggatgctggacaggtcccggttagcactgtgtactctcgtcttcctgtgcttatcatgcaatcccctggcttccctcctgggggccagagggttgccgagccccagcgatacaacaagtgtctaccactctcccggacggaacgtgctaggaacagaaagccgggacggtcccggatgggctcaatggctgctgcctcctgttgtctggctgcttaacgggctgttagtgctggttagccttgtgttactgttcgtttatggggagccggtgacacggccacactctggtccggccgtgtatttttggcgacatcgaaagcaagctgatcttgatttagcccgtggcgactttgcccaagcagcccaacagttgtggctcgccctccgggcattggggcgacccctacccacctcccacttggatctggcctgctccctgctctggaatctcattcgacacctgctgcagaggctctgggtggggcgctggctggcggggagagccggaggtttacagcaagactgcgctctacgcgtcgacgccagcgcctcagctcgcgacgcagctctggtgtaccacaaattacaccagcttcatacaatgggcaagcatactgggggccatctgactgccactaacctcgcactcagtgcgctgaaccttgcggagtgtgctggcgatgccgtttccgtggcgactcttgctgagatctacgtggcagcagcactgagagtgaagactagcttgccaagagccttgcatttcctcacaagattcttcctgagttccgcccgccaggcctgccttgcccaaagcgggagcgtgcctccagctatgcagtggctttgccatccggttgggcataggttttttgtcgatggcgactggtctgtgctttccacaccctgggagtccctctattccctagctggaaatccagtggaccccctggcccaggtgacacagctgttccgtgaacatctccttgaaagagctctgaattgcgtgactcaacccaatccatcacctggatccgctgatggtgataaggagttcagcgatgccttaggatatctgcagcttctgaactcctgctcagatgcggccggtgcacccgcttatagctttagtatttcctccagtatggcaacgacaacaggtgtggatcccgtcgctaagtggtgggcctctctgacagctgtggtgatccattggctccggagggatgaggaagcggctgaacgcctctgccctctagtggaacacttgccgcgcgttttgcaagagtcagagagacctctcccacgagctgcactccactcttttaaggctgccagggcactgctgggctgtgcaaaggctgaatcgggccctgcgtccctcaccatctgtgaaaaggctagcggttacctccaggatagcctggccactacccccgcaagttcctcaattgacaaggctgtccagctgttcctttgcgatcttctgctggtggtgagaacgtccttgtggagacagcagcagccacccgctcctgcccctgctgcacagggaacaagcagtaggccgcaagccagtgctctcgaacttcgcgggtttcagcgagatctgtcctctttgagaagactcgcgcagtcattccggcccgcaatgcggcgagtttttctccatgaggccactgccaggctgatggcaggcgcctccccaactagaacccaccagctgctggatcggtctctccggaggcgcgccggacccggtggtaaaggaggtgccgtcgccgaattagagcctcgacctacccgcagggaacacgccgaagccctgctattagctagttgctacctgccccccggattcctctcagctcccggccaacgggttggcatgttagccgaggccgcacggaccctggagaaactgggggaccgccgcttgcttcacgactgtcagcaaatgctgatgcggctcggcggagggacaactgtgacatccagctag

SEQ ID NO: 26516 - DNA, 2955 bp, synthetic construct
  misc_feature 1..2955: note = Description of Artificial Sequence: Synthetic coding sequence
  source 1..2955: mol_type = other DNA
atggactgcaccttcgaggacatgctgcagctgatcaacaaccaggatagtgacttccctgggctgttcgacccaccgtacgccggcagtggagcaggtggtacagaccctgcttccccggatactagctctccaggctccttgtcaccccctcccgccaccttgtcgtccagtctggaagcttttctgtccggtccacaagcagctccaagtccccttagtcctccacagcccgctcccacccctctgaagatgtatccctccatgcccgctttctcaccaggacccggaattaaggaagagtctgtccctctttcaatcctccagacacccacaccccagcccctgccagtacctaccctggtttcgggcgggacaatcctagccacagtgcccctggtggttgacgcagagaagctgccaattaatcggctcgccgctgggtctaaggccccagcatctgcacagtctaggggagaaaagcgcacagctcataacgcgatagagaaaagatatcgtagttccataaatgataagattattgaattgaaggatctcgtcgtcggaaccgaagctaaactgaataagagcgcggtgctccgcaaggcaattgactacatccgatttctgcaacatagcaaccaaaagctgaagcaagagaatttgtctctgcggactgcggtacataagtctaagagtctcaaagatctggtgtcagcttgcgggtcaggcggcaacactgacgtgcttatggagggtgtcaaaaccgaggtagaggatactctgaccccgcccccttccgacgccggatcgccttttcagtcctccccactgagcttgggatctcggggatctggatcaggcggctcgggctcagattcggagcctgacagtcccgtattcgaagactccaaagcgaagccggagcagagaccaagcctgcactcaaggggaatgctagataggtcaaggcttgccctctgcactttggtctttctgtgcctgtcatgtaacccgttggcctccctcctgggagcacggggcctgcccagtccctctgacaccacaagtgtttatcactccccaggcaggaatgtgctcggcaccgaaagcagggacggtcccgggtgggcccaatggctactgcccccagtggtctggctactcaatggcctgttagttttagtaagcctagtgcttctgtttgtctacggggaacccgtgaccaggccccattcgggccccgcagtgtacttttggcgccataggaagcaggccgacctggacctcgcacgaggagacttcgcccaggcggctcaacagctctggttagctctacgagccctgggacggccgcttcctacatcacatctagacctcgcgtgttccctcctctggaacctgatcagacatctgctccagcgattgtgggtggggagatggttggccggccgagccgggggactgcaacaggactgtgccctccgtgtggacgcatcagcttcagctagagacgctgctctggtatatcacaagctacaccagctgcatactatgggtaaacacaccgggggtcaccttaccgccaccaaccttgccctcagtgcactcaacctcgctgagtgtgcgggtgacgctgtgtcagtcgctacacttgcagaaatttacgtggccgctgccctgagggtcaaaacaagcttgccccgcgcgctgcatttcctaactcggtttttcttgtccagcgctagacaggcctgcctcgctcaaagcggatccgtgcctcctgcaatgcagtggttgtgccaccctgtaggccacagatttttcgtggacggagactggagcgtgctaagcacaccctgggaatctctgtacagcctggcgggaaacccggtcgatccactcgcccaggttacacagctgttcagagaacacctactggagcgagctctgaattgcgtgacccagcctaacccctcccctggcagcgcggatggcgacaaggaattctcagacgccttgggctaccttcagctgttaaatagctgttcagatgcggcgggcgccccagcctacagcttttcaatcagctcctccatggcaaccactactggggttgatcctgttgccaagtggtgggcatctctgacggcagtcgtgatccactggttacgtcgtgatgaagaggctgcagagcgcttgtgcccattggttgagcacttacccagagttctccaggaatctgagaggcctctcccccgggccgcattgcattctttcaaagctgctagggccttacttggctgtgccaaagcagaaagcgggcctgcttcacttacgatttgcgagaaggcctcgggttacttacaggacagcttggctacaacgccagcgagttcttcaattgacaaggctgtgcagctattcctgtgcgacttactgctggtcgttagaacttccctctggcgacagcaacagcctcccgcccccgctccggctgcccaagggacatcgagtcggccgcaggcaagtgctctagaacttaggggcttccaaagggatctttccagtctccgcaggctggcccagtcatttcggcctgcaatgcggcgcgtgtttctccacgaggccactgcccgcctcatggctggggccagtcctacacgaacccaccagctgcttgatcgcagcctccgacggagagccggtcccgggggtaaaggaggcgctgtggctgagcttgagcctagaccaacccgcagggagcacgccgaggcattgctcctggcaagttgttacctcccccccggcttcctgtcagcacccgggcagagagtgggcatgctcgcggaagctgcccgcacgctcgaaaagcttggcgacagacgactactgcatgactgtcagcagatgttgatgcgccttggcggaggtaccaccgtgaccagctcctag

SEQ ID NO: 26517 - DNA, 3222 bp, synthetic construct
  misc_feature 1..3222: note = Description of Artificial Sequence: Synthetic coding sequence
  source 1..3222: mol_type = other DNA
atggactgcaccttcgaggacatgctgcagctgatcaacaaccaggacagcgactttcccggcctctttgaccccccccagccagctcccactcccctgaagatgtatccatccatgcctgctttctccccgggccccggtattaaggaagagtccgtgcctctgagcatattacagacccccacaccccaaccactgcctggagccctgcttccccagtcattcccagcgccagccccccctcagttcagtagcacacccgttctggggtatccatcgcccccaggaggattttccactgggagcccgcccggtaacacacagcaacccttgcccggcctccccctcgccagcccgccaggcgttcctccagtgtctctacacacccaggtgcagagtgtcgtaccacagcagctgctgaccgtgactgccgccccaaccgccgccccagtcaccacaaccgtgacttcccagattcagcaagtccctgtcctactgcagccccacttcatcaaggcagattcattgcttttgaccgctatgaagacagacggagcgacggtaaaagccgccggcttgtccccacttgtcagcgggaccacggtgcagactgggccgctgcccaccttggtgtctggagggacaatcctggctactgtgcctctggttgtcgacgcagaaaagctgcctattaaccggctggccgctggatcgaaggcgcctgccagcgctcaaagccggggagaaaaaaggacagctcacaatgctattgagaaaagatacaggtcctcaattaatgataagattattgaactcaaggatctggtcgtgggtacggaggccaagctcaacaaatctgcggtgctgcgtaaagcgatcgactacattcgattcctgcagcattcaaatcaaaagctgaagcaggagaatctaagcctccgcactgcagtacacaaatctaaatctctgaaagatctagtgagtgcatgcggctccggcgggaacacggatgtcttgatggagggagttaaaactgaagttgaggatactcttaccccaccgccgtcagacgccgggtccccttttcagtccagcccacttagccttggctcccgcggtagtggatctggcggctctggtagcgactcagagcccgatagccccgtgttcgaggactctaaggccaagcccgagcagcgaccctcgctccattcaagagggatgctcgatcgctcccgcttggccctgtgcacattagtatttctctgcctgagctgtaatccactcgcttccctgttaggagctcgcggactgcccagtccaagcgatactacttctgtctatcactcgcctggccgcaatgttctgggtaccgagtcccgcgacggccctggctgggctcagtggttgctcccgccagtggtttggctgctgaacggactgctggtcttagtcagtttggtgctgctgttcgtgtatggcgagcccgtgacgaggccccacagcggtcctgcagtttacttctggcgtcacaggaagcaggcagatcttgacctcgcaagaggcgacttcgcccaagccgcccagcagctgtggctggcgctccgcgcacttggcaggcctctgcccaccagtcatctggacctagcctgctcacttctctggaatctgatacggcacttgctccagagactctgggtgggaagatggctggccgggagggctggcggattgcagcaggattgcgctctccgtgtcgacgcgtctgcttccgcacgggacgccgccctcgtataccataaattacaccagctgcacacgatgggcaagcacaccggcgggcaccttacagcaaccaatctcgccctttctgccctcaaccttgctgaatgcgcaggagatgctgtgtctgttgcaacattggccgaaatttacgtcgccgctgctctccgcgtgaagacaagcctacctcgagccctacactttctaacccgcttcttcctgtctagcgccaggcaggcgtgcctggcccaatccggctccgtgccccccgccatgcagtggctgtgccatcctgtgggccacagattcttcgttgacggagactggagtgtcctttccacaccatgggaatctctgtacagcctggccgggaatcctgtggatccattggcacaggtgacgcaactgttccgagaacatctgctagaaagggctcttaactgtgtcacgcagccaaacccaagtccagggagcgcggacggcgacaaagagtttagcgacgctctgggctatttgcagctcctaaactcctgctcagatgccgccggcgccccagcctattcgttctcaatttcgagtagtatggccaccacaaccggggtagacccagtcgccaaatggtgggccagcctcaccgccgtcgtgatacactggctaaggcgtgacgaggaggcagctgaaagactgtgtcccctggtggaacacctcccacgcgttctgcaggagtctgaacgcccacttcctagggctgctctccactcttttaaggcagctcgggcgttgctgggatgcgccaaggctgaatcgggaccagcaagtctgacaatatgcgagaaagccagcgggtatcttcaggatagccttgcaactacccccgcatccagttcaatcgacaaagctgttcagctcttcctgtgtgatctcctgttggtcgtcagaacaagtttgtggcggcagcagcaaccgccagcgcctgcccctgcagctcaaggaaccagctcgcgaccccaggccagtgcactagagttgaggggtttccagagagatctgtcttcactgaggcgtctggcacagagctttcgtcctgccatgcggagagtcttcctccacgaggcgactgcccggttgatggctggtgcctcaccgactcggacccaccagttgttggacagatccctgcggcgcagagcgggaccaggggggaaaggcggcgcggtagcagagctggagccacggccaactcggagagagcacgcagaagccttactcctcgcttcttgctatctcccaccgggctttctaagcgctccagggcagcgagtcgggatgctggctgaggccgctaggacccttgaaaaacttggagatagaaggctgcttcacgactgccagcaaatgttaatgagactgggggggggtaccactgtcacctccagttag

SEQ ID NO: 26518 - DNA, 1413 bp, synthetic construct
  misc_feature 1..1413: note = Description of Artificial Sequence: Synthetic coding sequence
  source 1..1413: mol_type = other DNA
atggacgagccccccttcagcgaggccgccctggagcaggccctgggggagccatgtgacttggacgccgcactcttgacagacattgaggatatgttgcagctcatcaacaaccaggattcagatttccccggattatttgatccaccatacgctggctcaggcgctggcggaacagatcctgcctctccggacacatcatctcctggtagtcttagcccgccacccgccaccctgtcgtcctccttggaggcttttcttagcggacctcaggcagccccttcccctttgagtcccccccaaccagcgcccactccattgaagatgtatccttccatgcccgccttttcaccaggtcctgggatcaaggaagagtctgtacccctctctatactccagactccaacgcctcagccgctgccaggtgccttgctgccccaaagcttccctgcgcccgctccaccacagttcagctccacgcccgtgctcggctatccatcccctcctggcggatttagtacaggttctccaccgggcaacacgcagcagccgctacccgggctgcccctggcatctcctcctggcgtcccacctgtgtcactccacactcaagtgcaatctgttgtgccccaacagttactgaccgtcacagctgcaccaacagccgctcccgtgacgaccactgtgacaagtcagatccaacaggtccctgtgctcctccagcctcatttcattaaggccgattccctgttattgacggctatgaaaactgacggagctaccgtcaaagcagctggcctgtctccgctggtgtccgggacgaccgttcagaccggccctctgcctacactcgtcagcggtggtacgattctggccactgtgcccttggttgtcgacgctgagaaattgcctattaacagactggccgcaggaagcaaggctccggccagtgcccagagtaggggtgaaaaacgaacagcccacaatgccatagaaaagagataccggtccagcattaatgacaagatcattgaactgaaagaccttgtggtaggcacagaggccaagctaaacaaaagcgccgtccttcgcaaggccatcgattacattagatttctccagcactctaaccaaaaactaaagcaagagaacctcagcctgcgaacagctgtccacaaatccaagagcctcaaggatctggtttcagcctgcggcagtggaggaaataccgacgttcttatggaaggcgtcaaaacagaagtcgaggacacattgactcctccacctagcgatgcaggaagcccgtttcagagctcaccactgagcttaggctccagggggtcaggcagcggcggatccggtagtgactctgagccagattctcctgtattcgaggacagcaaaaccgaatag

SEQ ID NO: 26519 - DNA, 645 bp, synthetic construct
  misc_feature 1..645: note = Description of Artificial Sequence: Synthetic coding sequence
  source 1..645: mol_type = other DNA
ctgatgcccgcctgcctgcccggcaagcacaccggcggccacctgaccgccacaaatcttgctttgagcgcactgaaccttgcagagtgcgccggagatgcggtctctgtggctactttggctgagatctacgtggcggctgcgctacgagtaaaaacctcactgccccgcgccctgcatttcctgacacgattctttttaagctccgcacgacaggcttgcctggctcagtcaggatcagtgcctcccgctatgcagtggctctgccacccggtgggccaccgcttctttgtagacggcgactggtccgttctaagcaccccgtgggaatcactgtacagtctggctggcaaccctgtcgatccactggctcaggtaacacaactctttcgggaacatctactcgaaagggcacttaattgcgttacacaaccaaaccccagtcctggatccgctgatggggataaggagttcagtgacgcacttggatatctccaactgttaaacagctgtagcgacgcagcaggtgctcccgcctactccttcagtatctccagctcaatggctacaaccacaggtgatccctgtcccgggcagctgtgcactccgtctagactcccagggccctgctgggctgtaccatag

SEQ ID NO: 26520 - DNA, 747 bp, synthetic construct
  misc_feature 1..747: note = Description of Artificial Sequence: Synthetic coding sequence
  source 1..747: mol_type = other DNA
atggagcgggccagcctgatccagaaggccaagctggccgagcaggcagagcgatacgaagatatggctgcgttcatgaagggcgccgttgagaagggagaagagctgagctgtgaggagcgtaatttactgagcgtggcatataagaatgtagtaggtggccagcgggccgcatggcgagttctgagctctattgagcagaagagcaatgaggagggttctgaggaaaagggccccgaggtgcgcgagtaccgcgagaaagtagaaaccgaactgcaaggggtctgcgacaccgtgcttggtctcctcgacagtcatttgattaaagaggccggcgatgcggaaagccgggtcttttatctgaagatgaagggcgactattacagatatttagccgaggtggccactggcgatgacaagaagcggattatcgacagcgcccgcagcgcataccaggaggccatggacatcagcaagaaagagatgcctcctactaaccccatccgccttgggttagcattaaactttagcgtatttcactacgagatagctaatagtcctgaagaagctatcagcctcgcaaaaaccacattcgatgaagcaatggccgacttgcacacactgtctgaggacagttacaaggattcaacacttattatgcaattgcttagggataatctgactctgtggacggccgacaatgctggcgaggagggaggtgaggcaccccaagagcctcagtcttag

SEQ ID NO: 26521 - DNA, 651 bp, synthetic construct
  misc_feature 1..651: note = Description of Artificial Sequence: Synthetic coding sequence
  source 1..651: mol_type = other DNA
atggagcgggccagcctgatccagaaggccaagctggccgagcaggctgagcggtatgaggatatggctgcttttatgaagggagctgttgaaaaaggcgaagagttgtcctgtgaggaacgcaacctcctgagtgtggcttataagaacgtggtgggcggacagcgagcggcttggagagtgctaagctcaattgaacaaaagtccaacgaggagggttctgaagagaagggccccgaggttcgggaatatagagtgttctatcttaagatgaaaggggattattacagatatttggccgaggtcgccactggagatgacaagaaaagaattatagactcagctcgttccgcatatcaggaagctatggatatctccaaaaaggagatgccacctaccaatcccatccgcctcggtctggccctcaactttagtgtcttccactatgagatcgccaacagtccggaagaagcaattagcttagccaaaactacctttgacgaggctatggcagatctccacactctttcggaggacagctacaaggactctacactgataatgcagctattacgggataacctcactttatggactgcagataatgctggagaggaaggcggagaagctcctcaggagccccagagctag

SEQ ID NO: 26522 - DNA, 3702 bp, synthetic construct
  misc_feature 1..3702: note = Description of Artificial Sequence: Synthetic coding sequence
  source 1..3702: mol_type = other DNA
atgggcttcctgaagctgatcgagatcgagaacttcaagagctacaaagggaggcagataatcggccctttccagcggttcaccgccattatcggccccaatggttcagggaagagtaatctcatggacgccatctcttttgttcttggggagaagacatccaacttaagagtcaaaactcttcgtgacctgattcatggtgctcccgttgggaaaccagccgctaacagagcctttgtcagcatggtgtactccgaggaaggggctgaggatagaaccttcgcaagagtgatagtagggggatcatctgagtacaaaatcaataataaagtcgtgcaattgcatgaatacagtgaggagttggagaagctcggcatccttattaaggcaaggaacttcctggtattccagggagcggtggagagcatcgctatgaagaaccctaaggagagaacagccttgttcgaggagatcagccggtctggcgaattggcccaggagtacgataaacggaagaaggaaatggtgaaagccgaggaggatactcagttcaattaccatcgaaagaagaacatcgcggccgaaagaaaggaagccaaacaggagaaggaggaagcggaccggtaccagcgattaaaggatgaggttgtacgcgctcaagttcagctccagctgttcaagctctatcacaacgaggtcgagatagagaagctcaacaaagagctagcctcgaagaataaggagatagaaaaggacaagaaacgaatggataaagtcgaagacgagctgaaagagaagaaaaaggaattaggaaagatgatgagagagcaacagcaaatcgaaaaggagattaaagaaaaggactccgaactgaaccaaaagagacctcaatatatcaaagcaaaggaaaatacatctcacaaaattaagaagctggaggcagcgaaaaagagcctgcaaaatgcacaaaagcactacaaaaaacgcaagggggatatggatgaactggaaaaagaaatgctcagtgtcgagaaagcccgccaggagtttgaggagcggatggaggaagaaagccaaagccaggggcgggatttaactcttgaggaaaatcaggtcaaaaaataccaccgcctaaaggaagaagcatctaagcgcgccgcaacactagctcaggaacttgaaaaattcaaccgggaccagaaagccgaccaggatcgcttagatttggaggagcggaaaaaggtggaaaccgaggcaaagattaaacagaagctaagagaaattgaagaaaatcagaaaaggattgaaaagctggaggaatatataacgacttccaaacaatctctggaggaacagaaaaaactcgagggagagctgaccgaagaggtggaaatggcaaaaaggcgaatcgatgagatcaataaggaacttaatcaagtgatggaacagctgggagacgctcgaatagatagacaggagagtagccgccaacaaagaaaggccgagattatggaaagcatcaagagattgtaccctggcagtgtgtatggtagattgattgacctgtgccaacccactcagaaaaaataccaaatcgctgttacaaaagttttgggcaaaaacatggacgccatcatagtcgactcagagaagacaggaagagattgtatacagtacataaaggagcagaggggagaaccagaaacatttctcccactggattacctggaggtcaagcctactgatgaaaagcttagagaactgaagggggcaaaactggtcatcgatgtgatcaggtatgagccaccccatattaagaaggccctgcagtacgcctgcggaaatgcactggtctgtgataatgtggaggacgcgcgcagaattgctttcgggggtcaccagcgtcacaaaacagtggcgctggacggcaccttgttccaaaaatctggggtcattagcgggggcgcctctgacctgaaagctaaggcgaggagatgggacgagaaggcggtcgataagctgaaggagaaaaaagagaggctgaccgaggagctgaaggagcagatgaaggctaagcgaaaagaagcggagttacggcaggtacagtcacaggcccacggattgcagatgagactcaagtactcacagagcgatctagagcaaaccaaaacgagacacctggctctaaacctgcaggaaaagagtaaactggaatccgagttggcaaacttcggcccaaggattaatgatattaaacgaattattcagtcaagagagcgggaaatgaaagatttgaaggaaaagatgaaccaggtcgaggacgaagtatttgaggaattttgtagggagatcggcgtccgcaatatcagagagtttgaggaagaaaaggtcaagcggcagaacgagattgcgaaaaagagattggaattcgagaaccaaaagactcgcctaggaatccagctggacttcgagaagaaccaactgaaagaggatcaggacaaggtccacatgtgggagcaaacggtcaaaaaggacgaaaacgagattgagaaactgaagaaggaggaacagcggcatatgaagattatcgacgagactatggcgcaactgcaagacctgaagaaccaacatttggcgaaaaagtcagaagtaaacgacaagaatcacgagatggaagagatcaggaagaagcttggaggagccaacaaagaaatgacccacctccagaaggaagtgaccgccatagaaactaaactcgaacagaagcgctcagatcggcacaatctcctacaggcctgtaagatgcaggatatcaaactgccactgagtaagggcaccatggatgatatcagccaagaagagggttcttctcagggtgaggacagcgtctctggtagccaacggatatcctcaatctacgccagagaggctcttattgaaatcgactatggtgatttatgtgaggacctaaaggacgcacaggcggaggaggagataaaacaggagatgaacactcttcaacagaaattaaatgaacaacagtccgtgctgcagagaatcgcggctccaaatatgaaagcgatggagaagctggaatcagtccgggataaatttcaggaaaccagcgatgagtttgaggcggcccgaaagagagctaagaaggccaagcaggcctttgaacagataaagaaggagagattcgacaggttcaatgcgtgtttcgagagtgtggctactaatatcgacgagatctataaggctctctccagaaatagcagcgcccaggcttttctaggtcccgaaaaccccgaggagccatatttggatggcattaactataattgtgtggcgcccggcaaaaggtttcggccaatggacaatctctctggcggcgaaaagacagtcgctgcccttgcactgcttttcgctatccattcttacaaacccgctcccttttttgttcttgacgagattgacgcagccctggacaacaccaacatcggcaaggtggccaattacataaaggagcaatctacttgcaattttcaggcaatagtgattagtctcaaggaagagttctacacaaaagccgaatcgcttattggcgtttatcccgaacaaggagattgtgtgattagtaaagtgctgacatttgatctgacaaaatatcccgacgctaatcctaatccaaatgaacagtag

SEQ ID NO: 26523 - DNA, 612 bp, synthetic construct
  misc_feature 1..612: note = Description of Artificial Sequence: Synthetic coding sequence
  source 1..612: mol_type = other DNA
atgggcttcctgaagctgatcgagatcgagaacttcaagagctacaagggacgtcagattattggcccgttccagcgattcacggctatcattggccctaatggcagtggtaagagcaacctgatggacgcaatatccttcgtcttaggcgaaaagacaagcaacctgcgagtgaaaaccctgagagacctcatccatggcgcacctgtaggaaagcccgccgcaaacagggccttcgtatctatggtctactccgaggaaggagcagaggatcggactttcgcgcgggttatcgtgggaggctcttcagagtataaaatcaacaataaggtagtacagctgcacgaatattctgaggaactggagaagctgggcatcctaatcaaagctcgaaatttcttggtctttcaaggttgctgcggcatatactgccacgagacccccaaaaggggacaactgtatctgaagatctcaaggagcggggaactggcccaggagtacgataaacggaagaaggagatggtcaaggcggaggaggatactcaattcaattaccacaggaagaaaaacatcgccgctgagcggaaagaggcaaagcaggagaaggaatag

SEQ ID NO: 26524 - DNA, 1551 bp, synthetic construct
  misc_feature 1..1551: note = Description of Artificial Sequence: Synthetic coding sequence
  source 1..1551: mol_type = other DNA
atgggcttcctgaagctgatcgagatcgagaacttcaagagctacaagggtcgccagataatcgggccatttcagcgtttcacagctattatcggccctaacggttccggtaaaagtaacctcatggacgccattagtttcgttttgggagagaagacttctaatttgcgtgttaagactctaagggacctgatccacggggcgccggtggggaagcctgccgctaatagggcgtttgtcagcatggtctacagtgaggaaggcgcagaggacaggacgtttgccagagtaatcgtgggtggatcctctgagtacaaaataaataacaaggtggtacagcttcacgaatactccgaggagcttgaaaaactgggtatattgatcaaggcccgcaatttcctggtctttcaggtgaagaaataccaccggttgaaggaggaagcctccaaaagagccgccactctggctcaggaactcgaaaagtttaaccgggaccaaaaggcggaccaggacagacttgatctggaggagcggaaaaaggttgagaccgaagctaagattaaacagaagcttcgggagatcgaagaaaatcaaaaaagaattgagaagctggaagaatatattactacatcaaagcaatccctcgaggagcagaagaagctcgagggggaactgactgaggaggtggagatggctaagaggaggatcgacgagatcaacaaagaactaaatcaggtgatggagcaacttggagacgctcgaatcgacagacaggagtcttctcgtcagcagagaaaggccgaaataatggaaagtattaagcgattgtacccaggttcagtgtatggacggttgattgatctctgtcagcctactcaaaaaaagtaccaaattgcggtgacaaaggttctcgggaaaaacatggatgcaatcatcgtggactcagaaaaaaccggccgggactgtatccaatatatcaaggaacagaggggggaacccgagacgtttttacccctggactacctggaggtaaagcccaccgacgaaaaattaagggagctcaagggggcaaagttggtgatagatgtcatacgctatgagcctccccatattaaaaaggccctccaatatgcgtgtggaaatgccttagtatgtgataatgtggaagacgcccggcggattgctttcggcggccaccagcgacacaagaccgtcgctttagatgggaccctgtttcagaaatcaggtgtcatctcaggtggagccagtgacctgaaggccaaagcgaggcgctgggacgagaaagctgtcgacaagctcaaggagaaaaaggaacgactgaccgaagagctgaaggaacaaatgaaggcaaagcggaaggaggcagaactgagacaggttcagtcccaggcccacgggctccagatgcgacttaaatacagccagtccgacctcgaacagaccaagacccggcatttggctctgaaccttcaagtggggccgggcctgcagccctgctcccccaaagcaatccacacctttttagcctag

SEQ ID NO: 26525 - DNA, 870 bp, synthetic construct
  misc_feature 1..870: note = Description of Artificial Sequence: Synthetic coding sequence
  source 1..870: mol_type = other DNA
tgatggtacacccccacccccttctacagcagcctggaggccgccctcctaaacttccggccttccgcacctgtgtttcggatgctcgaggtgtcaatacctactccacataggtatgttcgcggtaagtcgaacctgatggatgccatcagttttgtgttgggtgagaaaacctccaatctgcgcgtaaagacactgcgggacttgatacacggcgcgccagtgggaaagccagccgcgaaccgagctttcgtgtctatggtgtatagcgaagagggggctgaggacagaaccttcgccagggtaatagtggggggctccagcgagtataagatcaataacaaggttgtgcagttgcatgagtatagcgaggaactcgagaaactgggtattttaattaaggccagaaactttctggtgtttcaaggcgcagtagagtcaatcgctatgaaaaatccaaaagaacgcaccgcccttttcgaggagatcagccgcagtggggaattagcgcaggaatatgataagaggaagaaagagatggtaaaggccgaagaagatacccagtttaattatcataggaagaagaatatagctgctgaaaggaaagaggccaaacaagagaaggaggaggccgaccgctatcagcggctcaaagatgaggtagtgagagcccaggttcagctccagctgttcaaattgtatcacaatgaagtcgagatcgagaaactgaacaaggagttagcatctaaaaataaagaaattgagaaggacaagaaacgcatggacaaggttgaggacgaactaaaggagaagaagaaggagctgggcaagatgatgcgagaacagcaacaaatcgaaaaagagatctag

SEQ ID NO: 26526 - DNA, 1995 bp, synthetic construct
  misc_feature 1..1995: note = Description of Artificial Sequence: Synthetic coding sequence
  source 1..1995: mol_type = other DNA
atgagcggcgtgcggggcctgagccggctgctgagcgcccggcggctggctctcgctaaagcctggccaacagtgcttcagaccggcacacggggatttcatttcactgtggacggtaacaaacgagcgagcgcaaaggtgtccgatagtattagtgcccagtatcccgtcgttgatcatgagttcgacgccgtagtggttggagctgggggcgcaggcctgagagcagctttcggcttgagcgaggcaggcttcaacacagcttgcgtcaccaaactcttcccaacgagaagccatacagtcgctgctcaagggggcatcaacgccgcactaggaaacatggaggaggataattggagatggcatttttatgacacagtcaaagggtctgattggctcggagatcaagatgccatacattacatgacggaacaagcacccgccgccgtagtggagctggagaattatggtatgccattcagtaggaccgaggacggtaaaatttaccaaagggccttcggtggccagtcccttaagtttggaaagggggggcaagcccacaggtgttgttgtgtggcagacaggaccggccacagtctccttcatacactgtatggacggtcgctccgatacgacacttcctatttcgtcgaatacttcgcgctggatctcctgatggagaatggtgaatgccgcggtgtgattgctctgtgtatcgaagacggttctatccaccggataagggctaagaacacggtcgtcgcgaccgggggctatggcagaacctatttctcctgtacttcagcccatacatctactggtgatggcactgccatgatcacccgtgccgggctgccatgccaggatctcgaatttgtgcaatttcatcccacaggcatctatggcgctgggtgtctaattacggaaggatgcagaggtgagggcgggatattaattaacagccaaggagagaggttcatggaacgttacgcgccagtggccaaagatctcgcgagccgcgacgtggtgtcaagatctatgacactggagatacgggaaggaagaggctgcggccccgagaaggaccatgtgtacctccagctgcaccatctgccgcctgagcagctggccactcggctgcctggaatctctgagacagctatgattttcgccggcgtggacgtgacaaaggaacccatccctgtgcttcctacggtccattacaatatgggtggtattcctaccaactacaaggggcaagtgctgcgccacgtgaacgggcaggatcagatagtccctggcttgtacgcgtgcggagaggccgcctgcgcatccgtacacggcgctaatcgactcggagcaaactcgctgttagatctggtcgtctttgggcgggcgtgtgccctaagcatcgaggagtcctgccgtcctggcgataaagttcccccaatcaagccgaacgccggggaagaaagtgtcatgaatctagataagcttaggtttgcagacggctctattcggacgtctgaactgagactcagtatgcagaaatctatgcagaaccatgccgccgtgttcagagtggggtccgttctccaagaaggatgtggtaaaatcagcaaactgtacggagatcttaagcatctgaagacctttgatagagggatggtttggaatacagatctggtggagactctagaacttcagaacctgatgctctgcgcactacagacaatatacggggccgaggctagaaaagagtccaggggggctcacgctcgtgaagattacaaggtccggattgatgaatatgactactcaaaacccattcaaggacagcaaaagaaaccattcgaagaacattggcgcaaacacacgttgtcatatgttgatgttggtaccgggaaggtgacactcgagtaccgccctgtgatcgataaaacacttaatgaagctgattgtgcaaccgtccctccggcaatcagatcttattag

SEQ ID NO: 26527 - DNA, 1560 bp, synthetic construct
  misc_feature 1..1560: note = Description of Artificial Sequence: Synthetic coding sequence
  source 1..1560: mol_type = other DNA
atgagcggcgtgcggggcctgagccggctgctgagcgcccggcggctggcccttgcaaaggcctggccaaccgtactgcaaacaggcactcggggattccattttaccgtggatggaaacaagcgagcctcagccaaagtgtctgactccattagcgctcaatatccggttgtggatcatgagtttgacgctgtcgtggtgggcgccgggggtgcgggtctgcgagcggcctttggattaagtgaggctggtttcaatactgcctgtgtaaccaaactgtttccaacaaggagccatacagtagccgcgcagggaggcattaatgccgccctggggaacatggaggaggacaattggcggtggcatttctacgacacttctacgggagatggcacggcgatgattactagggctggtttgccctgccaggacttggagtttgttcagttccatcctaccggcatctatggtgccggctgtctaattaccgaaggatgccggggggaagggggcattcttatcaattcccagggcgaacgcttcatggagaggtacgcgccagtggccaaggacctggcctcccgcgatgtggtgtctcgcagcatgacactggagatccgagaaggcagagggtgcggccccgagaaagatcacgtgtatttgcaactccatcacctgccacctgagcaattagctactcggctaccgggcatctccgaaaccgcaatgatattcgcgggcgttgacgtgaccaaggaacccattcccgtgctcccaaccgtacactacaatatggggggaatccccacaaattataagggacaagtcctccggcacgtgaacggccaggaccagatagtgcctggtctgtacgcttgtggggaggcggcctgcgccagcgttcatggggctaaccgattgggcgctaactctctgttagacctggtcgtgtttgggagggcgtgcgccctgagcattgaagaatcatgccgccccggagataaagtcccacctattaagccaaacgcgggagaagagtctgtaatgaacctggataaactccgctttgctgacggtagtatccggacttcagaactgagactctctatgcaaaagagcatgcagaaccacgctgccgtattcagggtggggtccgtgcttcaggagggctgtggaaagatctctaaactgtatggagatctgaaacacctcaagacattcgacagaggaatggtttggaatactgatctggtggaaacactggagctgcagaacttgatgttatgtgcactccagacaatttacggcgcagaagctaggaaggaatctagaggagcacacgccagagaagattacaaagtgagaattgacgaatacgattattcaaaaccaatccagggacaacagaaaaaaccctttgaggagcactggcggaagcacaccctgtcttacgtggacgtcggcaccggcaaagtgaccttggaatacaggcccgtcattgataaaaccttaaacgaggcagactgcgccacagtaccacctgccatacggagttactag

SEQ ID NO: 26528 - DNA, 6645 bp, synthetic construct
  misc_feature 1..6645: note = Description of Artificial Sequence: Synthetic coding sequence
  source 1..6645: mol_type = other DNA
atgaagcggaaggagcggatcgcccggcggctggagggcatcgagaacgacactcagcccatattactgcagagctgcaccgggctagtaacgcatcgccttctcgaggaggataccccaagatacatgcgggcttcagaccccgcctctccgcacattggtagaagcaacgaagaggaggagacctcagactcctccctagagaaacaaaccagatctaagtactgcaccgaaacatctggagtgcacggtgactccccctacggctcaggcactatggatacacacagtctcgagagcaaagccgaacgcatcgcgaggtataaggcagaaaggcggagacaactagccgagaagtatggactcaccctcgacccagaggccgattctgagtacctctcccgatataccaaatcgaggaaggagcccgacgctgtggagaagagaggagggaagtctgataaacaagaggagtcgagccgcgatgctagctccctctatcccggcacagagactatgggcctgcgaacctgcgctggtgagagcaaggattacgcactgcatgtcggagatggtagttccgaccctgaggttctactgaacatcgagaatcagcgtaggggccaggagttgtccgctactagacaggctcatgatctgtcacccgccgcagaatcttcatctactttcagcttctctggtcgtgattcatcatttactgaggttcccagatcccccaagcacgcacactcctcctccctgcagcaggccgcttctaggtccccctcgttcggtgacccacagttaagccccgaagcgcgaccaagcaccggtaaacccaaacacgagtggttcctgcagaaagactccgagggagacacccctagcctgattaattggccaagtcgggtaaaggtccgggaaaagctggtgaaagaagaaagcgcccggaatagccccgaactggcttccgagagtgtcactcagaggcggcatcagccagcccccgtgcactacgttagctttcaaagcgagcactccgctttcgatcgggtcccttccaaagcggccggaagtacccggcaacctataaggggctatgtccagccagcagacactggccatacggcgaagctcgtgacacctgaaacccctgaaaatgcctctgagtgctcatgggtcgcttccgccactcagaatgtgccaaaaccccccagtctgacagtgcttgagggagacggacgcgattctccagtcttacacgtgtgtgagtccaaggccgaagaagaggagggggaaggggaaggcgaagagaaggaggaagatgtgtgcttcacagaagcactcgaacagtctaaaaaaacattgctggcactggagggagatggactggtgcgctccccagaggacccatccaggaacgaagatttcgggaagcccgccgtcagcacggtcaccctggaacaccagaaggagctagagaacgttgcccagcctccccaggcaccacatcagcctactgaaagaactggcagatccgagatggtgctttacatacagagtgagccggtgtcccaggatgctaaacctacaggacataaccgagaagctagtaaaaagcggaaagttcggacccgatcattatcagattttacagggccaccccaattgcaggcactgaagtacaaagaccctgcctctaggagagaacttgaactccccagttctaagaccgaagggccatacggcgagatttccatgctggataccaaagtatcagtggcccagcttagatccgcattccttgccagcgccaacgcatgccggcgcccagaacttaaatcccgcgtggagcggtcagccgagggccccggtctgcccactggcgtggagcgcgagcgcggatccagaaaacctaggcgatatttcagtcccggagagagtagaaaaacctccgagagattccggactcagcccatcacgtcagccgaacgcaaggagagtgataggtgcacttcccactcagagactcccaccgtggatgacgaagaaaaggtggatgagagggcaaagctgtccgtagctgcgaagcgcctcctgtttcgggaaatggagaagtcattcgatgagcagaacgtcccaaagaggaggagtaggaacaccgcggtcgagcaaagactgaggagattgcaggacagatccttgacccagccaataacaactgaagaagttgtgatcgccgctacagagcccattccggcgagctgctctgggggcactcacccagttatggctcggctgccctcccccactgttgcacgttcagccgtgcagcctgcacgcctgcaggcgtcagcgcatcagaaagcactggccaaagaccagacgaatgaaggaaaggagctggcagaacagggggaacccgattctagcacattatcactggccgagaaattggccctgttcaataagctgagccaacccgtttccaaagccatttctaccaggaaccgcattgatacgaggcaacggcggatgaacgcccggtaccagacccagcctgtgactctgggagaggtggagcaagtccagtccgggaaactgatacctttctcacctgctgtgaatacaagtgtgtcaactgtggcgagcactgtcgcgcccatgtacgccggcgatcttcggacaaagcctcctctcgaccacaatgctagcgccactgactacaagttctcgtctagtattgaaaatagcgacagcccagtccgaagcattcttaagtcccaggcatggcagccgctggtggaggggtccgagaataagggaatgctccgtgaatatggagagactgaatccaagcgagcgctgactggccgggatagtggcatggaaaagtacggtagcttcgaggaagccgaagcctcttacccaatcctgaacagagcacgggaaggagacagccataaggagtctaagtacgccgttccacgccgcgggagcttggaaagggcgaatccccctatcacccatcttggagacgaaccaaaggaattctccatggctaaaatgaacgcccaagggaaccttgatcttagagacagactgccttttgaagagaaggtggaggtcgagaatgtaatgaaaaggaaatttagcttacgcgctgctgaattcggcgagcccacatccgaacagaccgggactgcagccgggaaaacaattgctcagactacggctccagtgtcctggaagccccaagattccagcgaacaacctcaggagaaactgtgtaagaacccctgcgctatgttcgcagctggagaaataaagacccctaccggcgaggggctgctcgatagtcccagcaagactatgagcatcaaagaacggctcgctctactcaagaaatctggggaagaagactggcgcaatcgtctctcacgtcgtcaggaggggggcaaggcgcccgcctcatcgcttcatacccaggaagcaggcagaagcctgatcaagaagagggtgacagaatcaagagagtcacagatgaccatcgaagaacgaaaacagctgattaccgtgcgagaggaggcatggaagacaagggggaggggtgccgctaacgacagcacgcagtttaccgtcgcagggcgtatggtaaaaaaaggactggctagccctacagccatcactccagtggcttcgcctatatgtgggaagacaagggggacgactcccgtgtctaaacccctggaagacatcgaggcaagacccgacatgcagctggaaagtgacttaaagctggatagactcgagacattcctgagacgattaaacaacaaagtgggcggtatgcacgagaccgtgcttaccgtgactgggaagtccgtcaaagaggttatgaagcctgacgatgatgagacgtttgccaaattttatagatcagtggactacaacatgccacgtagccccgtggagatggacgaggactttgatgtgatctttgatccatacgccccgaaactcactagttctgtggccgaacataagcgtgctgttcggcccaaacgtcgggtccaagctagcaaaaacccgctgaaaatgcttgctgcccgggaagacctgctccaggaatataccgagcagcgtctgaacgtcgcttttatggagagcaagaggatgaaggttgagaaaatgagttcaaacagcaatttttccgaggtcactctggcaggacttgcctctaaggaaaatttctccaacgttagcctgcgcagtgtgaatcttactgagcaaaacagtaataattccgctgttccctacaagagattaatgcttctgcaaattaaaggccgaagacacgtgcagacaagattagtggaaccacgagccagcgccctgaatagcggggattgcttcctgctgctgagtccacattgttgctttctgtgggtgggggagttcgctaatgttattgagaaggccaaggccagcgagctggccactctgatccagactaaacgggagttgggatgccgggctacatatatacagacgattgaggaaggcattaatacacacacccacgccgcaaaagatttttggaaactgctgggaggacagacttcttatcagagtgcgggtgatcctaaagaggatgaactgtacgaggccgccattattgagacaaactgtatctatagactcatggacgacaagctggtgccagacgacgactactggggaaagattcctaagtgctccctgctgcaacccaaagaagttctggtttttgattttgggtcagaagtgtacgtatggcacggcaaagaagttactcttgcccagcgaaaaatcgccttccagctggcaaaacatctgtggaacgggacattcgactacgagaactgtgatatcaacccactcgatcccggggagtgcaaccctctgattccccgcaagggccagggtcgcccggattgggctatctttggccgactgactgagcacaacgagaccatcctgtttaaagaaaaattcctggactggacagaactgaagcgctccaatgaaaaaaatcccggggaacttgcccagcataaggaagatccacggaccgacgttaaggcttacgacgtgacccgcatggtttcgatgccgcaaacaacagccgggaccattttggatggtgtcaacgttggtcggggctacggcctcgtcgagggacatgataggcgccaattcgaaataactagtgtctccgtagacgtctggcacatacttgaatttgactatagtcgtttgcctaagcagagcatcggacagtttcatgagggagacgcatatgtagtgaaatggaagttcatggtgagcactgctgtaggctcgagacaaaagggagaacacagcgtgagggctgcagggaaggaaaaatgtgtttacttcttctggcagggccggcatagcactgtctcagagaaagggacctccgcactcatgacggtggaattagacgaggaacgcggcgcccaggttcaggtgctccagggcaaagagcctccatgttttcttcagtgctttcagggcggcatggtggtacacagtggtcgacgggaggaagaggaagagaacgtacagagcgagtggcggttgtactgcgtgcgcggtgaggttcccgttgaggggaaccttctcgaggtcgcatgccattgctcctctctccgctccaggacatcgatggtggttctgaacgtgaataaggcgttgatttacctgtggcacggctgtaaggcgcaggcccacacgaaagaagtaggcaggacggcggccaataaaataaaagagcaatgtccactagaggctggcctccactccagcagcaaagtgactatccatgaatgtgacgaaggatccgaaccactcgggttctgggatgctctcgggagacgcgatcggaaggcttacgactgtatgctacaggaccccgggagctttaatttcgccccacgcctttttattctgagttcctcaagcggagatttcgctgccacagagttcgtttatcccgctagagcaccgtccgtagtctctagtatgcctttcctccaggaagacctgtacagcgctccacagccagcactattcctggtagacaatcaccatgaggtctacctttggcagggatggtggccaatagaaaacaaaataactggcagtgcaagaataagatgggcatctgataggaagtctgccatggaaaccgtcttgcaatactgtaagggaaaaaatctgaaaaagccagctccaaaaagctacctgattcatgctgggctggagcctttgacttttacaaacatgttcccatcctgggaacatcgagaggacattgcagagatcactgaaatggataccgaggtgagcaatcaaataaccctggtggaggatgtcctggccaagctttgtaagacaatatatccactcgccgatctgctggctcggcctcttcctgagggtgtggatccactgaaactggagatctatctcacggacgaggacttcgagttcgccttggacatgactagagatgagtataacgccttgcccgcctggaaacaggtgaacctgaagaaggccaagggccttttctag

SEQ ID NO: 26529 - DNA, 6645 bp, synthetic construct
  misc_feature 1..6645: note = Description of Artificial Sequence: Synthetic coding sequence
  source 1..6645: mol_type = other DNA
atgaagcggaaggagcggatcgcccggcggctggagggcatcgagaacgatacgcagccaattctgcttcaatcatgcactgggcttgttactcatcgtctactcgaggaggacactccaagatacatgagagcttctgacccagcctccccacatatcggaagatctaatgaggaagaagagacatcggacagctctctagagaagcaaaccaggtcgaagtactgtaccgagacaagcggcgtgcatggtgactcaccatatggcagcggtaccatggatacccactccttggagtccaaagcagagcgcatcgcaaggtacaaggccgaacggcggagacagctggccgaaaagtatggtttgacactcgaccctgaagctgatagcgaatacctgtccagatacaccaagtctcgcaaagaacctgacgctgtcgaaaagcgcggtggtaaaagcgacaagcaagaggagagttcaagagacgcaagcagcctttaccctggaaccgaaacaatgggactgagaacctgtgccggagagagcaaggactatgctctacacgtgggcgatggctcaagcgaccccgaggttctcctgaacatcgaaaaccagagaaggggccaggagctcagtgcgacccgacaggcccatgacctaagtcctgctgctgaatccagtagcacgtttagcttctcaggcagggactcaagtttcaccgaagtgcctagatctcccaagcacgcacatagttctagcctgcagcaggcggctagtagatcaccttccttcggggaccctcaactgtctccagaagcccggccaagcactgggaaaccgaaacacgaatggttccttcagaaggacagcgagggcgacacacccagcctgattaattggccgagcagagttaaggttcgggagaagctggtcaaagaggagagtgctagaaattctccagaactggcatccgaatcagtgactcagcgccggcatcagcccgcgcccgtacattacgtaagctttcagagtgagcatagcgctttcgaccgcgttccatcgaaagccgccggttctactcggcagccaatcaggggctacgtacaaccagctgatactgggcatactgcaaaactcgttactcccgagactcccgaaaacgcatccgagtgctcatgggtcgcatccgctacacaaaacgtgcccaagccaccaagtctgactgtcctggagggcgatggccgagatagcccggtgctgcatgtctgcgaatccaaagccgaggaggaggaaggggagggcgagggcgaggagaaagaggaggatgtctgcttcaccgaggcgcttgaacagtctaagaagaccttactcgccctggagggcgacgggctggtcagatcccctgaggaccccagccggaacgaagactttggaaagcccgccgtgtcaacagtgacactggaacaccagaaagagctcgaaaatgtggctcaacctccccaagcaccccatcagcccaccgagcgcactgggcggtccgaaatggtgctgtatattcagtctgaacccgtgagccaggacgccaagccaaccggccacaatcgggaggcctccaaaaaacgcaaagtgcgcactagatcgctgagtgacttcacaggcccccctcagttgcaggccctcaagtataaggatccagcttcccggcgggagttagagttgccctcgagtaaaacagaaggaccatacggagaaatatccatgctcgataccaaggtgtccgtggcgcagctgcggtccgcattcctcgcttcagccaacgcttgcagacgacccgaactcaaatcacgcgtggagcgttctgctgagggtccagggctgcccaccggagtcgagagagagaggggctccagaaagccccggagatacttttctccaggagagagccgcaaaacgagcgagcggtttcggacacagccgatcacctccgctgagcgtaaagaaagcgaccgctgcactagtcactctgaaacacccactgtggacgatgaagagaaggttgatgaacgggctaaactcagcgttgccgcaaaacgcctgctttttcgcgaaatggaaaagtcctttgatgagcaaaatgtgcccaagcggcgttcccggaatacagcggtggaacaaaggcttcggaggctccaggataggtctctgacccagcccatcaccaccgaagaggtggttatcgccgccactgaacctatacctgcaagctgttcaggaggcacacatcctgtgatggcccgactgccgtcccctacagtggcacgcagcgcagttcaacctgctagactgcaagcctcggcacatcagaaggcgcttgccaaggatcaaacaaacgaggggaaggaacttgctgaacaaggggagcctgacagtagtacactcagccttgcggagaaattagcccttttcaataaactttctcagcccgtgtcaaaggccatctctactcgtaataggatcgacactcggcaaaggcggatgaatgcccgttaccaaacccagcctgtcacactgggtgaagtggagcaggtgcaaagcggaaaactgattcccttctctccagccgttaataccagcgtgtcaacagttgcatcaactgtggcccccatgtatgcgggcgacctgaggaccaaaccccctctggatcataacgccagtgctactgattataagttttccagttctatagaaaacagcgattcccccgtgagatctatcttgaagagtcaggcttggcagcctctggtggagggctccgagaataaaggcatgctgcgggagtacggcgagactgaaagtaaaagggctttgactggtcgtgactcaggtatggagaagtacggcagtttcgaagaagcagaggccagctatcccatcctcaaccgcgcgcgtgagggagattctcacaaggagtctaaatacgccgtgcctaggcgagggagcttggagcgcgccaacccgcctatcacgcatctgggggatgagccaaaggaattttcaatggcaaagatgaacgcccagggcaatctggatctccgggaccggttgccatttgaggaaaaggttgaggtcgagaacgttatgaagaggaagttctccctgcgcgcagcagagttcggggagccaaccagcgaacagactgggacagcggccggaaagacaatcgcacagactaccgcacccgtgagttggaagcctcaggacagttccgaacagccccaagagaagctgtgtaaaaatccgtgcgccatgttcgccgccggagaaatcaagacacctactggggaagggctgctggactccccctccaaaaccatgtctatcaaggagcgactggcgctgcttaagaaatctggcgaggaggattggaggaataggctgagcagaagacaggaaggagggaaagcaccagcctcatcactgcacacccaagaggcagggagatccctgataaaaaaaagggttactgaaagcagagaatcccagatgacgattgaggaacggaagcagctgataacagtgcgcgaagaggcttggaaaacccgcggccgcggagctgccaacgattccacccagttcacagtcgccggacgaatggtgaaaaagggcctcgctagccctaccgctatcactccagtggcttctccaatctgcggaaaaacccggggcaccacacctgtcagtaagccactcgaggatatagaggcgcgacctgatatgcagctcgagtccgacctcaaacttgacaggttggaaacattcttgaggcgattgaataacaaggttgggggaatgcacgagactgtgctgactgtcaccggtaaaagcgttaaggaagtgatgaaaccggatgacgacgagacctttgcaaagttttataggtctgtcgactataacatgccccgttcaccagttgagatggacgaggattttgacgtcattttcgacccttacgctcccaagttgacgagtagtgtggccgaacataagcgcgcggtaaggccgaagcgccgtgtgcaggcatctaaaaatccactgaagatgctggccgccagagaggatttgctgcaggaatatactgagcaaagactcaacgtggcattcatggagtccaaacggatgaaagtcgaaaagatgagctccaacagcaatttctccgaagtgactttggccgggctggctagtaaagaaaacttctccaacgtttccctgaggtctgtgaacctgaccgagcagaactcaaacaattccgccgtaccttataagaggctgatgctacttcagattaaagggcgaaggcacgtccagacacgcctcgtggagccacgggcctccgcacttaattctggggactgctttcttctgctgtcacctcattgttgtttcctgtgggttggggaatttgccaacgttatcgagaaggctaaagcgtcagaactagctacccttattcagaccaaacgggaattggggtgtagggccacatacattcaaactatagaagaggggattaatacgcacacccatgcagccaaagacttttggaagctcctaggcgggcagaccagctaccagagcgctggagatcccaaggaagacgaactgtacgaggcagctattattgagacaaactgtatataccggctgatggatgataagctggtccccgatgatgactattggggtaagatacccaaatgcagtctgcttcagcctaaggaagttctggtgtttgacttcggcagtgaggtgtatgtgtggcacggcaaggaagtgactttagcacagcgtaagatcgcatttcagctcgcaaagcatctgtggaatggcaccttcgactatgagaactgtgatattaacccccttgatcccggggagtgcaaccctctaataccacgaaaaggccaagggcgcccagactgggccatcttcggccggctgaccgaacacaacgagactatcctgtttaaggaaaaattcctcgactggaccgaactcaaacgctctaatgagaagaatccaggggaactggcccagcacaaggaggatccccgcacagacgtaaaggcgtacgatgtgactcgcatggtctcgatgccccagactacagccggcaccatcctggacggggtgaacgtcggaagagggtacgggctggtcgagggccatgatcgaagacaattcgagatcacttctgtttccgtcgacgtctggcacattcttgagtttgattatagccggctgcctaagcagtcgattggtcagtttcatgagggcgacgcctatgttgtgaagtggaagtttatggtttcaaccgccgttggttcccgacaaaagggagagcattcagttcgagcggccggtaaggaaaagtgcgtgtatttcttctggcaggggagacattccactgtgtccgagaaaggaactagcgcactgatgacagtggaacttgacgaggagaggggcgctcaggtgcaggtcctgcagggcaaggagccaccttgtttcctgcagtgtttccagggcggaatggtcgtgcatagcggacgccgagaggaagaggaagagaatgtgcaatcagaatggcgtctatactgtgtccgaggggaagtaccggtcgagggaaacctgctcgaggtcgcctgccattgcagcagcctccgcagccggacaagtatggtggtactgaacgtgaataaagctttgatctacctgtggcacggatgcaaggctcaggctcacacaaaggaagtggggcgcacggcagctaacaaaattaaggagcagtgcccactagaagcgggactgcactcatctagcaaggtgaccatacatgaatgtgatgagggatccgagccactcggcttttgggatgccttagggagaagggacagaaaggcctacgactgtatgctgcaggaccccggcagcttcaactttgcccccagactcttcatactgtcttccagttctggagattttgcagccacggagttcgtgtatcccgccagggccccctccgtggtttcctccatgccctttttacaagaggatttgtactccgctcctcagccagcactttttctggttgacaaccaccacgaggtgtatctatggcagggatggtggccaatcgagaataagattactggctccgccaggatccggtgggcatcggaccgcaaatccgcgatggaaacagtgctgcagtattgtaaaggcaagaatctcaaaaagccggcccccaagtcctatctgatccacgccggtctggagcctctgacatttactaacatgtttccttcttgggagcatagggaggatattgcagagataacagaaatggatacagaagtcagcaaccagataaccctggtggaggacgtcctcgctaagctctgcaagactatttaccctctggctgaccttctcgctagacctctgcccgagggagtggatcccctcaagctggaaatctacctgactgacgaggattttgaattcgcgctcgatatgaccagagacgaatataatgcgctccctgcctggaagcaggtgaaccttaagaaggcaaagggcctgttttag

SEQ ID NO: 26530 - DNA, 5367 bp, synthetic construct
  misc_feature 1..5367: note = Description of Artificial Sequence: Synthetic coding sequence
  source 1..5367: mol_type = other DNA
atgaagcggaaggagcggatcgcccggcggctggagggcatcgagaatgacactcagccaatcttgctgcagagctgtaccgggcttgttactcacagactgctggaagaggacaccccaagatatatgcgggcaagtgatcctgccagccctcatatcggcaggtccaacgaggaggaggaaacttcagactcgtccttagaaaagcagacaagaagtaagtactgcacagaaacttcgggtgtgcatggcgatagcccctatggatcaggaacgatggatacccatagtctcgagtccaaagccgaacggattgcacgctacaaggcagaaagacggagacagctcgcggaaaaatatggcctcactttagatccagaggctgatagcgaatacctatcccgctataccaagtctcggaaagagccagacgcagtcgagaagcgtggggggaaatccgataagcaggaagagagctcccgcgacgcttcctcactttatcccggaaccgaaactatgggcctgagaacgtgtgctggggagagcaaggactacgctctgcacgtcggcgatggtagctctgatccagaggttctcttgaacatcgaaaaccagaggcgcggccaagagctctctgcgacgcggcaggctcatgatctgtcccccgcagctgaaagcagttctactttctcttttagcggcagagacagcagcttcaccgaggtacccaggtctccgaaacacgcccatagtagttccttacagcaagccgcaagtcggtctccatcattcggtgacccccagctgtcgccggaagcccgtcctaggtgcactagccatagtgaaacgccaacagttgacgacgaggagaaggtggacgagagggccaaattaagtgtggctgccaaaagattgcttttcagggagatggaaaagagtttcgacgagcagaacgtccctaagagacgcagtcggaataccgcggtggagcaaagattgagacgtctccaggaccggtctctcacccagcccattaccaccgaagaagttgtgatcgcagccaccctgcaggcaagcgctcaccaaaaggcactggcaaaggatcaaacaaatgagggcaaagagctcgccgaacagggagagcctgatagttcaacactttcactggcagaaaagctggctctgtttaacaaactctcacagccagtatctaaggctatctccacaaggaataggatagataccagacaaagacgcatgaatgcccgctatcaaacacagccagtgacgctcggcgaggtggagcaggtgcagagcgggaagctcatcccatttagtcctgctgtaaacacctctgtgagcaccgtggcgtcaactgtcgctccgatgtacgccggagatctccgcactaagcccccattagaccataatgcaagtgcaaccgattataaattttcatcttccattgagaactcagactcgcccgttcgcagcattcttaagagccaagcttggcagcccctggtggaaggctcagaaaataaaggcatgctcagggagtatggagagactgagagcaaaagagccctgactggccgggatagcggtatggaaaagtatgggtcattcgaagaggccgaggcctcttacccaatcttgaacagagctagagaaggggatagtcacaaagaaagcaagtatgcggttccacggaggggcagcctggagcgcgctaacccccccataacacatctgggagacgaacctaaggaatttagcatggccaagatgaatgctcaaggcaacctagacctgcgcgaccgactgccattcgaagaaaaagtggaggtcgagaacgtgatgaaaaggaaattttccttaagggccgcagagttcggtgaacccacaagcgagcaaaccggaacagcggccggcaaaaccattgcccagaccaccgccccagtttcctggaagccccaagattccagcgagcagccacaggaaaaactatgtaaaaacccgtgcgcaatgtttgccgccggcgagatcaagactccaacgggcgaggggttgttagacagtccctccaaaactatgagcatcaaagagcgacttgctctgctcaagaaatcaggagaggaggattggcgcaataggctgagcagacgacaggagggcgggaaagcgcccgcttcctcattacacactcaggaagccggacggagcctaataaagaagcgggtcaccgaatcccgcgagtctcagatgactatcgaggaaagaaagcagctgataactgtccgagaagaggcttggaagacgcgcggccggggagccgccaatgattcaactcagttcaccgtggcgggccgcatggttaagaaggggctggccagtcccacagcgatcacccccgttgcctctcccatctgcggtaaaacgagaggcacgaccccagtctctaagcccctcgaagatatcgaggctcgcccagacatgcagcttgagagtgacctgaagcttgataggctggagacctttctgcgaagactgaacaataaagtaggaggtatgcacgaaactgtgctcacagtgaccggaaagagcgtcaaagaggttatgaaacctgacgatgacgagacgttcgcaaaattttacaggagcgtagattataatatgccacggtccccagtagagatggacgaagacttcgatgtcatcttcgacccgtatgcacccaagttgacttccagcgtagctgagcacaaaagggcagtgcgtcctaagaggagggtacaagcttctaagaaccccctcaaaatgctggctgccagagaagatctgctgcaggaatacaccgagcagaggctgaacgtagcattcatggagtctaaacgcatgaaggtcgagaagatgtcttcaaacagcaactttagcgaggttacactggcaggcctcgcctccaaggaaaatttctccaatgtatccctgagatctgtcaatttgaccgaacaaaactccaacaacagtgccgttccttataaacgtctgatgttactacagattaaggggagacgacacgtccagaccaggctggtcgaacctcgggcatcagccctgaattccggcgattgctttctcctgctctccccacactgttgcttcctgtgggtcggggagtttgctaacgtcatcgaaaaggctaaggctagcgagctggcaaccctgattcaaacaaaaagggagctcggctgccgggcaacatacatccagactattgaggagggcattaacacacacacccatgccgcaaaagatttttggaaactgttaggcggtcaaacctcttaccagagcgctggggacccaaaggaggacgagctgtatgaggcagccattatcgaaactaattgcatctaccggctgatggacgataaactggtacctgatgacgattactggggtaagattcctaagtgctctctgctgcagccgaaagaagtgttggttttcgatttcgggagtgaggtgtacgtgtggcacggtaaggaggtgactctagctcaacgtaaaatcgcattccaattagctaaacacttatggaacggaaccttcgattacgagaattgcgacataaatccccttgaccctggtgagtgcaatccgctgattcccagaaaggggcaagggcgacctgattgggctatctttggtaggctgaccgagcacaacgagaccatcttgtttaaagagaagtttcttgactggacagagctgaagagatctaacgagaagaaccccggggagctggcacagcacaaggaggatccccgcacagatgtgaaggcctatgacgtcacacgcatggtttccatgccacaaaccacagccggtaccatactggacggagtgaatgttgggcgggggtacggcctcgtagagggccatgatagaaggcagtttgagattacgagcgtgtctgtggacgtgtggcacatcctggagtttgactatagccggctgccgaagcagtctatcggccagtttcacgagggggatgcctatgtggtgaagtggaagttcatggtgtcaacagccgtggggtcgaggcagaagggcgaacacagtgttagagccgccggtaaggagaagtgcgtctacttcttttggcaaggcagacatagcactgtatctgagaagggcacaagcgccctgatgacggtagaactggatgaggagcgtggagcgcaagtgcaggtgctgcagggaaaggaaccaccctgtttcctacagtgcttccagggaggtatggtcgtgcattcagggcggagggaggaagaggaggagaatgtccaatctgagtggaggttatattgtgtccggggggaagtgcccgtggagggaaatcttctggaagtggcctgccactgctcttcgctcaggagccgcacgagcatggtggtcttgaacgtcaataaggctcttatatatctgtggcacggatgtaaggcacaggcccacaccaaggaggtgggccgcaccgccgctaacaagatcaaagaacagtgccctctcgaagcaggtttgcacagtagctcgaaagttaccattcacgaatgcgacgaaggctcagaacctttgggtttttgggatgccttgggcaggagagatagaaaggcttacgattgcatgttgcaggacccggggagctttaacttcgccccccgcttgtttatcctgagctcttcctctggcgacttcgcagctaccgagtttgtatatccagctcgcgctccatctgtggtgagctccatgccttttcttcaggaggacctgtacagcgcccctcagcccgccctcttcctagtggataatcaccatgaggtctatctctggcaagggtggtggccgatcgagaacaaaatcaccggcagcgcacggatccggtgggcctccgaccgaaagtccgctatggagactgtcctccaatattgcaagggtaagaacctgaagaaacctgctccgaaatcctatcttattcacgcggggctggagcccctgacctttactaacatgtttcccagttgggaacaccgagaagacatcgccgagatcaccgaaatggacaccgaagtgtcgaaccagatcaccctcgtggaggatgtcctggcaaagctgtgtaaaactatttatcccctagcggacctcctggcccgaccactgcccgaaggagtcgatcctctcaagctggaaatatacttgaccgatgaagactttgaattcgcccttgatatgacgcgcgacgaatacaatgccctgccggcctggaagcaggttaatctgaaaaaagccaagggtctgttttag

SEQ ID NO: 26531 - DNA, 3387 bp, synthetic construct
  misc_feature 1..3387: note = Description of Artificial Sequence: Synthetic coding sequence
  source 1..3387: mol_type = other DNA
atgttcgccgccggcgagatcaagacccccaccggcgagggcctgctggactctcctagcaaaaccatgagtattaaggaacgcttggcccttctcaaaaaatcaggagaagaggactggcgcaaccgcctgagtcgtaggcaggagggcggaaaagcccctgcctcatctttacatacgcaagaagccggccgatcactcatcaaaaaagaggaaggcggcgtggctgatgacagcgcgatatctaatttgttgtggcgcgtcaccgagtctagggagagtcagatgaccattgaggaacgtaagcagctcattaccgtaagggaggaagcatggaagacaagaggcaggggagctgccaacgattcaacccaatttaccgttgccggaagaatggtcaaaaaaggccttgccagccctacagcgattactcctgtggcatctccaatctgcggcaagacaagaggtacgacacccgtctccaaacccctggaagatattgaggccagaccagatatgcagctcgaatcagatctgaaactggaccggctcgagactttcctcagaagactcaataacaaggtgggcggtatgcacgaaaccgttctcacggttaccggcaaatctgtgaaggaagtaatgaaaccggatgacgacgagacctttgccaaattttatcggtcagtggactataacatgccaaggagtccagttgaaatggatgaggacttcgatgtgatttttgatccttatgcacccaaactgacctccagcgtggccgagcacaaaagagccgtccggccaaaacgccgggtccaggccagcaagaatcctctcaagatgctggcagctcgagaggacctgctgcaggaatatacagaacagcgtctgaatgtggcattcatggaaagtaagaggatgaaggtcgaaaagatgagttccaactccaactttagcgaggtcaccctggcagggttggctagtaaagagaacttctcaaatgtttctctccgcagcgtgaacctgactgagcaaaattccaataatagcgcagttccgtataaacggctgatgttactgcagattaagggtagacgccacgtacagacacgccttgtcgagcctagggcgagcgcgctgaatagtggggactgttttcttctactctcccctcattgttgcttcttgtgggtcggggaattcgccaatgttatcgagaaagctaaggcaagtgaactcgcaacacttatacagaccaagcgggagctgggatgtagggccacctatatacagaccatcgaagagggtataaatacacacacgcacgccgcaaaggatttttggaaactgttagggggacagacctcataccagagtgccggcgatcccaaagaagatgaactctacgaggccgccatcatagagaccaattgcatctatcgactcatggacgataagcttgtcccagacgatgactactggggcaagatccccaagtgtagtctgctgcaaccgaaggaagttctggtgttcgacttcggtagcgaagtgtacgtgtggcatggaaaagaggttacactggcgcaacgaaagattgcgttccagctggctaaacacctatggaatggaaccttcgactatgagaattgcgatatcaaccctctcgatcccggagagtgtaatcctctgatccccagaaaaggccagggtagaccagactgggccatttttggtagactcaccgaacataatgaaaccatcctgttcaaggagaagttccttgattggacagaactgaaacgctctaatgagaagaaccccggtgagctggcacagcataaggaagacccccgcaccgacgtgaaggcatacgacgttacacggatggtcagcatgcctcagacaaccgcgggaactatcctggacggggtgaacgtaggcaggggctacggacttgttgaggggcatgatcgcagacaattcgagattacctcagttagcgtcgacgtttggcacatcctcgagtttgattactcccgactccccaagcagtccatcggtcagttccatgagggggatgcctacgtcgtcaaatggaaatttatggtgtccactgctgtcggaagcaggcaaaaaggcgagcactctgtcagggccgcaggcaaagagaaatgtgtttattttttttggcagggaaggcatagcacagtgtcagaaaaaggaacttctgcattaatgacagtggagttagacgaggaaagaggagcgcaagtccaagtgctgcaagggaaagaaccaccatgtttccttcagtgtttccagggcggaatggtggtgcacagcggtagaagggaggaagaagaggaaaacgtgcagtctgagtggcggttgtactgtgtgcgaggcgaggtgccagtggagggtaatctgctcgaggtggcttgccattgttccagcctgagatcaaggacctccatggttgtcctaaatgtgaacaaggccttaatttatttatggcacgggtgtaaagcccaggcacacacaaaagaggttggtaggaccgcagccaataagataaaggagcagtgtccactggaagccgggttacattcatcttccaaagtaactatccacgagtgcgatgaggggtccgaacccctcggcttctgggatgccctcggtcgccgggatcgcaaagcctatgattgtatgctccaggacccagggtctttcaatttcgctcctcgtctcttcatcctgagttccagctctggagacttcgccgctactgagtttgtatacccggcacgcgcgccttcagtggtgtcaagcatgccattccttcaagaagatctgtactccgcccctcagcccgccctatttttggtcgacaaccaccacgaggtctatctgtggcaggggtggtggcccattgaaaacaagataacaggcagtgcccgtatccgctgggcatcggatcggaaatcagccatggagactgtgcttcagtactgcaaggggaagaacttaaagaagcctgctcccaaaagctacctcatccacgcaggcctagaacccctgaccttcaccaatatgttcccctcatgggaacatcgagaggatatcgcggagatcaccgagatggacacagaagtgagtaaccagattactttggtggaggatgtgctagccaagctgtgcaaaacaatttatcctctggcagatcttcttgcaagaccacttcccgaaggcgtggaccctttaaagttagagatctacctcacagacgaagactttgaattcgctctcgatatgacaagggatgaatacaacgccttaccggcttggaaacaggtgaacctcaagaaagctaaaggtttgttttag

SEQ ID NO: 26532 - DNA, 2301 bp, synthetic construct
  misc_feature 1..2301: note = Description of Artificial Sequence: Synthetic coding sequence
  source 1..2301: mol_type = other DNA
atgaagcggaagttcagcctgcgggccgccgagttcggcgagcccacatccgagcagacaggaaccgctgctggtaagaccatcgcccagacaaccgccccagtgtcttggaaaccacaagactcttccgaacaaccgcaggagaaactctgcaaaaacccttgcgctatgttcgccgctggagaaatcaagacgccaacgggagaaggcctgctggactctccatctaaaacgatgtccatcaaagagcggctggcacttctgaaaaagtcaggagaggaagactggaggaatcgcttatcccggcgccaagaaggcgggaaagcacccgcttctagtttacacactcaggaagccggccgcagcctcattaagaaacgcgtgaccgaatcgcgagagagtcagatgacaatcgaggagcgcaagcaactcatcaccgtgcgtgaggaggcgtggaaaacacgtggccgtggggctgctaatgactctacccagttcactgtcgccgggaggatggtgaagaaaggcctcgcctccccaacagcaattactccagtggcctctccaatttgcggcaaaacgcgtgggacaacgccggtttccaaacccctggaggacatagaagctcgcccagatatgcagttggaatcagatttgaagctcgatcgactggagacattcctccgcaggctgaataataaagtgggggggatgcatgaaactgtcctgacagtgacgggcaaaagcgtcaaggaggtgatgaagcctgatgatgacgagaccttcgccaaattttataggagcgtagactacaacatgccaagaagcccggtggagatggacgaggactttgatgtaatctttgatccatatgcaccaaagttgacctcaagtgtggcggaacacaaaagggctgtgaggcctaaaaggcgcgttcaggcaagtaaaaaccccctgaaaatgcttgcagctagagaagatctgctgcaggaatacaccgaacagcgcttgaacgttgctttcatggaatcaaagagaatgaaagtcgaaaagatgtcctccaattccaacttctcagaagtgacgctggccggattggcaagcaaagaaaatttctccaacgtctccttgcgaagcgtcaatcttactgaacaaaactctaacaatagtgcagtgccctacaagaggctgatgcttctgcagataaagggccgaaggcacgttcagacaaggctagtggaacctcgagccagcgcgctcaattctggcgattgcttcctcttgctttcaccccactgttgttttctttgggtgggggaattcgctaacgtgatagaaaaagcaaaggcgtccgagctcgccactctgattcagacgaaacgagagctgggttgcagggctacctacatccagacaattgaagaagggatcaatacccatacacatgcagccaaagatttctggaagctcctgggcggtcaaaccagctatcaatccgcgggtgatcccaaagaagatgagctgtacgaagctgccatcatcgaaacaaactgcatctaccggcttatggacgataagctcgtgccggatgatgactattggggaaagatcccaaaatgctcactcctgcagcctaaggaggtcctggtttttgattttggctctgaagtttatgtctggcacgggaaagaggttacgctggcacagcggaagatagcctttcagctggcgaagcacctgtggaacgggacgtttgactatgagaactgcgacatcaatcctctcgatcccggtgagtgcaaccctttgattccacggaaggggcaagggaggccagactgggcaatttttggaaggttgactgagcacaacgaaaccatcctcttcaaagaaaagttcctcgactggaccgaactaaagcgaagcaacgagaagaaccccggagagctggcccagcacaaggaggacccccgtactgacgtgaaagcctacgatgtgacacggatggtgtctatgccccagacaactgccggaaccatcctcgacggggtgaatgtcggtcgaggttacggcctggtggagggtcatgaccgccggcaattcgagatcacaagcgtgtctgttgacgtatggcatattttggaatttgactacagccggctgccaaagcagtccattggccaattccatgaaggtgacgcctacgtagtgaaatggaaattcatggtaagtaccgccgttctcagggcttggcgtggagctaggggacgcgagttcgccggatctggcttaagcctgtag

SEQ ID NO: 26533 - DNA, 1758 bp, synthetic construct
  misc_feature 1..1758: note = Description of Artificial Sequence: Synthetic coding sequence
  source 1..1758: mol_type = other DNA
atgaacagcagcgacgtgagcagcctgaagcaccccagcagcctggcctcccctaccgcaatcactccagttgcatctcctatctgcggcaagactaggggtactactcccgtaagtaaaccattggaggacatagaggcacgcccggacatgcagctggagagcgatctgaaacttgatcgcctggagacatttctgcgcagattgaacaacaaggtggggggcatgcacgagaccgtgctaacagttaccgggaaatccgtgaaagaggtgatgaaacccgacgacgacgaaacattcgcaaaattctataggagcgttgactataacatgccacggagtcccgtagaaatggacgaggatttcgatgtgatcttcgacccctacgcacctaagctcacatcaagcgtcgcggagcacaagcgagcagtccgacctaaacggagagtacaggcctctaagaatcctctgaaaatgctagctgccagagaggatttattacaagaatacacggagcagagactgaatgttgcgtttatggaatcaaagagaatgaaagtagagaagatgtccagtaattcgaacttttccgaggttaccctagccggtctggcaagtaaagagaacttctcaaacgttagtctgagaagtgttaaccttactgagcagaattctaataattcagccgtcccatacaaaagactgatgcttctccagattaagggtcgacggcatgtccagacacggcttgtggaacccagagccagtgcgctgaacagtggtgattgcttcctcctgctgtctcctcactgctgctttctgtgggtcggcgagtttgccaacgtgattgagaaggccaaggcctctgagcttgcaactttgatacagaccaagcgcgaactcggatgccgcgctacctatattcagaccatcgaagagggcattaatacacatacccatgctgcaaaggacttctggaaacttctgggtgggcaaacatcttatcaaagcgccggggatcccaaggaggacgagctttatgaggccgcaatcattgagacaaactgtatataccgccttatggatgacaagttggtcccagacgatgactactggggaaaaatacctaagtgcagtctgttacaaccgaaagaagtcctcgttttcgacttcggatcagaggtgtacgtgtggcatggcaaggaagtgacacttgcccagcgaaaaattgctttccaattggctaagcatctctggaacggcacttttgattacgagaactgtgacatcaatccgctggaccccggcgagtgcaatcctttgatcccccggaaaggtcaagggaggcctgactgggcgatcttcggtagattaacagaacataacgaaaccatcctgttcaaggagaaatttttagactggactgagctgaagaggtcaaatgagaaaaaccctggggagttggcccaacataaggaagaccctaggacagacgtcaaggcctacgacgtgactcggatggtttcaatgcctcagactactgccgggactattctggacggtgtgaacgtgggtagaggctatggactcgtcgagggtcacgacagaaggcagtttgagataacatcagtgtccgtcgatgtgtggcatattctggaattcgactacagtagacttccgaagcagagcattggtcagttccacgaaggcgacgcctacgtggttaaatggaaatttatggtctcaaccgccggttag

SEQ ID NO: 26534 - DNA, 636 bp, synthetic construct
  misc_feature 1..636: note = Description of Artificial Sequence: Synthetic coding sequence
  source 1..636: mol_type = other DNA
atggtggcccacaaccaggtggccgccgacaacgccgtgagcaccgcagcagagccacgccggaggccggagccgagttcttccagttcctcatctccggccgccccagcccgccctcgcccttgtcccgctgttccagcacccgctccaggagatacccactttcgcactttccggagccatgcagattatagaagaattacccgtgcctcagctcttctcgatgcctgcggcttttactgggggccccttagcgttcacggagcacatgaacgtctgcgcgcagaaccggtgggtactttcctggtgcgggacagtaggcagaggaattgctttttcgcattgagcgtcaagatggcatcagggcccacaagcatacgtgtgcacttccaggcgggaaggttccaccttgacgggtccagggagtccttcgactgcttatttgagctacttgagcactacgtcgctgccccgcgccgcatgttgggtgctcccctccgacaacgtagagttcgaccactgcaggaactctgccgtcagcggatagttgctaccgtcggccgggagaatctagcgcggatccccctgaatcctgtcctcagagactacctctcttccttcccttttcagatctag

SEQ ID NO: 26535 - DNA, 678 bp, synthetic construct
  misc_feature 1..678: note = Description of Artificial Sequence: Synthetic coding sequence
  source 1..678: mol_type = other DNA
atggtgacccacagcaagttccccgccgccggcatgagccggcccctcgatacgtctttgagactgaagaccttcagttccaaaagcgagtatcagttggtagttaatgccgtgaggaaactgcaggagtctggcttttactggagtgccgtcaccggcggggaggctaacctcctcctctctgccgagccggcaggaacctttctgattcgcgactcatccgatcagagacatttcttcaccctcagtgttaagactcagagcgggacaaagaatttgagaattcagtgcgaaggagggagctttagcttacagtccgatcccagaagcacgcagcccgtgccccggttcgattgtgttctcaaactcgtccaccactacatgccaccccccggtgcaccatcttttccatcgcctcccacagagcccagctctgaagtgccagagcagcctagcgcccagccgctgcccggcagcccccccaggcgggcttactatatttatagcggtggcgagaagatccctctggtgttgagccgtccgctctcttcaaatgtcgctaccttgcagcacctgtgccgaaaaacggtgaatggccacctggattcctatgaaaaggtaacacagcttcctggacccatccgtgagtttctcgatcaatacgacgcaccgctgtag

SEQ ID NO: 26536 - DNA, 1302 bp, synthetic construct
  misc_feature 1..1302: note = Description of Artificial Sequence: Synthetic coding sequence
  source 1..1302: mol_type = other DNA
atggccgagctgcggcccagcggcgcccccggccccaccgcccccccagcaccgggccccacagctccgcctgcatttgcctccctgtttcctccgggtctacacgccatttatggagagtgtcgcaggctgtacccggaccagccgaatccgttacaggtgactgccatcgtaaagtactggctgggcggacctgatcccctcgactacgtcagtatgtacaggaacgtgggcagcccttctgccaatatcccggaacattggcattatataagcttcggattaagtgacctgtatggtgataatcgggtccatgaatttaccggtacagatggccccagcggctttggctttgagctgacctttagattaaaacgtgaaacaggtgagtctgctcccccaacgtggccagccgaactgatgcagggtctggctcgatacgtcttccaaagtgagaacacgttttgttctggcgatcacgtatcatggcactcgccattggacaactccgagagccggatccaacatatgctcctgaccgaagacccgcaaatgcagcctgtgcagactccgtttggagttgtcacctttcttcagattgtgggagtgtgcacagaggagctacattctgcacagcagtggaacgggcagggcatcctggaactgttaagaacagtccccatcgctggtggcccatggctcattacagatatgagacgcggcgagacgatatttgagattgacccacatctgcaggagagggtggataagggaatcgagaccgacggcagtaatctgagcggcgtctcggcaaaatgcgcatgggatgacctatctcgacccccggaggatgacgaggattcacgttccatctgtattggtacacaaccgcggcgactgtcgggcaaagacacagaacagatccgcgaaacccttaggcggggattggagatcaactccaaacccgtgctcccgcccataaatccccagaggcagaatggactggcacacgacagggccccctcccggaaggacagtcttgagtccgattcaagtacggccatcatccctcatgagctgatacggacacgacagttggagagcgtgcacctcaaatttaatcaggaatctggcgcactgatcccactgtgcctgagggggagacttttgcatggaagacacttcacctacaagagcattacaggtgacatggcgattaccttcgtttccactggggttgagggtgccttcgccaccgaggaacatccgtacgctgcacatggcccctggctacagctctag

SEQ ID NO: 26537 - DNA, 1455 bp, synthetic construct
  misc_feature 1..1455: note = Description of Artificial Sequence: Synthetic coding sequence
  source 1..1455: mol_type = other DNA
atggccgagctgcggcccagcggcgcccccggccccaccgccccccctgcccccgggcctaccgcccctcctgcattcgcgagcctcttcccaccaggactccatgctatttatggtgagtgcaggcggttgtaccctgatcaacccaaccccctgcaggtcacggctatagttaagtactggttgggtgggcccgaccctctagactatgtgtctatgtatagaaatgtcggatcaccaagcgccaatataccagaacactggcactatatttcatttggtctctccgacctgtacggggataatcgcgtgcacgagttcactggtacggacggcccaagcggattcggcttcgagttaacattcagactaaagcgagagacaggggagtctgctcctcctacatggcctgccgagctaatgcagggactcgctaggtacgtgttccagtccgagaacacattttgcagcggtgaccacgtttcttggcatagccccctggacaattctgaatcgagaatccagcatatgctgctcaccgaagacccccagatgcagcctgtgcagacccccttcggcgtggtgaccttcctacagattgtgggcgtctgcacagaggaactacactccgcacaacagtggaatgggcaaggtatactggagttgctgcggactgtccctatcgcaggaggcccctggctgattaccgatatgaggaggggcgaaaccatcttcgaaatcgaccctcacctgcaggagagggtcgacaaagggatcgaaaccgacgggagcaacctgagcggtgtatccgcgaagtgcgcctgggatgatttgagcagaccccccgaggacgatgaagattcccggtctatatgtatcggtactcaacctagaaggctatccgggaaagataccgagcaaatacgcgagaccctgcgccggggactggagataaattccaagcccgtgctcccacccattaacccacagcggcagaacgggcttgctcatgatagggctccgtcgcgaaaggattccctagagagcgattcctccaccgccatcattccacacgagctgatccgaactagacaactcgaaagtgtgcatttgaagttcaaccaggagtcaggcgctctgatccccctgtgcctgcgtgggaggcttctccacggcaggcactttacctataagtcgatcacaggagatatggccatcacctttgtaagcacaggcgtggaaggagccttcgccacagaggagcacccctatgccgcgcatggaccatggcttcagattttgttaactgaagagtttgttgaaaaaatgctcgaagacctcgaggatttgacttctccagaggagttcaagttacccaaagaatacagctggccagaaaagaaacttaaggtgagcatcctgccagacgtcgtctttgatagcccgctccactag

SEQ ID NO: 26538 - DNA, 240 bp, synthetic construct
  misc_feature 1..240: note = Description of Artificial Sequence: Synthetic coding sequence
  source 1..240: mol_type = other DNA
atggcccggagccggctgaccgccaccagcgtgagccaggtgcaggaaaatgggttcgtgaagaagttagaacctaagtccggttggatgacattcctagaggtgacagggaagatctgcgagatgcttttttgccccgaagcaatcctgctaacccgtaaggacactccatactgcgagaccggactgatctttctgaccttgaccaagaccatcgctaatacctatttttacttctag

SEQ ID NO: 26539 - DNA, 240 bp, synthetic construct
  misc_feature 1..240: note = Description of Artificial Sequence: Synthetic coding sequence
  source 1..240: mol_type = other DNA
atggcccggagccggctgaccgccaccagcgtgagccaggtgcaggaaaatggattcgtgaaaaagttggagcctaaatctggctggatgacgtttctagaggtaaccggcaagatctgtgaaatgctcttttgtccggaggccattctcctgacacggaaggataccccatactgtgaaactggtctcattttcctaaccctgactaagacaattgctaacacatatttctacttttag

SEQ ID NO: 26540 - DNA, 1245 bp, synthetic construct
  misc_feature 1..1245: note = Description of Artificial Sequence: Synthetic coding sequence
  source 1..1245: mol_type = other DNA
atgaacctgcagcggtactggggcgagatccccatcagcagcagccaaacgaataggtcatcatttgatctgctgccgagagagttccgtttagtggaggtgcacgacccccctcttcatcaaccatccgctaataagcccaaaccaccgacaatgctggatattcccagcgaaccctgttctctgaccatccacactattcagctaattcagcacaatcgtcggctaagaaaccttattgcaacggcccaagcacaaaaccagcaacagactgaaggagtcaagaccgaggaatccgaacctcttccttcctgccccgggtccccacccctgcccgatgatctcctgccgctcgactgtaagaaccctaacgctccatttcaaattcggcactctgatcccgaatctgatttctaccgcggaaagggagaaccggtcacagagctctcttggcactcatgccgacagctactgtatcaggcagtggctacgattctcgcacacgccgggttcgactgcgccaatgaatccgttcttgagaccctaaccgatgtggctcatgaatattgtctgaagtttactaaactactgcgctttgccgtagacagagaagctcggctcggtcagacgcctttccctgacgtcatggagcaggtctttcacgaggtcggcatcggatctgtcctgagcctgcagaagttctggcagcacaggattaaggattaccactcatacatgttacagatttctaagcagctgagcgaagagtatgagcgtatagtgaacccagaaaaggccacagaggatgccaagccagtgaagataaaggaagagccagtctcggatatcacctttcctgtatctgaggaactggaagcagacttggctagcggagaccagagtctgcctatgggcgtcctgggggcccagtctgagaggtttccctccaacctggaagtggaagcttcaccacaggcatcgagcgcagaggttaacgcctcacctctctggaacctggctcatgtgaaaatggaaccacaggagtctgaagaaggaaacgtcagcggacacggggtgctgggttctgatgtgtttgaggagccgatgtctggcatgtccgaagccggaattccacagagcccagatgatagtgacagctcatacgggagccacagtaccgatagtctcatgggtagtagccccgtgtttaatcagcgatgtaagaaaagaatgaggaagatctag

SEQ ID NO: 26541 - DNA, 840 bp, synthetic construct
  misc_feature 1..840: note = Description of Artificial Sequence: Synthetic coding sequence
  source 1..840: mol_type = other DNA
atgaacctgcagagcggcaagggcgagcccgtgaccgagctgagctggcactcctgccgtcagcttctgtatcaggcagtggccaccattcttgcacacgctggcttcgattgtgctaacgaatcagtcctggagacactgactgacgtggcacatgaatactgccttaagttcacaaaacttctaagattcgctgttgaccgtgaagcacgactgggccagactccattcccggacgtgatggagcaggtgtttcatgaggtgggtattggctctgtcctgagccttcaaaagttttggcaacaccggatcaaagattaccattcatacatgctacaaatcagtaaacagttatcggaggaatacgaacgcatcgtgaacccagagaaggccacagaagatgctaagcctgtgaaaatcaaggaggaaccagttagtgacattaccttccccgtctctgaggagctggaggccgacctggcatctggtgaccagagtttgcctatgggcgtcctgggtgcccagtccgagagattccccagcaacctcgaagtagaagcgagcccacaagcttcaagcgctgaggttaatgcaagcccactgtggaacctcgctcatgtcaaaatggagccccaggagagcgaggaaggcaatgtgagcggacatggagtgctaggatccgatgtcttcgaggaacccatgagtggtatgagcgaagccggaatacctcagtcccctgacgactcggatagttcttacggcagccactccacagactcactcatgggttcctctcctgtcttcaatcagaggtgtaaaaaacgaatgaggaagatatag

SEQ ID NO: 26542 - DNA, 1239 bp, synthetic construct
  misc_feature 1..1239: note = Description of Artificial Sequence: Synthetic coding sequence
  source 1..1239: mol_type = other DNA
atgctgcggtactggggcgagatccccatcagcagcagccagaccaacaggagctctttcgatctgctccctagggagttcagactggtggaagtgcatgatccacccctccaccagccatcagcgaacaagcctaagcccccaacgatgctcgacataccaagtgagccttgcagtctgacgatccacacaattcagcttatacaacacaaccgacggctccggaacctgatcgctacagcccaggcacaaaaccagcagcagactgagggagttaagacggaggaatcagagcccttgccctcttgtcctggtagtccgcctctgccagacgatctgctccctctggactgcaagaaccctaacgcaccttttcagatccggcacagcgatcctgagtcagatttctatagggggaaaggggagcccgttacagagctcagttggcactcctgtcggcagttgctgtatcaggcagtcgccaccattttggcacatgcagggtttgattgtgctaacgaatcagtgttagagaccttgacagacgtcgcccacgaatattgtctcaagttcacaaagcttctgcggtttgcagtcgatcgggaggctcgcctcggacagacacccttccccgatgtgatggaacaagtctttcacgaggtgggcatcggttccgtgttgagtctgcaaaaattttggcagcatcgtatcaaagactatcacagttacatgttacagatctccaaacagctgtctgaagaatatgaacgcatcgtgaaccctgagaaagctaccgaggatgctaagcccgtaaaaatcaaagaggaaccggtgagcgacatcacattccccgtatccgaggagttagaggctgacctagcttcaggcgaccagtccctgccgatgggcgtgttgggcgcacagtctgagaggtttccgagtaacttggaggtcgaggcttcgccacaagcttcttccgcagaggtaaatgcatctcccctgtggaacttagcccatgtgaaaatggagccccaagagtccgaggagggtaatgtctcaggacacggcgtactggggagtgacgtcttcgaggagcccatgtccgggatgtctgaggcaggtattcctcagagtcccgacgacagcgactcatcatacggctctcactccacggacagcctgatggggagttctccagtattcaatcagcggtgcaagaagcgtatgaggaaaatttag

SEQ ID NO: 26543 - DNA, 1239 bp, synthetic construct
  misc_feature 1..1239: note = Description of Artificial Sequence: Synthetic coding sequence
  source 1..1239: mol_type = other DNA
atgctgcggtactggggcgagatccccatcagcagcagccagaccaaccggtcctctttcgatctcctgccacgggagttccgattggtggaggtccacgatccccctctccaccaaccctctgctaataagcccaaacccccaacaatgctggatattccgtctgagccttgctccctgacaattcacacaatccaactaattcaacataacagacgattgcggaacctgattgcaactgcacaggcccaaaaccagcagcaaacagagggagtgaaaacagaggaatccgagccattgccctcttgcccaggcagtcctcccttgccagacgatctgctgccactagattgcaagaatcccaacgctccattccaaatcaggcactccgaccctgagtccgatttttaccgaggcaagggcgaacctgtaacggaactgtcttggcatagctgcaggcagcttctttaccaggcggttgcaacaatactggcacatgccggcttcgactgcgcaaacgaatccgtgctcgagaccctgaccgacgtggcacacgaatactgtctcaaatttactaaactccttagatttgctgttgatcgagaggcgcgcctcgggcagactccattcccagacgtgatggagcaggtttttcatgaggtcggtatcggctccgtcctttctttgcaaaagttttggcagcaccgcatcaaagattatcactcctacatgctccaaatatcgaagcagctcagtgaggaatatgagaggatcgtcaacccagaaaaagctacagaggacgctaaacccgtgaaaatcaaggaagagccggtaagcgatataacgttccctgttagcgaagaactggaggcagatctggcatccggagatcagagcctcccaatgggcgtgctgggagcccaatcagagcggtttccttcgaatttggaagtcgaagcatctccacaggcttccagtgctgaggtaaacgcaagtccgctctggaacctcgcgcacgtgaagatggagccacaggagtcagaggaaggcaacgtttcggggcatggcgtgctgggcagtgacgtattcgaggagcctatgtccggcatgtccgaggccgggatcccacagtctcccgatgacagcgactcatcatacggatcccattcgacagattccctgatgggctcctctcctgtgtttaatcagaggtgcaagaaacgaatgcgcaaaatctag

SEQ ID NO: 26544 - DNA, 1239 bp, synthetic construct
  misc_feature 1..1239: note = Description of Artificial Sequence: Synthetic coding sequence
  source 1..1239: mol_type = other DNA
atgctgcggtactggggcgagatccccatcagcagcagccagaccaatcgtagttccttcgatctgctgcctagggaatttcgcttagtggaagtacacgacccgcccctgcatcagcctagtgcgaacaagcccaaacccccaacaatgctggacatccctagcgagccatgttcactcactattcatacgattcaattgatccaacataatcggagactgcgtaatctcattgccacagcacaggctcagaatcaacagcagaccgaaggggtgaagactgaggaaagcgagccgttgccgagttgccctgggtctcccccccttcctgatgatctgttaccattagactgtaagaaccccaatgccccatttcaaatcagacatagcgatcccgaatcagatttttatcgtggaaagggggaacctgtaacagagttgtcctggcattcctgtcggcagcttctgtaccaggccgttgctacaatcctggctcacgctggattcgattgcgcgaacgagtctgtcctcgagacgctcacagatgtcgcccacgagtattgcctcaagttcaccaagttgctgagattcgccgttgatcgggaggcccgcctcgggcaaacaccttttcctgacgtgatggaacaggtgtttcatgaagtgggtatcgggtccgtgttgtccttgcagaaattttggcagcaccggattaaagattaccactcatacatgcttcaaataagtaagcagctctccgaggagtatgaacggatcgtgaaccccgagaaggcaaccgaggatgcaaagcccgtgaaaattaaggaagaacccgtcagcgatatcaccttcccggtgagtgaggaactcgaggcagacctggcgtccggcgatcaatctcttcctatgggcgtccttggcgcgcagtcggagcggttcccttccaatctcgaggtggaagcctccccacaagccagcagcgctgaagtaaatgcatccccgttatggaatcttgcccatgtgaagatggagccccaggagtcggaagagggcaatgtatctggacacggcgtcttggggagcgatgtgttcgaagaacccatgagcggcatgagcgaggccgggatacctcagagtcccgacgactcggacagcagttatgggtcccattccacagatagcttaatgggcagcagtccagtattcaatcagcggtgcaagaaacggatgcgaaagatttag

SEQ ID NO: 26545 - DNA, 1272 bp, synthetic construct
  misc_feature 1..1272: note = Description of Artificial Sequence: Synthetic coding sequence
  source 1..1272: mol_type = other DNA
atggtgggcatgagccggctgcggaacgaccggctggccgacccccttacaggatgttctgtatgttgtaagtcatcctggaaccagcttcaggatctctgccggctggcgaaactcagctgtcctgctctcggcatctccaagcgtaatctgtacgattttgaggtggagtatctgtgcgactataaaaagatccgcgagcaagagtactatctagtcaaatggcgcggctaccctgacagcgaatccacatgggaacctcggcagaatttgaagtgcgtgaggattctgaagcaatttcacaaagacctggagagagaactgttgcggcggcatcataggtcaaagacccctagacacctggatccctccctcgctaattacctggttcagaaggccaagcaacgaagggccctgcgaagatgggagcaagaattgaatgctaagagatcccatctgggacggatcacagtcgaaaatgaggtcgacctggacgggcccccacgcgcttttgtatacatcaacgaatacagggtgggcgaagggattacactgaatcaggtggctgttggatgtgaatgccaagactgtttgtgggctccaaccggaggctgttgtcctggcgccagcctccacaaattcgcttacaatgatcagggtcaggtacgtttgcgtgcaggactgcccatttatgagtgcaatagtagatgtcgctgcgggtacgattgccctaatcgggtcgtgcagaaaggtataagatacgacctctgcattttccggaccgacgatggaagaggctggggagtacgtactcttgagaaaatcaggaaaaactcattcgtaatggaatacgttggcgaaatcattacctcagaggaggccgaaagacggggccagatctacgatcgccagggagcaacctacctctttgacctcgactacgttgaggatgtttacacggtggacgcggcgtattatggtaatatctcccatttcgttaatcactcctgtgacccgaatctccaggtgtataacgttttcatcgataacttagatgagagactgccccgtattgcctttttcgctactcgcacgatccgggctggggaagagctgaccttcgactacaatatgcaggtggatccagtcgacatggaaagcactaggatggatagcaattttgggcttgctggcctcccaggctcgcctaaaaaacgggtccgcatcgaatgcaaatgcgggacagagtcatgtcggaaatacctgttttag

SEQ ID NO: 26546 - DNA, 1239 bp, synthetic construct
  misc_feature 1..1239: note = Description of Artificial Sequence: Synthetic coding sequence
  source 1..1239: mol_type = other DNA
atggccgagaacctgaagggctgcagcgtgtgctgcaagagcagctggaaccaactgcaggacctgtgcagattggcaaagctctcatgcccggcccttggtattagcaaaagaaatctatacgacttcgaggtggaatatctttgtgattacaaaaaaatacgggagcaagagtattatttggtgaaatggcggggctacccagattctgagagcacatgggaaccaaggcaaaatttgaagtgtgtacggattctcaaacagttccacaaggatctagaaagagagttacttcgacgacatcaccggtcaaagactcctagacacctagatccatccctcgccaattatctggtacaaaaggctaagcagaggagggctctacgacgctgggaacaagaactaaatgccaagcggagccatctcggaaggatcaccgtggagaatgaagttgatctggatgggcccccacgggcttttgtttatatcaacgagtatagagttggggagggcataacactcaatcaagtcgcggtcgggtgtgaatgtcaggactgtttgtgggcacctacagggggatgctgccccggggcctcccttcataaattcgcctacaacgatcaggggcaggtacgtctgcgagccggcttacccatttatgagtgtaattcccgttgccgctgcggctacgattgtcccaaccgcgtcgttcagaaagggatccgctatgacctgtgcatcttccgaacagatgatgggcgcggctggggagtgaggacgcttgagaaaatacggaagaactcattcgtgatggagtacgtcggggagatcattacatctgaagaagcagagcggcgagggcagatttacgaccgtcagggcgccacctatctcttcgatctcgattatgtggaggatgtgtatacagttgacgctgcttactacggtaacatctctcacttcgtgaatcactcctgtgaccccaatctgcaggtgtacaacgtgtttattgataatctggatgagaggttgcctaggattgcttttttcgcaacaaggaccattagagctggagaggagctgacatttgattataatatgcaggtcgatccagtggacatggaatcaacacggatggattcgaactttggcctggcgggtctgccgggtagtcctaagaagcgggttcggatagaatgcaaatgtgggaccgagtcttgtcgtaaatatctcttttag

SEQ ID NO: 26547 - DNA, 648 bp, synthetic construct
  misc_feature 1..648: note = Description of Artificial Sequence: Synthetic coding sequence
  source 1..648: mol_type = other DNA
atggcctggatcagccggctgcgggagcacctggacggcccccccagagccttcgtgtacattaatgagtatagagtaggcgagggcatcactttgaatcaggtggctgtgggttgcgagtgccaggactgtctttgggccccaacaggaggatgttgccctggggcctccctgcataagtttgcctataacgatcaaggccaggtgcgactaagggctggcctgcccatctatgaatgcaattccaggtgcagatgcgggtatgattgccctaatagggtagttcagaaaggaatcaggtacgacttgtgtattttcaggaccgatgatggccgtgggtggggcgtgcggacccttgaaaagattagaaagaactcttttgttatggaccctgccttattgactgtgtgtctgaaacttccggcctttcccatgggtaaagcctgggagaccgatttgtcagtgactgggaccctagggaggggttgcggaaggggcgaggatcgactgcaagagtctcccttcccagttccagcacctagcgtgggttgcacatacaagcccccaccaacctttcgtaattctttctcaacttcccggttatctgtggtgggaattcacggcttgctgagaaggtctaagggatag

SEQ ID NO: 26548 - DNA, 1230 bp, synthetic construct
  misc_feature 1..1230: note = Description of Artificial Sequence: Synthetic coding sequence
  source 1..1230: mol_type = other DNA
atggccgagaacctgaagggctgcagcgtgtgctgcaagagcagctggaatcaattacaggacctttgtcggctggccaagctctcttgtccagccctcggcatctctaagaggaatctgtacgattttgaagtcgaatatgttaggctgcaggaagacccaagaaccggcatacttccaggggagatggcctggataagtagactccgagaacaccttggcgctaccgcggagtcccaggtttgtgcctatccacaggctgtccctcaggggttgcgcaagggggctgccccagcagcaccacccgttaaagatccccccgcacctggaccgaaattgggccagctgcctggcgcagaaggtcaggctgaggcaggcgcaccgagcctcggggccggggctcaatgccaggcacatctcggcagaattacagtggagaatgaggttgatctggatgggccccctcgggcttttgtgtatataaacgaataccgagtgggagagggcatcacactgaaccaggtagccgtggggtgcgagtgtcaggattgtctgtgggctccaacaggagggtgctgcccaagacattgcactagtctacctaccatgacccgcgccagatgtgggttcgaacctggctgcccttccactagtgccacacccgccgctgctgccgcaatgaccgcccaaattgtgtggtaccgaagagtttcagatatgaccagcgcctcatcagcgcggatgatgggcgttgccggggccagtgccccttggcggcggtttgcgcgtactgcttcatcctggagtacctgggaacggtcattgccccagcgccggcagtctgggggccaaatctacgaccgccaaggagctacctatctgtttgatcttgattatgtggaagacgtatataccgtggatgcagcctattacgggaacatcagccatttcgttaaccactcctgcgatcccaatctgcaggtttacaacgtctttattgataacctcgacgaacggctgccaagcctgtccctgccacaagagccctccgggcaagcaagaagttcccccctcatcaccacatgtaaatggaccccttggacctggagggcacccgcttggacccctactctggcctggttaggctcactggctcctttgaggtcaggttcagtcctcaatgctagcgtggggctcagccccgcggcaaacaccagttcttccccgtag

SEQ ID NO: 26549 - DNA, 555 bp, synthetic construct
  misc_feature 1..555: note = Description of Artificial Sequence: Synthetic coding sequence
  source 1..555: mol_type = other DNA
atggcctggatcagccggctgcgggagcacctgggcgccaccgccgagagccaggtgtgtgcttatcctcaggcagtgcctcaggggctgcgcaaaggcgccgccccagcagccccgcccgtaaaagatcccccggcccccggccccaaactgggccagctccctggcgctgaaggccaggctgagccaggctgcccatccacttcagcaacacccgcagctgccgcggcaatgacagcacagatcgtgtggtatagacgcgtgtccgatatgacaagcgcctcttctgccagaatgatgggcgtagccggggcgtcggctccttggcgtcggtttgctagaaccgcctcctcgtggagcacctgggaacgctcattaccgcagaggcgacagtcaggcggcgcgagatcgacgacggtgagggccccaccgactagtctgacttggactacgtggcgaacctgtaccccatggatgccccctacaatggctaccagtcctaccctctccacaactgtagtgactcccacttgccgatgtactacttcttcttag

SEQ ID NO: 26550 - DNA, 285 bp, synthetic construct
  misc_feature 1..285: note = Description of Artificial Sequence: Synthetic coding sequence
  source 1..285: mol_type = other DNA
atgcgggccggcttcagcgacttccagctgatccgggaccaggtgctctttctgcaggatcaggcacagaggctgaccgagtggctgcaattatctggatttgagaacccagtgtcagaatccacaacgctatgtctcagagaacgcgaaaagagaatacccacgtgcgtcgctgtgtgcgtcccaagtcccgggacggtgcatacggcgctgctgcatcccactacattgtctcagagccgatcgtcgtccgaggctaagatgctcattatccataccgcttag

SEQ ID NO: 26551 - DNA, 594 bp, synthetic construct
  misc_feature 1..594: note = Description of Artificial Sequence: Synthetic coding sequence
  source 1..594: mol_type = other DNA
atggacgtgggcagcaaggaggtgctgatggagagcccccccgactactctgccgccccgcgcggccgatttgggatcccttgttgtccagttcacctgaaacgcctgctaatagttgtagtcgtagtcgtgttgattgtggtggttattgtgggagcactgttgatgggcctgcatatgagccagaagcataccgaaatggtgctcgagatgagcataggagccccagaggcacagcagaggttggcacttagcgaacatctggtcactaccgctaccttttccattggctccacgggcttagtcgtgtacgactaccagcagctactcattgcctacaagccggcgcctgggacctgttgctacatcatgaagatcgctccagagagcattccaagcctcgaagctctgacccgtaaagtccacaattttcaaatggagtgctctttgcaggctaagccagctgtgccaacaagtaagctcggccaggccgaagggcgcgatgccgggagtgcccctagcgggggtgatccagcttttctcggcatggctgtaagtacgctgtgcggcgaggtgcccctatactatatttag

SEQ ID NO: 26552 - DNA, 576 bp, synthetic construct
  misc_feature 1..576: note = Description of Artificial Sequence: Synthetic coding sequence
  source 1..576: mol_type = other DNA
atggacgtgggcagcaaggaggtgctgatggagagcccccccgactatagcgctgctcctagagggagattcggaatcccgtgttgccctgtgcatctcaaacgtctcctcatcgtggtcgtggttgtggtccttatagtcgtcgtgattgttggggccctgctaatgggtctgcatatgagccagaaacataccgaaatggtactggagatgagtatcggagcgcccgaagcccagcagcgactggccttgagcgagcacctcgttactacagctaccttttccatcgggtccacaggactcgtcgtttacgattatcagcagttgctgatagcttacaaaccagcaccagggacatgctgttatattatgaagatcgcgccagaatctattcccagtcttgaggcactaaccaggaaggtgcacaacttccaggcaaagccggcagtgcctaccagcaaactgggtcaagcggaaggacgcgatgctggaagcgctcccagtggaggagaccctgcctttctgggcatggctgtaagcacactctgcggggaagtgccattatactatatatag

SEQ ID NO: 26553 - DNA, 1158 bp, synthetic construct
  misc_feature 1..1158: note = Description of Artificial Sequence: Synthetic coding sequence
  source 1..1158: mol_type = other DNA
atgatgatgatggccctgagcaagaccttcggccagaagcccgtgaaattccaactggaggatgacggagaattctacatgatcggcagcgaggttgggaattaccttagaatgttccgaggctccttgtataagcgctatccttctctatggcgccgcctggctaccgtggaagagagaaaaaaaatcgtggcgtccagccacggaaaaaagaccaaacccaatacgaaggaccatggctacaccactttggcaacatctgtcactttattaaaggcctctgaagtggaagaaattctggacggaaacgacgaaaagtacaaagcggtttctattagcaccgagcctcccacttatctgcgcgaacaaaaggccaaaagaaacagccagtgggttcccacccttcccaacagtagccatcacttggacgcagtgccctgttctaccactattaatagaaacaggatgggcagggacaaaaagagaacgttcccactctgtttcgatgaccacgaccccgctgtaattcatgaaaacgcctcacagccagaggttctcgttccgattcgccttgatatggaaatcgacgggcagaagctgcgggacgcattcacgtggaatatgaatgagaagctaatgacaccggagatgtttagcgagatcctgtgtgacgacttggacttaaacccgttgacttttgttcctgcaattgcatccgctatcagacaacagatcgaatcataccctaccgacagcattttggaggaccagtcagatcaaagagtgatcattaagttgaatattcatgtgggaaacatatctttagtggatcagttcgaatgggatatgagcgaaaaggagaacagtcctgaaaagttcgcgctgaagctctgttcagagctggggttggggggcgaattcgtcactacaattgcctactctatccgcggacagttgagctggcatcaaaaaacatatgccttttcagagaatccccttcccaccgtggaaattgctattcgcaatacaggggacgccgatcaatggtgtcctctgcttgagaccctgaccgacgcggagatggaaaaaaaaataagagatcaagacagaaacactcggcggatgcggaggctcgccaatactgctccggcatggtag

SEQ ID NO: 26554 - DNA, 1131 bp, synthetic construct
  misc_feature 1..1131: note = Description of Artificial Sequence: Synthetic coding sequence
  source 1..1131: mol_type = other DNA
atgatgatgatggccctgagcaagaccttcggccagaagcccgtgaagttccaattggaagatgacggtgagttttatatgattgggagcgaagtaggaaactacctccgaatgtttcgagggagtctgtacaaacgctacccctccctgtggcgaaggctggcgaccgttgaggagcggaagaaaattgtggccagctcacacgaccatggatacaccaccctcgccaccagcgtaacattactgaaggcgagcgaggtggaagagatcctcgatggtaatgatgagaagtacaaagcagtctctatctctacagagcctcccacttatctgcgggagcagaaggcaaagcggaattcacagtgggttccaactcttccaaactctagtcaccacctcgatgcagtgccttgttctaccaccatcaatcgcaatcgcatgggtcgagataaaaagcgaaccttccccctctgttttgacgatcatgacccggccgttattcatgaaaatgcatcccagccagaagtcctcgtccctatccggttggatatggaaattgatggacagaaacttagggatgcgtttacgtggaatatgaacgagaaattaatgaccccagaaatgttttctgagatactgtgcgacgatctggatctgaatcccttgaccttcgtcccggctatcgctagcgcaatcagacagcagatagaatcttatcccactgattccatcctggaggaccagtctgaccaacgcgtcatcatcaagctgaacatccacgttgggaatattagtcttgtggaccagtttgagtgggatatgtctgagaaagaaaattcccctgaaaagtttgctttaaagttatgtagtgaactggggctgggaggcgagtttgtcactaccattgcttattcgatacggggccagctttcctggcaccaaaagacctatgctttctcagagaaccctcttcccactgttgagatcgccattaggaatacaggagacgcggatcagtggtgtcccctgctggagaccctgacagacgccgagatggaaaagaaaatacgagaccaggacaggaataccaggaggatgcggaggctggcgaacacagccccggcatggtag

SEQ ID NO: 26555 - DNA, 81 bp, synthetic construct
  misc_feature 1..81: note = Description of Artificial Sequence: Synthetic coding sequence
  source 1..81: mol_type = other DNA
tggcggcggctggccaccgtggaggagcggaagaagatcgtggcctcgagtcacgccttgatgaccatgacccaactgtag

SEQ ID NO: 26556 - DNA, 7626 bp, synthetic construct
  misc_feature 1..7626: note = Description of Artificial Sequence: Synthetic coding sequence
  source 1..7626: mol_type = other DNA
atggtggccctgagcctgaagatcagcatcggcaacgtggtgaagacgatgcagtttgagccgagtaccatggtctatgatgcgtgtcggataatccgggagcgcataccagaagcacctgctggcccgcccagtgattttgggctcttcttgagcgatgatgaccctaagaagggcatctggctggaagccgggaaggcattggattactacatgctccggaatggagatactatggagtatagaaaaaagcagcggcctctgaagattagaatgttggatggcaccgtgaaaaccattatggtcgacgacagcaaaactgttacggatatgcttatgactatctgtgccagaatcggcataacgaaccatgatgagtatagcctggtgagggagctgatggaggaaaagaaggaggagattaccggcactctgagaaaagataagactctgctgagagatgaaaagaagatggagaaactgaaacagaagctccacacagacgacgaactgaactggcttgatcacgggaggacactaagagaacagggagtggaggaacacgagactttactgctgagacgaaaatttttttacagcgaccagaatgtagatagcagagatccggtccaactgaacttgctgtacgtacaggccagagacgatatcttgaatggctctcatcctgtgtccttcgacaaagcctgcgagttcgcaggtttccagtgccaaatacagttcggacctcacaatgaacagaagcacaaggccggattcttggaccttaaggattttctacctaaagagtatgtcaaacagaagggcgagcggaagattttccaggcccataagaattgtggacagatgtctgaaattgaggcgaaggtccgctatgttaaacttgctcgctccctgaagacctatggagtgtccttctttttggtaaaggaaaaaatgaaaggcaagaataagctggtcccacggttacttggtataacaaaggagtgtgtcatgagggttgatgagaagactaaagaagtgatacaggagtggaacctgacaaacattaagcgttgggcagcttcccccaaaagtttcacgctcgactttggcgactaccaagatggctactacagtgtgcagaccactgagggggagcagattgcccaactgatagccggctatattgacatcattctgaagaagaagaagtcaaaggatcattttggcctggaaggtgatgaagagtcgacgatgttagaagattctgttagccctaagaaaagcaccgtacttcaacagcagtacaacagagtcgggaaggtcgaacacggaagcgtggccttacccgccattatgaggtctggcgcttccggcccagaaaatttccaggtggggagtatgcctcctgctcagcaacagatcacaagtgggcagatgcaccgcggacacatgccccctctcacgtcagcccaacaggcactcaccggaacaatcaactcatctatgcaagccgtgcaggctgcacaggccaccctcgatgactttgacacccttcccccactggggcaggacgctgcaagtaaagcctggagaaaaaataaaatggatgaatctaaacatgaaattcattctcaggtcgatgctatcaccgccggcaccgcttctgtcgtgaacctcacagccggagatcccgccgagaccgattatacagcggttggctgcgccgtgaccacaatatcaagcaacctgactgaaatgtcaagaggagtcaaattgctcgccgcacttctcgaagatgaagggggttctggaagacctctactgcaggcagctaagggccttgcgggagcagtgtcagagctgttacgaagcgcacagcccgcctctgcagaacccagacaaaatctcctgcaggcggctggaaatgtaggacaggcctcaggcgagttgcttcagcaaatcggggaatccgataccgacccccactttcaagacgctttgatgcagttagcaaaagcggtcgccagcgcggccgcagccttagtactcaaggcgaaaagcgtggcccagaggaccgaagactccggactacagacccaggtgattgctgcggccacgcaatgtgcactcagcaccagccagttagtcgcctgtacaaaggtagtcgctcccactatatccagtcccgtatgtcaggagcagcttgtcgaggccggacgtcttgtggctaaggcggtcgaagggtgcgttagcgccagccaagccgcaactgaagacggccagctgctgaggggtgtaggcgcagccgccactgccgtgacccaggcccttaatgagctgctccagcatgtcaaagctcacgcgacaggagctggtccagccggtcggtacgaccaagccaccgacaccattttgacagtgacggagaatattttttctagcatgggggacgccggagaaatggtgcggcaggctcgaatcctggcccaggcaaccagcgatctggttaatgcgataaaagcggatgctgagggggaatccgaccttgagaattcgagaaaactgctctcagccgctaagattctggccgacgccactgccaaaatggtagaggctgctaaaggggctgcagcacatcctgactccgaggagcagcagcagcgcctacgcgaggcagccgaaggactgcggatggccacaaacgctgccgctcaaaacgcaattaagaaaaaacttgtgcaacgtctggagcacgcagctaaacaagccgctgcctctgccactcagaccatcgcagcagcgcagcatgccgcttccacccctaaagcttcagctggaccccagccactgctggtacagtcctgtaaggcggttgcggagcagataccactgcttgtgcagggagtcagaggttcacaggcccagcctgatagcccgtcagctcagctggctttaatcgctgcatctcagagcttcttgcaacccgggggcaagatggtcgctgctgccaaagcctctgtccctacgatccaggatcaagcttccgctatgcagttatcccagtgcgccaagaatctgggcacagccctggctgagcttagaacggccgcccagaaggcccaagaagcatgcggcccgctggagatggattccgcattgagcgtggtccagaatctggaaaaagacctgcaggaggtgaaagcagcggcgagagacggcaagctgaagccacttccgggtgagaccatggagaagtgcactcaggacctaggcaatagcacgaaggcagtgtcctctgctattgcacagttactaggcgaggtggcgcagggcaatgagaattacgcggggatcgccgctcgggacgttgccggcgggctgagatctctagcccaagccgcgaggggtgttgctgcactgacctccgacccagcagtgcaggctatcgtgctggatacagctagtgatgttctggataaagcctcatcactgattgaggaggccaaaaaagcagccggccaccccggcgatcctgagtcccagcagagactcgcccaggtagctaaggcagtgacccaggcactaaaccggtgcgtgagctgtttgcccggccaaagagacgtcgataacgctttaagggcagtcggggacgcctccaaaagactgttgagtgattcactccctcccagcactgggacatttcaggaggcacagtccagattgaatgaggccgcagcagggctgaaccaggctgcgacggagctggtgcaggcaagtaggggcactcctcaggacttggccagagcgtcgggaagatttgggcaggatttttccaccttcctggaggcaggagtggaaatggccgggcaggcaccttcacaagaagatcgagcacaagtggtgagcaacctgaagggcatctcaatgagcagctctaagctcctccttgccgcaaaggctctttcaactgatcccgcagccccgaacttgaaaagccagctggctgctgccgctcgggctgtcactgatagtatcaaccagctgatcaccatgtgcacccagcaggcacctgggcaaaaagagtgcgacaatgctctccgggagcttgagacagtgagagagcttctggagaatcctgtccaacccatcaatgacatgtcctacttcgggtgtctggattccgttatggaaaattctaaggtcctgggggaagccatgactggaatctcacagaacgctaaaaacggtaacctcccagagtttggggacgctatcagtaccgcttcgaaggcattgtgcggttttacagaggctgccgcacaggccgcttatttggtaggggtctcggaccctaattcacaggctggacaacagggtcttgtggagccaacgcagttcgctcgcgctaaccaggcaatccagatggcgtgccagagtctgggtgagcccggctgtacacaagcccaagtcctttcagctgccacgatcgttgcgaaacacacttctgcgttatgcaactcatgtaggctggcatccgcccgtactactaaccccactgccaagagacaatttgtccagtctgcaaaggaggtggccaatagtaccgctaaccttgtaaagacaatcaaagcactggatggtgcctttacagaggaaaatagagcccagtgccgggctgccactgcacctctcctagaagcggtggacaatctatcggccttcgcgagtaatcctgaattttcctcgattcctgctcagattagtccagaaggacgcgcagccatggaacctatcgtgatctctgctaagacaatgctcgagagcgctgggggtctgattcagactgcccgtgccctggcggtgaatccacgcgatcctcccagctggtctgtcttggccggacactcccgaacagtgtctgactcgattaaaaagcttattactagcatgcgcgacaaggcgccgggccagctcgagtgcgaaaccgcgattgcagctctgaacagctgcctccgcgatctcgaccaggcttcactggccgcagtgagccagcaattggcacctcgtgaaggcatctcgcaggaggccctgcacacccaaatgttaacagctgttcaggagatctcccacctgatcgaacctctggccaacgcagcaagggctgaagcctctcagctagggcacaaggtctcacagatggcccaatacttcgagcctctgaccctggcagctgtgggagctgcctccaaaactttgtcgcacccccagcagatggccttgttggatcaaactaagaccctggctgaatcagccttgcaacttctctacacggctaaagaggccggtggtaaccccaaacaggcggcacacacccaagaggccctcgaggaggccgtacagatgatgacggaggccgtggaagatctcaccactacgcttaacgaggccgcctctgcagctggtgtggtaggggggatggtggatagtatcacccaggccataaaccagctagatgagggaccaatgggcgagccagaaggttccttcgtagactaccagactacaatggtgcggactgcaaaggcaattgcagtgactgtacaggagatggtcactaagtccaatacatcacccgaggagctaggcccactggctaaccagttaaccagcgactacgggcggttggcctccgaagctaagccagccgcagtggcagctgagaatgaagaaatcggcagccatattaaacacagggtgcaggaactcggccacggatgcgccgcactcgtgactaaggccggcgctttgcagtgttccccctctgacgcgtacaccaaaaaggagctgatcgagtgtgctcgaagggtgagtgaaaaggtgtcacacgtgttagccgccctccaggccggcaaccgcgggacccaggcctgcatcacagcagcttctgctgtctctggcattatagctgacctcgacaccaccatcatgttcgcgaccgctggaaccctgaaccgggaaggcaccgagactttcgcggaccaccgggagggaatcctcaagacggcaaaggtcctggtcgaggataccaaagtgctggtccaaaacgcggccggaagccaggaaaaactggctcaagcggcccaaagtagcgtagccaccatcacaaggctggctgatgtggtcaagctgggtgcggcttcacttggggccgaggaccccgaaactcaggtggtcttgattaacgcagtgaaagacgtggccaaggctctcggtgacttgatttctgccacaaaagccgcagcagggaaagttggcgacgatccagcggtgtggcagctgaagaattctgctaaggtcatggtgactaatgtgacgtcacttcttaagacagtgaaggccgtggaggatgaagccaccaagggcacccgcgcgctggaggccactactgaacatattcgtcaggagcttgcagttttttgctctcccgaaccaccagccaagacgtcaacccccgaggacttcatccggatgacaaaagggattacaatggctactgcgaaagctgtggcagcgggtaattcttgccgccaggaggatgtgatcgctactgctaacctgtcaagacgagctatagctgatatgctgcgtgcgtgcaaggaggctgcatatcatcctgaagtggctcccgatgtacggctgcgggctctgcattacggacgcgaatgtgctaatgggtaccttgaactgctggaccacgtcctcctcaccttgcagaagccatccccagagctgaagcaacagctcactggccacagcaagcgggttgcagggagtgtgacagagcttattcaagccgcagaggcaatgaagggaactgaatgggttgaccccgaagacccaaccgtaattgccgagaatgagctgctcggcgctgcagcagcaattgaggccgcagcaaagaaattggagcagctgaagcccagggccaagccgaaagaagccgacgagtcactcaacttcgaggaacagatcctagaagctgctaagtccattgccgctgctacctctgccctcgtgaaggctgcatctgccgcccagcgcgagctggtagcccagggtaaagtgggggctatccctgcgaatgctttggacgacgggcagtggagccaggggctcatttcagcagctagaatggttgccgccgctactaacaatttatgtgaggctgcaaatgcagccgtgcaggggcatgctagccaggagaagcttatcagtagcgccaagcaggtagcagcctccacagcccagcttctggtggcctgtaaggtgaaggccgatcaggactccgaggctatgaagcgcctgcaggctgcgggtaacgcggttaagcgagcttcagacaacctggtgaaggctgcccaaaaggcagctgcattcgaggagcaggaaaacgagactgtggtagtaaaggaaaagatggtgggaggcatagcccagattatcgctgcgcaggaagagatgctgaggaaggagcgggaattagaggaagcaaggaagaagctagcccaaattaggcagcagcagtataaatttctaccatctgaacttcgcgatgagcattag

SEQ ID NO: 26557 - DNA, 7290 bp, synthetic construct
  misc_feature 1..7290: note = Description of Artificial Sequence: Synthetic coding sequence
  source 1..7290: mol_type = other DNA
atggtggccctgagcctgaagatcagcatcggcaacgtggtgaagacaatgcaattcgaaccttcgaccatggtatatgatgcgtgtcgcattatcagggaacgaattccagaagcgcccgccggcccaccatccgacttcggcctcttcctcagcgatgacgatcccaaaaaggggatctggttggaggccggtaaagccctggactactacatgctgcggaatggagatacaatggagtacagaaagaagcagaggccactcaagatacgcatgctagacggcacagtgaagacaataatggtggacgacagcaagaccgtgaccgatatgctcatgacgatatgcgcacgcattggcattaccaatcatgacgagtactcgctggtgagggaattgatggaggagaaaaaagaggagatcacaggcacactgcgaaaagataaaaccctgttgcgcgatgagaagaagatggagaaactgaagcagaaactgcacactgacgatgagctgaattggctcgatcacggccggacgcttagagaacagggggtggaggaacacgagacattactgctgagacggaaatttttctattccgatcagaacgtggattctagagacccggtccagctgaacttattatatgtgcaggcccgcgacgacattttaaacggctcccatcccgtgtcatttgacaaagcctgcgagttcgctggtttccaatgccagatccaattcggaccccacaatgaacaaaaacataaggccggtttcctggatcttaaagactttttacccaaagagtatgtgaaacagaaaggtgaacgcaagatcttccaggcccataaaaactgtgggcagatgagcgaaatcgaagctaaggttagatatgtgaaactcgcgcgatccctcaagacttatggcgtgtctttcttcctcgtgaaagagaaaatgaaaggcaagaacaaactcgtccccaggctcctggggattaccaaagagtgcgtcatgcgcgtcgacgagaaaactaaagaagtgattcaggagtggaatctgaccaacattaaacgctgggccgcgtcccctaaaagtttcaccctggactttggtgattatcaggatgggtattactctgtgcagaccacggagggagagcagattgcacaactgatagcaggatatattgacattatcctcaagaagaaaaagtctaaagatcatttcggattggagggtgatgaagaatccacaatgcttgaggacagtgttagccccaaaaagtcaacagtgctgcagcagcagtataatcgtgtagggaaggtggaacacggttccgtggctctaccagccattatgagatcgggagcttctggaccggagaacttccaggtggggagcatgcctcctgcgcaacagcagattacctcaggccagatgcaccgcggacacatgccccccctgacttcagcacagcaggctctcacagggacgataaactcaagtatgcaggcagtgcaggctgcccaggccactctggacgactttgatacattgccaccactgggacaggacgccgcgtcgaaggcctggagaaagaacaaaatggatgaatccaagcacgagattcattcacaggtcgacgccataaccgccggcaccgctagtgtcgtaaacttgaccgccggggacccggccgaaactgactacacagcggtgggctgtgctgttacaaccattagcagcaacctcacagagatgtcgcgcggagtcaagcttctggctgcgctgctggaagacgaggggggctctgggcgacccctcctgcaggcggccaaagggctagccggagccgtgtccgaattgctcagatctgcccagcccgcaagcgccgaacctcgccaaaacctgttgcaggcagctggaaacgtggggcaggcctccggggaactgttacaacagataggcgaaagcgatacagacccacacttccaggacgccctgatgcagctcgcaaaggctgtggcctctgccgccgccgctctcgtgctcaaggcgaaatcagtagctcagcgcacggaggactccggtctgcaaacccaggtgatcgctgctgctactcagtgcgccttgagtactagccaactagtcgcatgcacaaaagtggtagctcctactattagcagtccagtttgtcaagagcagttggtagaagctgggcggctggtggcgaaggcggtggaaggatgcgtatcagctagccaggcagccactgaagatggacaactgctgagaggtgtaggagcagcggctactgccgtgacacaggcgctcaatgaattgctgcagcacgtcaaagcacacgcgaccggtgcaggacccgccgggaggtatgaccaggcaactgacacgatcttaacagtgacagagaacattttctcctccatgggggacgcaggcgagatggtgcgtcaagctcgcatcctcgcccaggcaacatccgacctggtcaacgctatcaaggcagacgctgaaggtgagagcgatttggaaaattcaagaaaactgctgtccgccgcgaagatcctggcagacgctactgccaaaatggtggaagccgctaaaggcgctgccgctcaccccgatagtgaggagcagcaacaaaggttgcgcgaggctgctgagggtcttcggatggctacgaatgctgccgcacagaatgctattaagaaaaagctggtccagagactggaacatgccgcgaaacaggctgctgcgtcagcaacccagaccattgccgctgcccagcacgcagcaagtacccccaaagcatctgcaggtccacagccattgctggtgcagagttgcaaggcagtcgctgagcaaatccctttacttgtgcagggagtacggggatcccaggctcaaccagacagtccatccgcccagctagccttgatcgctgccagtcagagttttctccaacctggaggtaagatggtggccgccgctaaggccagcgtcccaactatccaggaccaagcttcagctatgcaattaagtcagtgcgcgaagaacctgggcactgctctcgctgagttgcggacggcggcccagaaggcccaggaggcctgcggacccctcgagatggactctgcactctctgtggtgcagaaccttgaaaaagatctgcaggaagtaaaagccgccgcacgggacggtaaactgaagccccttcctggcgagaccatggaaaaatgtacacaagatctcggcaactctaccaaggctgtgtccagcgccattgcccagttactcggcgaggtagcgcaaggcaatgaaaattacgctggaattgccgcccgcgatgtcgcggggggactcagatcactcgcacaggcagccaggggcgtcgccgcccttactagtgaccctgcagtacaggcaatcgtcctcgacacagcaagcgacgtgctggacaaggcttcgtccctcattgaggaggccaagaaggccgccggtcacccaggtgacccagagtcccagcagcgactcgcccaggtggccaaggccgtgactcaggccctgaaccgttgcgtcagctgcttacccggacagcgggacgtggacaacgcgctccgggccgtaggcgacgctagcaaaaggttactgagtgattccttacctccctccactgggacattccaagaggcacagagcaggctaaatgaggcggctgccggcttaaatcaggcagccacagaacttgttcaagcaagcagggggaccccgcaggatttggcccgtgcctctggcaggtttgggcaagacttctctacgtttctggaagctggagtggaaatggcaggccaggcgcctagccaagaagacagggcccaggtggtttccaacttgaagggcattagcatgagcagctccaagttgttgctcgcagcaaaggctttatcgactgatcccgccgcacccaatcttaaaagccagctggctgccgccgccagagctgttactgacagcatcaatcagctgatcacgatgtgcacccaacaggctccggggcagaaggagtgcgataatgcactccgggagctagagacagttcgcgagttgctggaaaatccagtccagccgatcaacgatatgtcttactttggatgcctagactctgtgatggagaattctaaagtgttaggcgaggctatgactggaatctctcagaacgccaaaaatggcaatctgccagaatttggcgacgccattagcaccgcatccaaggccctgtgtggattcaccgaagcggctgcgcaagctgcatatttagtgggggttagtgatcctaatagccaagctgggcagcagggcctggtggaacctacccagttcgctcgggccaatcaggctatacagatggcgtgccaatctctgggagaaccaggctgcactcaggcccaggtgctgagcgcagccacaatcgttgccaagcatacttcagcattgtgcaacagctgtagactggctagcgctcggaccacaaaccctactgcaaagaggcaatttgtgcagtcagcgaaggaagttgctaatagtactgctaacctcgtgaaaaccatcaaagctctggatggtgcctttactgaggaaaaccgggcacaatgtcgggctgcgactgcccccctattggaggctgtggacaacctttctgcattcgcctcaaatcccgagttctcatccatacctgcccagattagcccagaggggcgagcagccatggaacccatcgtgataagtgccaagaccatgctggagagtgctggaggtttgattcagactgcacgtgcactcgccgtcaatcctcgcgaccctccaagctggtcagtcctcgcagggcactcgaggacagtcagcgatagcattaagaaactgatcacaagtatgagagacaaggctcctggacagttggaatgcgagaccgctattgctgctttaaattcttgcctgcgtgaccttgaccaagcttcattggcagcagtctctcagcaacttgcacctctgcaagaaatctctcatcttatcgagcctcttgcaaacgccgcgagggcggaagcctctcagctagggcataaggtgtcccaaatggcgcaatactttgagcctttgacattagccgccgtcggcgcagcttctaaaacactctcccatccccagcagatggctctcctcgaccagacgaaaacgctggctgaaagtgcactccagctcctttataccgctaaggaagctggcggcaatcccaaactggatgaggggccaatgggggaaccagagggaagctttgtcgactaccagaccacgatggtcaggactgcaaaggctatcgccgtcacggttcaggagatgatcggctctcatattaagcaccgggtgcaggagctgggtcatggctgcgccgccctcgttacgaaagccggtgccctccagtgcagccctagcgacgcgtatacaaagaaggagctaattgaatgcgccaggcgggtgtccgagaaggttagccatgtgttggccgctctgcaagctggtaaccgtggcacccaggcgtgtatcactgcagctagtgcagtgagcggcattattgccgacttggatacgaccatcatgttcgcgaccgctggcactttgaacagagagggcacagaaactttcgcagatcacagagaagggattcttaaaacggctaaggtcttggttgaagacactaaggttttggtgcagaatgctgccggatcacaggaaaaactggctcaggcagcccaatcgtcagttgcgactattaccaggctggctgatgttgtcaaacttggagccgcctcacttggcgctgaggaccctgaaacccaagttgtgctgatcaatgccgttaaagatgtcgcaaaggcgttgggcgacctcatatcagcaactaaggcagccgcaggcaaggtaggcgacgaccccgcggtatggcagttgaaaaattctgccaaagtcatggtcaccaacgtgacttccctgctgaaaacagtcaaggccgttgaggacgaagccaccaagggcacgcgggcactggaggccaccaccgaacacatccgtcaagagctggctccgccggcaaaaaccagtacccctgaggacttcatccgtatgactaagggcattactatggcaactgccaaagccgtggcagccggaaacagttgcaggcaagaggacgtgatagccactgctaacctgagtaggcgggctatcgcggatatgctccgcgcttgtaaggaagctgcctatcatccagaggtcgcacctgacgttagattaagagccctgcattacggccgcgaatgtgctaatgggtacctggaacttctggatcatgtgctgctgacactgcagaagccaagccccgagctcaagcagcagctgaccgggcactccaagagggtggcgggatccgttactgaactcattcaggccgccgaagccatgaaaggtacagagtgggttgatccagaagatccaaccgtaattgctgagaatgaattgctgggagctgcagccgcaatcgaggctgcagccaagaaactagagcagcttaaacctcgtgctaagccaaaggaggcggacgagtctctgaattttgaggagcagattctggaggcagcgaaaagcatcgccgcggccacttctgcactggtgaaagctgcatctgccgcacagagagagctagtggctcaagggaaggtcggagctattccggctaatgcgttagacgatggtcagtggtcgcagggcctgatctcagccgcacgaatggtcgccgccgccacaaacaatttgtgtgaagctgccaatgcagcagtccaaggacacgctagccaggagaagttgatcagcagcgcaaaacaggtggccgcgtctacagcacaactgctggtggcctgtaaggtcaaggcggatcaggatagcgaggcaatgaaaaggctgcaggcagcgggaaacgctgtgaaacgcgcttccgataatctggtgaaagcagcacaaaaagctgccgctttcgaagagcaggagaatgagacagtcgttgtgaaggagaagatggtcggcggtatcgcacagattattgccgcccaggaggaaatgctgcgaaaagagagggagctagaggaggcaagaaaaaagctagcacaaattcggcaacagcagtacaagtttttgcctagcgagctgagggatgagcattag

SEQ ID NO: 26558 - DNA, 3984 bp, synthetic construct
  misc_feature 1..3984: note = Description of Artificial Sequence: Synthetic coding sequence
  source 1..3984: mol_type = other DNA
atggccgccagccggcggagccagcaccaccaccaccaccaccagcaacaactccaacccgccccgggagcatcggctccgccgccgcctcctcctccgcccctgagccctggcttagcacccggaacgacccctgctagtcccacagcaagcggccttgccccgtttgccagtccgcgacatggcttggctctacctgagggcgacggatctagggacccacctgacagaccaaggtcccctgaccctgtagatgggaccagttgctgtagcaccacctcgacaatatgcaccgtagccgccgccccggtggtgccagccgttagtacaagttccgcagcaggggtggctcccaaccctgccgggtccggaagcaataattctccctccagcagttctagccctacaagcagctcatcctccagtccgtcgtcgcccgggagttctctcgccgaatcgccagaagctgcgggcgtcagttccaccgccccgctggggccaggcgccgcaggaccagggacaggcgtgcccgcggtatccggggcactgagagagttgttggaagcttgtcgcaacggcgacgtgagccgggtgaagcggctggtagacgcagctaacgtgaacgcaaaagacatggcaggtcgtaaaagctctccccttcatttcgcagccggttttggacgaaaggatgtggtggaacaccttttacagatgggcgctaacgtacatgcacgggacgatgggggcctcatccccctccataacgcttgcagctttggccatgccgaggtagtgtcactccttctgtgtcagggagccgatcctaatgcaagagacaactggaattacaccccattgcacgaagctgcaattaaaggtaagatcgacgtttgcatagtgctgctgcagcacggcgccgatccaaacatacgtaatacagacggcaagtctgctttagatttagcagatcccagtgcaaaggccgtgttaaccggcgaatacaaaaaggacgaacttctggaggctgccaggagcggaaatgaggagaagctcatggcactgctgacccccctgaatgtcaattgccatgcctccgacggacgcaaatcaacaccactacatctggccgccggatacaacagggtcagaattgtgcaactactcctgcagcacggagctgatgtgcacgcaaaggacaaggggggccttgttccgcttcataatgcttgttcatacggtcactacgaggtgaccgagctgttgctaaagcacggagcctgcgtaaacgctatggatctgtggcaattcacacctctgcatgaagcggcgtctaagaatagagtcgaagtgtgctccttactgctgtcacatggggccgacccgactctcgttaactgtcacggaaaaagcgcagtcgacatggcaccaacgcccgaacttcgggaaaggctgacttacgagttcaaagggcactccctgttacaggccgctcgcgaagctgacctcgctaaagtaaaaaagacactggcacttgaaattatcaactttaaacagccacagagtcatgagaccgccctgcactgtgcagtcgcttccctccacccaaagcgcaagcaggtgacagaactcctgctccgaaaaggggcaaacgtgaacgaaaaaaataaagactttatgacgcctctgcacgtcgcagccgaaagggcccataacgatgtgatggaagtgctgcacaagcacggcgccaagatgaatgctttggacacccttggccagaccgctctgcatcgcgccgctctggccggacatttacagacttgcagattgttgctcagctacggttccgacccgtctatcatctcactccagggcttcaccgcagcccagatgggcaacgaggcggtacagcagattctgtccgagagcactccaatccgaacgtctgacgtggattacagactgctggaggccagcaaggccggagatcttgagacggttaagcagctatgtagctctcagaacgtgaattgccgcgatctggaagggcgtcactcaaccccactacacttcgcagcaggttataaccgcgtcagcgtggttgaatatcttctacaccacggtgcagacgtgcatgctaaggacaaggggggcctcgtgcctttgcataacgcgtgctcatatggtcactacgaggttgccgagctcctcgtgagacacggagcctctgtgaacgttgccgacctgtggaaatttacacctctgcatgaggcagccgccaaagggaaatatgagatatgcaagctgctcctcaaacacggcgcagatcccactaagaagaatcgggatggcaatacccctctggaccttgtgaaggagggagataccgacattcaggatctgctgcggggcgacgccgccttgctcgacgctgcaaaaaaagggtgtttggcccgtgtccagaagctgtgtacacccgagaacattaactgcagagatacacagggccgaaattccacacctttgcatctggcagccggctacaacaatctggaagtcgccgagtacttactggagcacggggccgacgtaaacgcccaggataagggcggacttataccactccataacgctgcttcttacggccacgtcgatattgccgcccttttgatcaagtataacacatgtgtgaatgctactgacaagtgggcattcacaccccttcacgaagctgcccagaagggtagaacccagctctgtgccttgcttctggcacacggagcagaccctacaatgaaaaaccaggaggggcagacaccactcgacttggccacagctgatgatataagagcactcctcatagacgcgatgccgcctgaagctctgcctacttgttttaagccgcaggctaccgtcgttagcgcctctctcatttcccccgcctcaactccctcctgcctgagtgcggcatcctctatcgacaaccttaccggaccactggcagagttagcggtgggtggggcctccaatgccggcgacggtgcagccgggactgaaagaaaggagggcgaagtcgccggcctggatatgaatattagccagtttctgaagtctctcggtttggaacatctgcgcgatatcttcgagaccgaacagattacactcgatgttctggctgacatgggtcatgaggaactgaaagagatcggcattaacgcctacggtcaccgccataaactaattaaaggcgttgaacggctcctgggaggtcagcaggggactaacccatatctgacttttcattgcgtgaaccaggggacaatcctgctcgacctcgccccagaggataaggagtatcagagtgttgaagaggaaatgcagtcgaccattagagaacaccgcgacgggggaaatgccggaggcatcttcaaccggtataacgtcattcgcattcagaaggtggtgaataagaaactgagagaacggttttgccaccgccaaaaggaggtgtccgaggagaaccataaccaccacaacgagcgcatgctgttccacggatcccctttcatcaacgcgattattcacaaggggttcgacgaacggcatgcatacataggtggtatgttcggtgcgggcatatattttgccgagaactccagcaagtctaatcagtatgtatatggaattggtggagggactgggtgcccgacccacaaggaccgctcctgttacatctgtcataggcagatgctcttctgccgggtcaccctgggcaagtcatttctgcagttcagcaccatgaagatggcacacgccccaccaggccatcactcggtgataggtcggccttcggttaatggcttggcctacgcagagtatgtgatatatcgaggcgaacaggcctatcctgaatatctgattacctatcagataatgaagcctgaggctcccagccagaccgccaccgccgcggaacagaagacttag

SEQ ID NO: 26559 - DNA, 3501 bp, synthetic construct
  misc_feature 1..3501: note = Description of Artificial Sequence: Synthetic coding sequence
  source 1..3501: mol_type = other DNA
atgagcggccggcggtgcgccggcggcggcgccgcctgcgccagcgctgctgccgaggccgtcgaacccgcggcccgagagttgtttgaggcatgtcgaaacggggacgtggagcgcgtcaaaagactggtcacacctgaaaaggtgaactcaagagatacagctggccggaaatccacaccgctgcattttgccgctggcttcgggcggaaagacgtagtggaatacttactacagaatggtgcaaatgttcaagccagggatgatggtgggctgatccctctgcacaacgcctgcagcttcggacatgccgaggttgtgaatctcctccttcggcatggcgcggatccaaatgcaagggacaattggaactacacacctctgcacgaagcagcaattaaggggaagatcgatgtgtgcattgtcctgctgcagcacggcgctgagccaacaattcggaacacggacgggcgaacggcactcgaccttgcggacccatctgccaaggccgtgttgaccggtgaatacaagaaggacgagctattggagtcagccaggagcggtaacgaagaaaagatgatggcactgttaacccccctaaatgttaattgtcacgcatccgatggccgcaagagtacaccgcttcatctggctgcggggtataaccgcgtcaaaattgtgcaattattactgcagcacggcgctgatgtacatgcaaaagacaagggagacttagtaccgctgcataacgcttgctcctacggacactacgaagtgactgaactgcttgtcaagcatggagcttgtgtgaatgccatggacctctggcagttcacacctttgcatgaggctgcgtccaagaaccgcgtcgaggtctgtagccttctgctaagttacggcgctgatcctaccttgctcaattgccacaacaagagtgctattgatttagctcccactccacagttgaaagagaggttggcctatgagttcaaagggcactccctcctccaggctgccagagaggctgacgtgactcgcataaaaaagcatctcagcctggaaatggtcaactttaaacatcctcagacgcatgaaactgcactgcattgtgccgcagccagtccgtaccctaaaaggaaacaaatatgtgaactgctccttcggaagggtgccaacatcaatgaaaagactaaggagttcctgactcctcttcacgttgcgtcagagaaagcacataacgatgtagtggaggttgtcgtcaagcacgaggccaaggttaatgcacttgataacctgggccaaacaagtttgcatcgcgctgcgtattgtggtcacctccagacctgtagactgctcctcagttatggctgtgatcccaacataattagcctgcaaggtttcaccgccctccagatgggcaatgagaatgttcagcaactgctgcaggaaggaatttccctgggaaattcggaggctgacagacaactgctagaagcagccaaggccggggatgtagaaacagtgaagaagctatgcaccgtgcaatctgtaaattgtcgcgatattgaggggagacaaagcacaccacttcactttgctgccggctataatcgcgtcagcgtcgtggagtatttgctgcagcacggtgctgatgtgcatgccaaagataagggagggttagtgccccttcataacgcttgttcttatggccattacgaagtggccgaactgctggttaagcatggtgcggtggtaaatgtcgccgatttatggaaattcacaccactacacgaggcagctgcaaaaggcaagtacgaaatctgcaagctgcttctgcaacacggcgcggatcccacaaagaagaacagggatggaaatacgcccctggatttggtcaaggacggcgatacagacatccaggatctgcttcgaggtgacgcagcactcctggacgctgctaagaagggctgtctggctcgggtcaaaaagctatcctcaccagacaatgtcaactgtcgagacactcagggtcgacactccacgccacttcacctcgccgccggctacaataacctggaggttgccgaatatctactacaacacggtgcagatgtgaatgctcaggataaaggaggtctgatccctttgcataatgcagcctcttatggtcatgtggacgttgctgctctgctcattaagtataatgcgtgtgtcaatgccaccgataaatgggcctttacgcccctgcacgaagcagcccagaaagggcgaactcagctgtgtgctctgctgctggctcacggcgctgaccccacactgaagaatcaagagggacagacccctttagatttggtgagcgctgacgacgtatcagcactactgacggcagcaatgcccccttctgcgttgccctcgtgctacaaaccacaggtgcttaatggcgtccgttctccaggcgccactgctgatgccctgtccagcggcccatcctcaccctcatcactctccgctgcatccagtctggataacctgagcggcagcttctctgagctttctagtgttgtgagttctagcgggacagaaggtgcttcttcgttagaaaagaaggaagtccctggggtcgacttcagcattacccagttcgttaggaatctcggtttagagcacctgatggacatatttgagagggagcagataaccctcgatgtccttgtggaaatggggcacaaagaacttaaggagataggaattaacgcctacggccacagacacaaactgatcaagggggtggaacgattgattagtggtcagcagggacttaacccttacctgacacttaacacctcaggttcaggcaccattttgatcgatctgagtcccgatgacaaggagtttcagtctgtcgaagaggagatgcaatctactgtgcgggagcatcgggacggcggccacgcaggcgggatttttaacagatataacattctgaaaatacagaaagtgtgcaataagaaactctgggagagatacactcacaggcggaaggaggtgtctgaagagaatcacaatcacgccaatgagagaatgctgttccacggctcacccttcgtcaacgccattattcataaggggttcgatgaaagacacgcatatatcggtgggatgtttggcgctggcatctatttcgccgaaaacagcagtaaaagtaaccagtatgtctatggcatcggaggagggacaggatgccccgtgcacaaagacagatcctgttacatctgccaccggcaactcttattctgtcgtgtaacattaggaaaatcttttcttcagttcagcgccatgaagatggcacatagcccaccaggtcatcactctgtgacaggcagaccatccgtgaacgggctggctctcgccgagtatgttatctatcggggagaacaggcctaccccgaatatctaattacctaccaaattatgagaccggaggggatggtcgacggctag

SEQ ID NO: 26560 - DNA, 2139 bp, synthetic construct
  misc_feature 1..2139: note = Description of Artificial Sequence: Synthetic coding sequence
  source 1..2139: mol_type = other DNA
atgcgggagcccgccctggccgccagcgccatggcctaccacccctttcacgctcccaggccggcggacttccctatgagtgccttcctggctgctgcacagcctagcttcttccccgctctagcactgccacccggggctcttgcaaaacctctgcccgatcccggccttgccggtgccgctgctgcagctgctgccgccgccgccgcagccgaagccggcctacacgtgagtgccctagggccccaccctcctgccgcacacttacgaagccttaagagcttggagccagaggacgaggtcgaggacgacccaaaagtcacgctcgaagctaaggagttgtgggatcaattccataagctgggtacagagatggtaatcacgaaaagcggaagacgtatgtttcctcctttcaaagttcgagtgtccggcctggataaaaaagcgaagtatatcttgcttatggatatcgtggccgcagatgattgccggtacaaattccataattctagatggatggttgctggaaaagcggaccccgaaatgcccaagaggatgtatatacatcccgactctcctgctaccggagagcagtggatggccaaacctgtggcttttcacaagcttaaactgaccaataatatcagtgacaagcacggattcaccattctcaactcgatgcacaagtaccaacccaggtttcatatagttcgcgcaaacgatatcctcaaactgccctactcaacatttagaacttacgtgttccctgagacagacttcatcgcggttaccgcctaccagaatgataagatcacgcagctcaagatcgacaataatccgttcgccaagggattccgggatactgggaatggccgcagggagaagcgcaaacagcttacacttcccagccttcgcttatacgaagaacattgcaagccagaaagggatggagccgagagcgatgcctcgtcttgtgaccctcccccggccagagaacccccaacaagtcctggtgccgcccctagccctctccgattgcaccgtgcacgggcagaggagaagtcttgtgccgccgacagcgacccagaaccagaaaggctctccgaagagcgagcaggcgcgccactgggacgcagtccagcgcctgattctgcctcgccaactagactgaccgagccagagagagctcgggagaggaggtctcccgaaagagggaaggagccagcagagagtggaggggatggaccattcggtttgcgatcccttgagaaagagcgtgctgaggctcgccggaaagacgaagggaggaaggaagctgctgaaggaaaggagcagggcctggccccgctggttgttcagactgacagtgctagccccctgggagctgggcacctgcctgggctggcattctcgtctcacttgcatggccagcagttcttcggacccttgggggcaggtcagccgctattcctgcaccctggccagtttactatggggcccggcgccttctctgctatgggaatgggtcacctgttggcttccgtggctggaggcgggaacggtggcgggggtggaccaggcaccgccgccgggctggatgctggggggctgggaccagcagcctctgctgcaagtacagctgcccccttccccttccatctctctcagcatatgctggcttcccagggtattcccatgcctacattcgggggcttgttcccatatccctacacgtacatggcagcagcagccgcggctgcttccgccttgcccgcaacttcagctgccgccgcagccgcagcggccgcaggctcgctgagccggtctccatttcttggctcagcccgccctcgcctacgattttctccatatcagatccctgtgaccatcccccccagcacatctctgctcaccactggcctggctagtgagggctccaaagctgctggcggcaactcccgagaaccgtcacctcttccagaactggccctacggaaagtaggcgccccatcccggggggcactcagcccttctggtagtgcgaaagaggccgccaatgagcttcagagcatacagcgactagtctctggcttggagagccagcgcgctctcagcccaggccgagaatcaccaaaatag

SEQ ID NO: 26561 - DNA, 981 bp, synthetic construct
  misc_feature 1..981: note = Description of Artificial Sequence: Synthetic coding sequence
  source 1..981: mol_type = other DNA
atgagcgccttcctggccgccgcccagcccagcttcttccccgccctcgccctcccccctggggctctggccaagccactacctgatcctgggctcgctggggcagctgccgcagctgctgccgctgccgcagcagccgaggcagggctgcacgtctctgctttaggaccgcatccacctgctgcccatctgagaagcctgaagagtctggagccagaggacgaggtcgaagatgacccaaaagtcacactggaagcaaaggagctctgggaccagtttcacaaattgggcaccgagatggtgataacaaagtccggcaggaggatgtttccaccgtttaaggtgcgtgtgtcgggcttggacaagaaagccaaatacatcctgctaatggacatcgtagcagccgacgactgtcgctacaaatttcataattcacgctggatggtcgcggggaaggccgatccagaaatgccgaagaggatgtatatccatcctgattctcccgctacaggagagcagtggatggctaagcctgtcgcttttcataagctgaaactgacgaataacatcagtgacaagcacgggtttactatcctcaacagcatgcacaaataccagcctaggttccacatcgtgcgcgcaaatgacatcctcaagttgccctattctaccttccgcacctacgttttccccgaaaccgatttcattgccgtgaccgcttatcagaacgacaaaataacacagttaaaaatcgataacaacccttttgccaagggatttcgtgataccggcaatggtcgccgggaaaaacgaaagcagctaacgttacccagtctgaggctgtatgaagagcattgtaagccagaaagagacggggctgagtctgacgcctcgtcttgcgatccaccacctgcccgggagccgcccactagcccaggtgctgcacctagtcctctcagattgcaccgggccaggggatag

SEQ ID NO: 26562 - DNA, 996 bp, synthetic construct
  misc_feature 1..996: note = Description of Artificial Sequence: Synthetic coding sequence
  source 1..996: mol_type = other DNA
atgaccgagcggccccccagcgaggccgcccggagcgacccccagctggagggcagagacgccgcggaggcttctatggcaccacctcatttggttttgcttaatggcgtggccaaagaaaccagtcgcgccgcagcagcagaaccccctgtcattgaactgggtgcccggggtggtcctggcggtggccctgctggtggcgggggggcggctagagatttaaagggccgcgacgctgccacggcagaagctagacacagggtacccacaaccgagctgtgtcggccccctgggccagctccagcgcctgctcctgcttctgtcactgccgagcttcccggcgacgggaggatggtccaactgtcccctccggcactagccgcccctgctgccccgggtagagccctgctttactcactgtcacagccgcttgcgtccctcggtagcggattcttcggcgagcctgacgcctttccgatgtttacaacaaataaccgggtgaaaaggcggccttcaccatacgaaatggaaatcactgacgggccgcacacaaaggtcgtgcgcagaatcttcaccaactcacgggagagatggcggcagcaaaatgtgaatggtgcgttcgccgaactcagaaagctgatccctacccatcctccagataagaaactgagtaagaatgaaatactgagactagcaatgaagtacatcaacttcctggctaaactcttgaacgaccaggaagaagagggcactcagcgagctaagactggaaaagatcccgtagtgggggctgggggcggaggaggtggcgggggaggtggcgctccccctgacgacctgctgcaggacgtgctgagccctaactcatcctgcggctcatccctggatggggctgccagcccagactcctatacggaagagccggcacccaagcacacggctagatccctgcatcccgccatgctcccagccgctgacggcgccggccctagatag

SEQ ID NO: 26563 - DNA, 1002 bp, synthetic construct
  misc_feature 1..1002: note = Description of Artificial Sequence: Synthetic coding sequence
  source 1..1002: mol_type = other DNA
atgaccgagcggccccccagcgaggccgcccggagcgacccccagctggaaggacgagacgccgcagaggcgtccatggcaccgccccatttggtgctgctaaacggggtggctaaagaaacatccagggcggcagcggcagaaccgcccgtcatcgagttaggtgcacgcggaggaccaggcggtggcccagcgggcgggggcggagccgcgagagacttaaaggggagggacgctgctacagccgaggcaaggcaccgggtgcctaccacggaactgtgcagaccgcccggcccagcaccggcccctgctcccgctagcgttactgccgagctacctggtgacgggcgtatggtgcaactctcaccccctgcactggccgcccccgcagctccaggtcgggccctcttgtactccttgtctcagcccttggcctcactgggaagccatagtggcttctttggcgaaccagacgcttttcccatgtttactaccaataacagggtcaagcgccggccttcaccctacgagatggagattaccgacgggcctcacaccaaggtcgtaaggagaatcttcaccaactcacgagaacgctggaggcagcaaaacgtgaacggagcatttgcagagcttcggaaactgatacctactcaccctccggataaaaaactgtctaagaatgagattctgcgcctggccatgaaatacattaacttcctggccaaactcctgaatgatcaggaggaggaaggaacgcagagagccaaaacagggaaggaccccgtggttggggccggcggtgggggagggggaggtggagggggggccccaccggacgacctgctccaggatgtactctccccaaactcgtcttgtgggagctcgctggacggcgccgccagccccgactcctacactgaagagcccgcccctaaacataccgctcggagcctccacccagcaatgttacccgcggccgatggggcgggtccccgctag

SEQ ID NO: 26564 - DNA, 996 bp, synthetic construct
  misc_feature 1..996: note = Description of Artificial Sequence: Synthetic coding sequence
  source 1..996: mol_type = other DNA
atgaccgagcggccccccagcgaggccgcccggagcgacccccagttggaaggacgggatgcggccgaggcctcaatggccccaccacacttggttctgttgaatggcgttgcgaaggagacctctcgtgccgctgcggccgaaccccctgtcatcgaactgggtgcccgaggtggccccgggggaggacctgccgggggagggggggcagctcgagatctgaagggccgagacgcagcaacagctgaagccagacaccgagtgcctacaacagaattgtgccgtccacccgggcccgcacctgcccccgcccccgccagcgtcactgcggaacttcccggggacggtagaatggtgcagctgagcccccctgctctggccgcacctgctgcccccggaagggccctcctctacagtctgagtcagcctcttgcatcactcgggtccggcttctttggggaacctgacgctttcccaatgtttaccacgaacaaccgcgtgaaacgacgccctagtccgtacgagatggaaattacggacggcccccacactaaggtggtcaggagaattttcacgaattcccgcgaacgatggagacagcagaatgtgaacggcgcttttgccgagttgcgtaaactcatccctacccacccgcctgacaagaaactgagcaagaacgaaatcctgaggcttgccatgaagtacatcaactttctcgccaaactcctgaatgatcaagaagaagagggaacacaacgggcaaagacaggtaaggacccagtcgtcggggctggagggggggggggaggcggaggaggaggggcaccccctgacgacctgcttcaggacgtgctgtccccaaacagctcttgtggaagcagcttagacggcgctgcctcccccgatagttacactgaagaacccgcccctaaacatactgcccgtagcctgcatccagccatgcttccggcggccgatggggctggccctcgctag

SEQ ID NO: 26565 - DNA, 993 bp, synthetic construct
  misc_feature 1..993: note = Description of Artificial Sequence: Synthetic coding sequence
  source 1..993: mol_type = other DNA
atggagcacctgggcccccaccacctgcaccccggccacgccgagcccatctcgttcgggatagaccaaatactcaattcccccgaccagggggggtgcatgggccctgccagcagactgcaggacggtgagtacggcttgggttgcttggtcggaggtgcctatacctacggaggcggaggttccgcagccgcaactggggccggtggcgccggggcctatggcactggcggtcccggggggccaggaggaccagccggcggcggcggtgcctgcagcatgggaccgcttaccggttcatataatgtgaacatggcgctcgcgggtgggccaggtcccggtgggggcggaggcagttccggaggtgccggcgctctctccgcagccggtgttattcgggtgccagctcatcgtcctctcgctggagctgtggcacatccacaacccctagccaccggattgcctacagtaccaagcgttccggccatgcccggcgtcaataatctcacaggactgacctttccctggatggaatctaatcgcagatacaccaaagatagattcactggccacccataccagaataggaccccacctaagaagaaaaaaccacgaacctccttcactcgcctccaaatttgcgaattagagaagcggttccatcgacagaaatacctggcttccgctgagcgagcggccctcgcaaaagccttaaagatgactgatgcacaggtcaaaacatggtttcaaaacagacgaaccaagtggagacggcagacagccgaggaacgcgaggccgaaagacagcaggcaaacaggatattattacaactccaacaagaggcatttcaaaaatcactcgcacaaccactgccagctgatccactctgcgtccataatagtagcctatttgccttgcaaaacctgcagccttggtcagacgacagtacaaaaatcaccagcgttacctccgtagcgtccgcttgcgagtag

SEQ ID NO: 26566 - DNA, 774 bp, synthetic construct
  misc_feature 1..774: note = Description of Artificial Sequence: Synthetic coding sequence
  source 1..774: mol_type = other DNA
atggagcacctgggcccccaccacctgcaccccggccacgccgagccaatctctttcggcatagaccaaattcttaactcacctgaccagggaggttgtatgggcccagcttctcgcctgcaggacggcgaatacggtcttggttgcttggtgggcggggcatatacctatggaggcggaggatctgctgctgcgaccggagcagggggggctggagcctacggtaccggcggacccgggggccccggaggaccggccgggggcggtggggcatgcagcatgggtccgctaacaggcagctataacgtcaatatggccctggccggaggtcccgggcccggaggcggaggaggcagctcgggaggtgctggcgccctctccgccgcgggagtcatccgtgtacctgcacatcgccctttggccggcgccgttgctcacccccagcccttggccacaggacttccaactgttccctctgtcccggctatgccaggcgtcaacaatctcaccggactcacttttccttggatggaaagcaacagacgctacaccaaggaccgctttacagggcacccataccagaatcggactccacccaaaaaaaagaaacccagaacaagtttcacacggctgcagatatgtgaattagagaaaaggtttcaccgccaaaaatacctcgcaagtgcagaacgggcggctctggcaaaagctctgaagatgaccgacgcccaggttaaaacttggttccaaaacagacggacaaaatggcggtag

SEQ ID NO: 26567 - DNA, 345 bp, synthetic construct
  misc_feature 1..345: note = Description of Artificial Sequence: Synthetic coding sequence
  source 1..345: mol_type = other DNA
atggccgagtgccccaccctgggcgaggccgtgaccgaccaccccgatcggctttgggcttgggagaaattcgtgtacctggacgaaaagcagcatgcatggcttccactgacaatagagataaaagacaggctgcaacttagagtcctcctgcgaagggaagacgtcgtgctaggcagacccatgacccctacccagatcggcccgtcactcctgccaattatgtggcagctgtatcccgacggccgctaccgctctagcgacagttccttctggcgcctggtctatcacatcaagatcgacggggtggaggacatgctcctggagttactgcctgacgattag

SEQ ID NO: 26568 - DNA, 345 bp, synthetic construct
  misc_feature 1..345: note = Description of Artificial Sequence: Synthetic coding sequence
  source 1..345: mol_type = other DNA
atggccgagtgccccaccctgggcgaggccgtgaccgaccaccccgatcgcctctgggcttgggagaaattcgtctacctcgatgaaaaacaacacgcctggctccctctgacgatcgagattaaggaccgccttcagctccgcgtcttgctgcgcagggaggacgtggttctcggacgtcctatgactccaacgcagattgggcccagtctcctgccaattatgtggcagctgtatcctgacggacggtacagatcctcagactcttcattttggcgcctggtatatcacatcaaaattgatggagtggaggatatgttgctcgaacttctccctgacgactag

SEQ ID NO: 26569 - DNA, 345 bp, synthetic construct
  misc_feature 1..345: note = Description of Artificial Sequence: Synthetic coding sequence
  source 1..345: mol_type = other DNA
atggccgagtgccccaccctgggcgaggccgtgaccgaccaccccgaccgcctctgggcttgggaaaaattcgtctacttggacgaaaagcagcatgcctggctcccactgacaatcgagattaaagatcggttacagctgcgcgtgctgctcaggcgtgaagatgtggtcctgggacgccccatgacaccgacccagatcggaccctctctgctccccattatgtggcagttataccctgacggtcggtaccggtcatcggattctagtttttggcgcctggtttaccatattaaaatcgatggcgtcgaggacatgcttcttgagttgctcccagatgattag

SEQ ID NO: 26570 - DNA, 345 bp, synthetic construct
  misc_feature 1..345: note = Description of Artificial Sequence: Synthetic coding sequence
  source 1..345: mol_type = other DNA
atggccgagtgccccaccctgggcgaggccgtgaccgaccaccccgacagactgtgggcttgggagaagtttgtctatcttgatgagaaacagcatgcctggttacctctcactattgaaatcaaggatcgccttcagctacgagtgctgctacggagggaggatgtggttctaggaaggccaatgactccaacgcagatcgggccttctttgctccccattatgtggcaactatatccagatgggagataccggagctccgactccagtttctggaggctcgtgtaccacatcaaaatcgatggcgtggaagacatgctcctggaactgctaccagatgattag

SEQ ID NO: 26571 - DNA, 1407 bp, synthetic construct
  misc_feature 1..1407: note = Description of Artificial Sequence: Synthetic coding sequence
  source 1..1407: mol_type = other DNA
atggacagcctggccagcctggtgctgtgcggcgtgagcctgctgctgtctggaaccgttgagggagctatggacttgattctcatcaatagtctccccctcgtctcagatgctgagacctccttgacctgcatagccagtgggtggaggccccacgaacctatcaccattggccgtgactttgaagctctgatgaatcagcatcaggaccccttggaggttacccaagacgtaacgcgtgagtgggccaagaaggttgtctggaaacgtgagaaggcgtcaaagattaacggggcctatttttgcgaaggcagggttaggggtgaggctattcggatacgaacaatgaaaatgcggcagcaggccagcttcctccccgccacactgacaatgacggtagacaagggagataatgtaaacatctctttcaaaaaggtgctgataaaggaagaggatgcagtgatctacaaaaatgggagcttcattcattctgtcccgcggcacgaagtgcctgatattttggaggtgcacctgccccatgctcaaccccaggatgccggtgtctactctgcccggtatatcggtggcaacctgtttacctcagccttcactagattgatcgtgcgtcggtgtgaagcacagaaatggggcccagaatgcaatcacctgtgcactgcatgtatgaataacggcgtctgtcatgaagacaccggtgaatgcatctgccccccagggtttatgggaagaacgtgcgagaaggcgtgcgaattgcataccttcggccgaacctgtaaggaacgatgttccggccaggaagggtgcaagagctacgttttttgtctccccgacccctacggatgcagctgtgccactggctggaagggcttacagtgtaatgaggggatccagcgcatgacaccaaagattgtggacttgcccgatcacatcgaagtgaattctggcaagtttaatcccatatgcaaagcctccggctggcctctgccaaccaacgaagagatgaccctggtcaagcctgatggaactgttcttcatccgaaggattttaatcacacagatcacttctctgttgcaattttcactatccaccggattctgcctcctgattccggggtctgggtgtgttccgtcaataccgtggctgggatggtggagaagccattcaacatctcagtgaaagtacttccgaagccgcttaacgccccgaatgtgatcgataccgggcacaatttcgccgtgataaatatttcttctgagccttactttggggacggtccaataaaatcgaagaagctgctgtataagcccgtcaaccattacgaagcctggcagcacatccaagtgtccatggagaaacagcgactgactaaggcaaactcagacatctag

SEQ ID NO: 26572 - DNA, 3375 bp, synthetic construct
  misc_feature 1..3375: note = Description of Artificial Sequence: Synthetic coding sequence
  source 1..3375: mol_type = other DNA
atggacagcctggccagcctggtgctgtgcggcgtgagcctgctgcttagcggaactgtcgaaggcgccatggacctgatcctgataaactctctcccattagtatccgacgcagagacctcacttacatgtatcgccagcgggtggaggccccatgaacctatcaccattggtagagatttcgaggccctgatgaatcagcatcaggaccctcttgaggtaacgcaggatgtgactagggagtgggctaagaaagtcgtgtggaaaagagaaaaagcttcaaagatcaatggagcttacttctgtgaggggcgagtgcggggtgaagctatccgaattaggaccatgaagatgaggcagcaggcaagttttttaccagccactctgaccatgactgtggacaaaggggacaatgtaaacatatctttcaaaaaggtgctaataaaagaggaggacgctgtgatctataagaacggatcttttattcactccgtgccacggcacgaggtccccgacattctggaggtccatctcccccatgcacaaccccaggacgccggcgtgtatagcgcgagatacatcggtggcaatctctttacatcagcgtttaccaggctgatcgttcgccgatgcgaggcacagaaatggggccccgaatgcaatcatctgtgtacagcgtgcatgaataacggcgtttgccacgaagacacaggggagtgcatatgtcccccaggtttcatgggccgaacctgcgaaaaggcttgtgagctacacacgttcggaagaacatgcaaagaacgttgctccgggcaggaaggctgtaagagctacgtgttttgtcttcctgatccctacggttgcagttgcgcaacaggctggaaggggctgcagtgtaatgaggcctgccaccccgggttctacgggccagattgcaaattgagatgttcctgtaacaacggtgagatgtgcgaccggttccagggctgcctttgcagtccaggttggcaaggcctgcagtgcgagagagagggtattcaacgaatgacaccgaagatcgtcgatttgcccgaccacatcgaggtgaatagcggtaaattcaacccgatttgcaaagcctcaggctggccactgccaaccaatgaagagatgacgctggtgaaaccggatggtactgttctgcatccaaaagactttaatcatactgatcactttagcgtcgccatttttaccatacacagaatactaccacctgattctggggtgtgggtctgctccgtcaacacagtggccgggatggtggagaagccttttaatatttccgttaaagtgctaccaaaacccctcaatgcccccaacgtgatagacaccgggcataatttcgcggtcattaacattagctcagaaccctactttggggatggccctatcaagtcaaagaaactgttatataaacccgtgaaccattatgaagcttggcagcacatccaggtgacgaatgaaattgtaaccctaaactacctggaacccaggacagaatatgagctgtgtgttcaactagtgagacgcggtgaagggggggaggggcacccaggaccggtccgcagattcacaaccgcctctattgggttaccccctcctcgagggctgaatctgttacctaagtcacagaccactctcaatctgacatggcagcccattttcccgtcctcagaggacgatttttatgtggaggtcgaaagacgatctgtacaaaagagtgaccaacagaacatcaaggtgcccggtaatttgaccagcgtcctacttaataacttacaccctcgggagcagtatgtcgtgagagcgagagtgaataccaaagcccagggcgagtggtcggaggatctgacagcttggacgttaagcgacattctgccccctcagccagagaatattaagatttccaacatcactcactcttctgcagtgatcagttggaccattttagacggctattccatctcatccatcacaataaggtataaggtacaggggaaaaatgaggatcagcatgtcgatgtcaagattaagaatgccactattacccagtaccagctcaaaggactggaacccgagaccgcataccaagttgacatattcgccgaaaataacatcggctctagtaacccagcgttctcgcatgaactcgtcaccttaccggaaagccaagcaccggccgatttgggaggtggcaagatgctgcttattgctatcctgggctcagcaggcatgacctgcttgaccgtactgctggcttttttgataattctgcagttaaaacgtgccaacgtccagcgaaggatggcacaggcttttcaaaatgtgcgggaagaacccgccgtacagtttaattccggtactctggcactcaacaggaaagttaagaataatccagatccaactatatatccagtattggactggaatgatatcaagtttcaagacgtgataggggagggaaattttggccaggtgctcaaggcccgcatcaaaaaggatgggcttaggatggacgccgcgatcaaacggatgaaggaatacgcctccaaggatgatcaccgcgattttgccggtgagctggaagtgctttgcaaactggggcaccatcctaacattattaacctgctgggcgcctgtgaacaccgagggtatctatatcttgctatcgaatatgcaccacatgggaatctgctcgattttctccgaaaatcaagggtcctggagactgatccggccttcgcaatagccaatagcactgcctcaaccttgtcttctcaacagttgctccacttcgccgccgacgttgcaaggggcatggactatctgtcgcagaagcaatttattcatagagacctggccgcgcgcaatatccttgttggcgaaaactacgtggccaaaatcgcagattttgggttatcccgtggacaagaggtgtacgtgaaaaagacgatggggcgacttcctgtcaggtggatggctatagaatcactgaattactccgtatataccacaaattcagacgtgtggtcctacggcgtgctcctttgggagatcgtttcactgggcgggactccttattgtgggatgacttgtgccgaactctacgagaagctccctcaaggctaccgattggaaaagccactgaactgtgatgatgaagtctatgaccttatgcgacagtgctggagggaaaagccctacgagagaccttcctttgcccagatactcgtcagcctgaataggatgctggaggaacggaaaacctatgttaatacaacactctacgagaaattcacttacgcaggaatcgattgttctgccgaagaagccgcctag

SEQ ID NO: 26573 - DNA, 3246 bp, synthetic construct
  misc_feature 1..3246: note = Description of Artificial Sequence: Synthetic coding sequence
  source 1..3246: mol_type = other DNA
atggacagcctggccagcctggtgctgtgcggcgtgagcctgctgctctccgggaccgtcgaaggcgcaatggatttaatcttaataaatagtctccctctggtctctgatgccgagacgtcgctgacctgtatcgcaagcggatggagaccccatgagcccataactattggccgggatttcgaagcgctgatgaatcaacatcaggatcccctcgaggtaactcaggacgttacgagagaatgggctaaaaaagttgtgtggaaacgggaaaaggcatccaagatcaacggggcctacttctgcgagggcagggtacgaggggaggccatacggattagaaccatgaagatgcggcaacaggctagttttttgcctgctacactaactatgactgtagataagggcgacaacgtcaatatttctttcaagaaagtgctgatcaaagaggaagacgccgtgatatacaagaacgggtcatttatacattctgtgcccaggcacgaagtacccgatatcttagaagtgcatttgccacatgcacagcctcaagatgcaggtgtgtatagcgccaggtatatcggaggtaacctattcaccagtgcctttaccagactgatcgtaaggcggtgcgaagcccagaaatggggtccagaatgtaatcacttgtgtacggcatgcatgaacaacggagtttgccacgaggacactggcgagtgcatatgcccacctggattcatggggcgcacgtgcgagaaagcctgtgagcttcatacgttcgggcggacatgtaaggaacgctgcagtggccaagaaggatgcaagtcctacgtcttctgtctacctgacccttacggttgcagttgcgcgaccggctggaagggcctgcagtgtaacgagggtattcagcggatgaccccaaaaattgtggacctgccggatcacatcgaagtgaacagcggcaaatttaatcccatttgtaaggcatccgggtggccattacccacaaacgaagagatgacccttgtcaagccagatggaacagtactacaccctaaggatttcaaccacaccgaccatttttctgtggcgatttttacgatccaccggatccttccaccagattccggagtctgggtgtgctccgtgaataccgtggccggtatggtcgagaagccgttcaacatcagtgttaaggtgttacccaagcctctcaatgctcccaacgtaattgacacagggcacaactttgccgtgattaatatcagcagtgagccctattttggtgatggccccattaagtccaagaaattattgtacaaaccagtgaaccactatgaagcctggcagcatatccaggtcacaaacgaaatcgtcacactcaattatctggaaccaaggactgaatacgagttatgtgttcagctggtaaggcggggtgaaggcggagagggacatcccggtcccgtaagacgcttcacaaccgccagtattgggttgcccccgccacgcggcctgaatctcctgccaaagtctcagacaaccttgaacctgacgtggcagcctattttccctagcagcgaagacgacttctacgtggaggttgaaagacgctctgtgcagaagtctgatcagcagaacatcaaggtgccgggcaatctaactagtgtgctgcttaataatctccacccccgagagcagtatgtcgttagagcaagagtgaacaccaaagcccagggggaatggagcgaggacctgactgcctggaccctatcagacatattgcctccccagcctgagaatattaaaatttcaaacattactcacagttcagccgtgatctcatggactatcctcgatggctattctatttcttcaattactattcgctataaagttcagggcaaaaatgaggaccagcatgtcgacgtgaagattaaaaacgccacaatcacacaataccagctcaagggtcttgaaccagagacagcctaccaggtggatatttttgctgagaataacatcgggtctagcaaccccgcattctctcacgaactggtgaccctgccggagagccaggctcccgcggatctcggaggcgggaagatgcttcttatcgctatattagggagcgctggtatgacatgcctgaccgtgctgttggcctttttaatcattctgcaacttaagagagccaatgtacaacggcggatggcccaggcttttcagaacgtgcgggaagagccagctgtgcagtttaatagcggtactctggcactgaatcgaaaggtgaaaaataaccccgatcctacgatataccctgtcttggattggaatgacatcaagttccaggatgtgattggcgaagggaattttggtcaggtcctcaaggccaggatcaagaaagacggtctgcgtatggatgctgccattaaaagaatgaaggaatatgcttctaaggacgaccaccgtgatttcgcgggagaactggaagtgctgtgcaagctagggcaccacccaaacattatcaacctgctgggggcatgcgaacataggggttatctgtacctggcaattgagtacgcacctcacgggaacctgctggactttttgcggaagtcacgggttctggagacagacccggcctttgcaatcgcaaattccaccgctagcaccctgtcgtcccagcagctccttcacttcgcagctgacgtagcgcgaggaatggattacctgtcccagaagcagttcatccatagagatctggcagcacgtaacatcctggttggcgagaattacgttgctaaaattgccgatttcggactgtcgagaggacaagaagtatacgtaaaaaaaactatggggcggctccccgtaagatggatggctatagagtccctgaactatagtgtgtacaccaccaactcagacgtctggtcttacggggtccttctctgggagatagtatcactgggcggtacgccctactgtggcatgacatgcgcagagctgtacgagaagttgcctcagggttacaggttggagaaacctctgaactgcgatgatgaggtctatgacctgatgagacaatgttggcgtgaaaagccctacgagcgcccatcgttcgctcaaattttggttagcctcaatcgcatgctggaggaacgcaaaacttacgttaacactactctttacgaaaagtttacatatgctggtattgattgctctgcagaagaggctgcctag

SEQ ID NO: 26574 - DNA, 3375 bp, synthetic construct
  misc_feature 1..3375: note = Description of Artificial Sequence: Synthetic coding sequence
  source 1..3375: mol_type = other DNA
atggacagcctggccagcctggtgctgtgcggcgtgagcctgctgctgtctggaaccgtagagggcgctatggacctcatcttgattaacagcctcccactggtgtccgatgctgagacatcccttacctgcatcgctagtgggtggagaccacacgagcctatcacgatcgggcgtgacttcgaagctttgatgaatcagcatcaagatccgctggaagtgacacaggacgtgaccagggaatgggccaagaaagtggtgtggaaaagggagaaagcaagtaaaatcaatggtgcttatttctgcgaaggccgggtacgtggcgaggccatcaggattaggaccatgaaaatgcgccagcaagcgagttttctcccagccaccttaaccatgacagtcgacaaaggcgataacgtcaacatctcttttaagaaagtccttattaaagaagaggatgccgtgatttacaagaacgggagtttcatccactccgtgcctcgacacgaggttcctgatatcttggaggtccacttgccccacgcacaaccccaggatgccggggtgtattctgccaggtacatcgggggcaatctcttcaccagcgccttcacaagattaattgtccggcgatgcgaagcccaaaaatggggcccggaatgcaaccacctctgtaccgcctgtatgaacaatggcgtttgccacgaggacaccggcgagtgtatttgtccacctggtttcatgggccgaacttgtgaaaaggcctgcgaattacacactttcggacgaacttgcaaagagcggtgcagcggccaggaagggtgtaagtcatacgtgttttgtcttccggatccgtacggttgtagctgcgccactggatggaagggcctgcagtgcaacgaggcttgccacccaggcttctatggacctgactgtaaactgcggtgttcatgtaataatggagagatgtgcgatcgcttccagggttgtctgtgttcaccaggatggcagggcctccaatgtgaacgtgaagggatccagcgcatgacgccaaaaatagtggatctgcctgatcatatcgaggtgaacagcggaaaatttaatccaatctgcaaggcaagcggctggccattgcccacaaacgaagagatgacactggtgaagccagatggaacagtgctccacccgaaggatttcaaccataccgaccattttagtgttgctatcttcaccattcatcgcatcctgcctccagatagtggtgtgtgggtctgcagcgtgaataccgtggctggcatggtggagaaacccttcaatatttccgtaaaagtgctcccgaagccactaaacgcgcctaacgtgatcgacaccggacacaattttgccgtcattaatataagcagcgaaccttactttggagacgggccaattaagagtaaaaaactcctttacaagcccgttaaccattacgaagcttggcaacacattcaggtgactaatgagattgtgaccttgaattatctggagcccaggactgagtatgagctctgcgtgcagttggtgagacgcggtgaagggggcgagggtcatccaggacccgtgcggcgcttcactacagcgtctatcgggctgcccccaccccgaggactgaacctgctgcccaaatcccagaccacgctcaatctcacctggcaacccatctttcctagttctgaggacgatttctacgtagaagtcgaacgcagaagcgtgcaaaagtccgatcagcagaacatcaaggtgcctggaaacctgacttctgtgctgttgaacaaccttcatccccgtgagcagtacgtggtgagggctcgtgttaacactaaggcgcagggtgaatggagtgaggatcttaccgcttggaccctctcggatatcttacccccacagcctgagaacatcaaaatcagtaacataactcatagtagcgcagtaatttcctggacgattctggacggttattcaatcagcagcatcacaatccggtataaagtgcagggtaaaaacgaggaccagcacgttgacgtcaagatcaaaaacgccaccattacgcaataccagctgaaggggctcgaaccagagaccgcctatcaggtcgatattttcgcggaaaataatatcggatcttcaaatccggccttttcccacgaactcgtgaccctgcccgagtcccaggcaccagccgacctggggggcgggaaaatgttgttaatcgcaattttgggatccgcgggaatgacctgtctaaccgtgctgctggctttcctcattatactgcaactaaagcgggccaatgtacaacggcggatggcgcaggccttccaaaacgtgcgagaagaacccgcagtgcagtttaattccgggaccctcgcactcaaccggaaagtgaaaaacaatcctgacccaacaatttacccagtgctcgactggaatgatattaaattccaggatgtgatcggcgaaggcaatttcggacaagttctgaaagccaggatcaagaaagacggcttgaggatggatgccgcgattaaacgaatgaaggagtatgcgagcaaagatgaccatagggactttgccggagagctcgaagtgctgtgcaagctgggccaccatccaaacattatcaatctgttgggcgcatgcgagcatcggggatatttatatctagccatcgaatatgcacctcatgggaatctcttggatttccttcgaaaaagcagggtgctcgagacggaccctgccttcgcaattgccaactcaacggcctcaactctttcttctcagcagctgttacactttgccgccgacgtggctaggggaatggactacctctctcagaagcagttcattcatagggatttggccgcccgtaatatactcgtcggagaaaactatgtggccaagatcgcagactttggactgagtcgaggtcaggaggtgtatgtcaaaaagaccatgggccgccttcctgttcggtggatggctatcgagagtctcaattactccgtgtacacgaccaactcggacgtttggtcatatggggtgcttttatgggagatcgtgtcactcggggggacaccttattgtggcatgacttgcgccgaactgtacgagaaactgccacaagggtataggctcgaaaagccactgaactgcgatgacgaggtgtacgaccttatgcgacagtgctggcgagaaaagccatatgaaagaccctccttcgcgcagatcttggtttctttgaatcgcatgctggaggagcgcaagacatatgtcaacaccacattatacgagaaatttacttacgctggaatcgactgttccgctgaggaagccgcttag

SEQ ID NO: 26575 - DNA, 2931 bp, synthetic construct
  misc_feature 1..2931: note = Description of Artificial Sequence: Synthetic coding sequence
  source 1..2931: mol_type = other DNA
atggacagcctggccagcctggtgctgtgcggcgtgagcctgctgctgtccgcctccttcttaccagccacattgaccatgaccgtcgataaaggtgacaatgtcaatatctccttcaaaaaagtgctgattaaggaggaagatgccgtcatctataagaacggttcgtttatccatagcgtgccaagacacgaagtgcctgatattctggaggttcacttgccccacgcacagccccaggacgcaggcgtttactccgcaagatatatcggtgggaatctgtttacaagcgccttcactcgtcttattgtgaggcgctgtgaggcacagaagtggggtccagaatgtaaccatttgtgcacagcctgtatgaataacggcgtgtgtcacgaggatactggggaatgcatctgcccccccggatttatgggccgaacatgtgagaaggcctgtgagctccatacttttggtaggacatgtaaggagcgttgcagtgggcaagagggctgtaagtcatatgttttttgcctgccagatccttacggctgctcctgcgctacagggtggaaaggactacagtgtaacgaaggcattcagcgcatgactccaaaaatagtggatctgccagatcacatcgaagtaaattccgggaagttcaatccaatctgcaaggcatccggctggccgttgcccacaaatgaggagatgactctggttaagcctgacggtactgtcttgcatcctaaggattttaaccacaccgatcacttttccgtggcgatctttactatccaccggatactccctcccgacagtggcgtgtgggtgtgctccgtcaacacagtagcgggcatggtagaaaagccctttaacatctctgtgaaggttctccctaagccgttgaacgccccgaacgtgattgataccggacacaattttgccgtcattaatatctcttcggagccctattttggtgacggcccaattaagtctaaaaaactgctatacaagcccgtgaatcattacgaagcttggcaacacatccaggttacaaacgagattgtgactttgaactacctggaaccacgcaccgaatacgaactttgtgtccagctagtgcgcagaggcgagggcggtgaggggcaccccggacctgtccggaggtttaccacagcctccatcggtctgccaccaccgcgcggtctgaacctgctgcctaagagtcaaacaaccctgaacttaacttggcagccgatcttcccgagttcagaggatgatttttatgtcgaagtggaacgccgcagcgtccagaagtctgatcagcagaatatcaaggtacctgggaatctgacgagcgtgctgctcaataacctccacccccgggagcagtatgtcgtccgggcgcgcgttaatacaaaggctcagggggaatggagcgaagatcttactgcatggactctgtccgatattctccctcctcagccggagaacatcaaaatatcaaacattacgcacagctcggcagtgatcagctggacaattctggacggatactcaatctctagtatcaccattcgctacaaggtccaggggaaaaacgaagatcagcacgtggacgttaaaattaagaacgccacgattactcagtatcagcttaaggggctggagcctgaaaccgcataccaagtggacatattcgctgagaacaacatcgggagttccaaccccgccttcagtcacgagctggtgaccttgcctgagtcacaagccccggccgacttgggaggaggaaagatgctgctgatcgcgatccttggcagcgccggtatgacatgtctgacagtgttactggccttcttgatcatcctccagctcaagcgcgccaacgtccagaggcgaatggcgcaggccttccagaaccgggaggaacctgctgtccagtttaattccggcaccttagcgctgaataggaaagtgaaaaacaaccctgatcctacgatctaccccgttctggattggaatgatataaagttccaggacgttatcggagaaggtaacttcggccaggtgctgaaagcaaggatcaagaaggacgggcttcggatggacgccgctatcaaacgcatgaaagagtatgcatcgaaggatgaccacagggacttcgcaggcgagttagaagtgctatgcaaactgggccaccaccctaacataataaacctgctgggtgcatgtgaacacagagggtatttgtatctcgccatcgaatacgcgccgcacggcaacttgttggacttcctcagaaagagcagggtactcgaaaccgaccctgctttcgcaatcgctaatagcaccgccagcacccttagttctcagcagctgctgcacttcgccgccgatgtggcaagaggcatggactaccttagtcaaaagcagtttattcacagggacctcgccgctagaaacattctggtgggcgagaattatgtggccaaaattgcagatttcggtctgagccggggccaagaggtctacgtgaaaaaaaccatgggtcgtctccctgtcagatggatggccatagaatccctcaattatagcgtctataccactaattctgatgtttggtcttatggtgtcctcctatgggaaatcgtctctctaggtgggaccccctattgtggaatgacgtgcgccgagttgtacgaaaaactgccacagggttaccgcctcgagaaaccccttaattgcgacgatgaagtctacgatctcatgcgacagtgttggcgggagaaaccctacgagagacccagcttcgcccagattctggtaagcttgaatagaatgctcgaggagagaaaaacttatgttaacactaccttgtacgagaagttcacatacgcaggcatcgattgtagtgctgaggaggctgcctag

SEQ ID NO: 26576 - DNA, 7884 bp, synthetic construct
  misc_feature 1..7884: note = Description of Artificial Sequence: Synthetic coding sequence
  source 1..7884: mol_type = other DNA
atggagaagctgcacggccacgtgagcgcccaccccgacatcctgtctctcgaaaaccgctgcctggctatgttgcccgacctgcagccgctcgaaaaacttcatcagcatgtctctactcacagcgacatcctgtctctcaagaatcaatgcctggctacacttccagacctcaagaccatggagaagcctcacggctatgtcagtgctcatccagatatcctgtctctcgagaaccagtgtctagctaccctgtctgatctgaagactatggagaaaccacatggacacgtctctgctcaccctgacatcttgtctttggagaatagatgccttgccacactcagtagcctcaaaagtaccgtttcagcatctccgctgtttcagagcttacagatctctcatatgacgcaggcagacttataccgcgttaataattctaactgtctgctgagcgagcctcccagctggagggcccagcatttctcaaaaggtctggatctcagcacctgcccaatagccctaaaatccataagcgcaaccgaaacggcccaggaagccaccctcgggcgctggtttgattcagaggaaaagaagggcgctgagactcagatgccctcgtattctctaagcctaggggaggaagaggaggtggaggacctagccgttaagctgacaagtggcgatagcgaaagtcaccctgagcccaccgaccacgtacttcaagagaagaagatggcactgctgtcactgctttgcagcacgctggtgagcgaagtcaacatgaacaatacctctgacccaaccctggccgctatttttgagatttgtcgggagctagcacttctcgaacctgagtttatcttaaaggcctcactgtatgccagacagcaactgaacgtccggaatgtagcaaacaatatactggcaatcgccgctttccttccagcttgccgtcctcacttgagacggtatttttgcgcgatcgtgcagctcccctcagattggatccaagtcgccgaattgtaccaaagtttagctgaaggcgataagaacaagttggtgccccttcccgcctgcttgcgaaccgccatgacggacaagttcgcccagttcgatgagtaccagctcgcgaaatacaacccaagaaagcatagagccaagcggcaccctagacgccctccccggtctcccgggatggaaccaccatttagccacaggtgcttccctaggtacattggttttctgagagaggaacagcggaaattcgagaaggcaggggatacagtgtctgaaaaaaagaaccctccgcgcttcaccctgaagaagctggtgcagcgacttcacatacacaagccagctcagcatgtccaggcactccttgggtataggtatccgagtaatctccagttgttttctcgttcacgactgcccggaccttgggattcttctcgggctgggaaacgcatgaaacttagccgaccggagacttgggagagagagttgtcacttaggggtaataaggctagtgtctgggaggagcttatagaaaatggcaaactcccctttatggctatgttgagaaacctctgtaatctcctaagagtgggcatttcctcccgtcaccacgagctgatcttgcagagactgcaacacgcaaagagtgtgatccacagccgacagtttcctttcaggttcctgaacgcacacgacgcgatagacgctctggaggcccagctccgaaaccaggctctcccttttccgtcaaatatcacactgatgagaagaattctcacacgaaacgaaaaaaaccgcccacgtcggcggtttttgtgccacctttctcgccagcagctccggatggccatgagaatccctgtcctctacgagcaactgaaacgtgagaaacttcgagtgcataaagcaaggcaatggaagtacgacggtgagatgcttaaccgctaccggcaagctcttgagaccgccgtgaacctctctgtgaagcattctctgccactgctgccggggcgaacggtcctggtgtacctgaccgatgcaaatgccgatcggctgtgccccaaaagtaatcctcagggtccacctctcaattatgcactgctgttgataggaatgatgattaccagagcagagcaggtggatgttgtgctgtgcgggggtgataccctgaaaacagccgtcctgaaagcagaggaggggatacttaagaccgccatcaaactacaagcacaggtgcaggagttcgacgagaacgatggctggtctctgaatacattcgggaagtacctgctcagcctggcaggccagcgagtgcctgtcgatcgggtgatattgttggggcagtcgatggacgacggtatgataaatgtggcaaagcaactttattggcaaagagtcaatagtaaatgcctgtttgttggtatcctgctccgccgcgtgcagtacctcagcacggacctcaatcctaatgatgtcaccctgagcggttgcaccgatgcgattttaaagtttatcgccgagcatggtgctagtcatctgctggagcacgtcgggcaaatggataagatctttaagatcccacctccccctggaaagacaggtgtacagagcctaaggcctctggaggaggacactccctcgccattggcaccggtgagtcaacaggggtggcgcagtatccgactgtttattagtagtacattcagagacatgcacggagaaagagatctcctcttacgatccgtgctaccagccctgcaggcacgggcagctccacataggatttcattgcatggtatcgacctccgttggggcgtcaccgaggaagagaccagaagaaaccgccagctcgaagtttgtctgggcgaagtggagaatgcccagttgtttgtggggattttaggaagtagatatggatacatcccgccctcatacaaccttcccgatcaccctcattttcactgggcccagcagtacccaagtgggcgaagcgtcacagaaatggaagtgatgcaatttctgaatcgcaaccagcggctccagccttcagcccaggctttgatctattttagggattccagcttcctgagctcagtgccagatgcctggaagagcgatttcgtgtctgagtcagaagaagctgcacgccgtatttctgagctgaagtcttatctaagccgccaaaagggcatcacctgcagacggtatccatgcgaatggggcggggtggccgccggccgtccctacgtgggcggtctcgaagaatttggacagttagtgcttcaggatgtgtggaacatgatacagaagctataccttcagccgggtgctctgctcgaacagcccgttagcatacctgatgatgacctcgtccaggccacttttcaacagctgcagaagccaccctctccagcaaggccgagattactgcaggacaccgttcaacgtttgatgctcccccacggacgcctgtctttagtgacaggtcaatccggccagggcaagactgccttcctcgcctctctggtgagtgccctgcaggcaccggacggagccaaggtcgctagtctggtgtttttccacttttcaggagctcggcctgatcaaggcctggcactgacgctgctgcgtcggctctgtacatacttgcggggccagctcaaggagcctggcgccttgccctccacatatcggtccctggtgtgggaactgcaacaacgtctgctcccgaaatcagccgaaagcctgcatcctggccagactcaggtgcttattattgacggcgcagatcgcctcgttgaccagaatggacaattaattagtgactggataccaaagaaacttccccggtgcgtccacctcgttctctcggtgtcctccgacgcaggcctgggagagacactggagcagtctcagggagcgcacgtactcgctctcggacctctggaggcgtctgcccgagccagattggtccgggaggaacttgccctctatggtaaaagactggaagagtccccctttaataaccaaatgcgcttgctcctcgttaaaagggaatctggccgccctttatacttgcggttagtaaccgatcatttgaggctgtttaccctgtacgagcaggtgagcgaacggctgcggactttaccagccactgtccctctgctactgcagcacatccttagcacgctagaaaaagaacacggcccagacgtgctcccccaagctctgactgctctcgaagtcacccgctctggcttgacagtggaccagcttcatggggtgctctcagtgtggcggacccttccaaagggcaccaagagttgggaagaggctgttgccgcgggcaattctggcgacccctacccaatgggtccattcgcttgccttgtgcaaagtctccgctccctgctaggcgaagggccccttgagcgtccgggagcccgattgtgcctgccagatggcccactgcgcacagccgcaaagcgctgctacggtaagagaccaggcctggaagataccgctcatattctcatcgccgcacagctttggaaaacgtgcgacgctgatgccagcggaacgttcaggtcctgcccaccagaggccttgggcgacctgccttatcacctgcttcagtccggaaaccgcgggcttctcagtaagtttttaaccaacttgcacgtggtggcagcgcaccttgagctgggcttggtgtctaggctgttagaggctcacgcactgtacgcttcctctgtgcctaaagaagaacagaaacttccagaagcagacgtcgctgtatttcgtacctttctgcgccaacaagccagtatcctgagtcagtaccccagacttctgccccagcaggcagctaaccaaccgttagattcccctctgtgtcaccaagcctccttgcttagcaggcgttggcaccttcaacacactctgcgttggctgaacaagccccggaccatgaagaaccagcagtcctcctctctttcactggctgtcagcagttcaccgacggccgtggcgttcagcaccaacggccagagagccgcagttggaactgctaatggaacggtctacctccttgatctcagaacctggcaggaggagaagtccgtggtctccggttgcgatgggatcagcgcctgcctttttctctctgatgatactctgttccttactgcgttcgatggtttgctcgaactctgggacctgcagcatgggtgcagggtcctgcagacaaaagcacaccagtatcagattaccggatgttgcctgagtcccgattgcaggctgctggccaccgtctgcctgggagggtgtctgaagttgtgggacactgtgaggggtcagcttgctttccaacatacatatcctaagtccttgaactgtgtggccttccaccccgaggggcaggtcatagcaactggctcttgggcgggatcaatctctttcttccaggttgacgggttgaaagtgactaaagatcttggggccccaggggcatcaatccgaacgttggccttcaacgtgccaggtggcgttgtggccgtgggtcgcctggactcaatggtcgaattgtgggcctggcgagagggcgcacgcctggccgccttccctgctcatcatggcttcgtcgccgccgccctcttcctccacgccggttgccagctgttaacagccggggaagacgggaaggtgcaggtatggtctggaagcctaggacgccccagagggcacctgggttctttgtcactttcccccgcattgtcagttgccctgtcaccagatggagaccgggtggccgtgggctaccgggcagacggtatcaggatctacaaaattagctcaggatcccaaggcgctcagggccaagctctcgatgttgcggtaagcgctctggcatggctgagtccaaaggtgttggtctccggggccgaggatggtagcttgcagggctgggctcttaaggagtgctccctgcagtctctgtggcttctcagtcgctttcagaaacccgtactcggcctggctacatcacaggaactgctggctagtgccagcgaagacttcaccgtccagctgtggcctagacagctgctgacacgcccccataaggcagaggattttccgtgcggaacagagctgcgcggacatgagggaccagtgtcttgctgtagtttttccaccgacggaggcagcctagcaaccggcggcagggatcgctcactcctctgctgggatgtgcggacccccaaaacgcctgtcctgattcatagcttcccagcctgccatcgggactgggtgaccggctgtgcgtggaccaaggacaaccttctgatttcctgctctagcgacggaagcgtggggctgtgggacccagaaagtgggcaacgcctgggacagtttctcggccaccaaagtgcagtgtccgctgtcgcggccgtggaagaacacgtggtctccgtgtctagagatggcactctcaaggtttgggatcaccagggcgtcgaactaacctctatccctgcccactcagggcctatctcacattgtgctgcagctatggagcccagagcagccgggcagcctggctctgaactcctggttgtaactgtgggcttggatggcgcaacgcggctgtggcacccattactagtgtgccaaactcatacattactgggtcattcaggtcccgtaagggccgcagccgtatcagagactagcggcctcatgttgactgcttcagaggatggctcagtgagactgtggcaagtccccaaagaggccgacgatacctgcatccctaggagctcagctgccgtgacagctgttgcttgggccccggacggatctatggcagtcagtggcaatcaggctggtgaactgatcttgtggcaggaagcaaaggcagtggccaccgcgcaggctcctggtcacatcggggcactaatttggtcctctgcccatacattcttcgtgctgtccgcagacgagaagatctcagagtggcaggtgaagttgcgcaagggatccgccccaggcaacttgtccctgcatcttaatcgtatactacaagaagatcttggagtgctgacctccctcgattgggcgcctgatggtcatttcctcatcctggccaaggccgacctgaagctgctctgcatgaagcccggcgacgccccctccgagatctggtcatcctacactgagaatcccatgatactgagcactcacaaagagtatggtattttcgtgctgcagcctaaggatcctggggtgctcagcttcctcagacaaaaggagagcggggagtttgaagagagactgaatttcgacattaaccttgaaaatccatcccggacgctcatcagtatcacgcaggcgaaaccagagtccgaatcttcgtttctttgcgcctcctcagatggaattctgtggaaccttgccaagtgcagtccggagggcgagtggacaaccggaaatatgtggcaaaagaaggccaataccccagagactcagactccaggcacagatccctctacctgcagggaatcggacgcatccatggacagcgatgccagtatggactctgaacctacaccccacctgaaaacgcgacagaggcgcaagatccattctggcagtgtgacagcgttgcacgtgctcccggaattgttggtgacagccagcaaggatcgggatgttaaactttgggaaagaccttccatgcaactactcggtctttttagatgcgaaggttctgttagctgcctggagccatggctgggagccaacagtacattgcagctcgctgtcggcgatgttcagggtaatgtgtatttcctcaattgggagtag

SEQ ID NO: 26577 - DNA, 7860 bp, synthetic construct
  misc_feature 1..7860: note = Description of Artificial Sequence: Synthetic coding sequence
  source 1..7860: mol_type = other DNA
atggagaagctgcacggccacgtgagcgcccaccccgacatcctgagcctggaaaataggtgcctggcgatgttgccagatcttcagcccctagaaaagcttcatcagcacgtctctacccactccgacatcctcagtttgaaaaatcaatgcctggccactttacctgacctgaaaacgatggagaagcctcacggctacgtgtccgcccatcctgacatcctttccctggaaaatcagtgtttggcaaccctgagcgatctcaagacaatggagaagccccatgggcatgtgtcggctcaccccgatatcctgtcactcgaaaaccggtgtttggccacattatcctctctcaagagtacggtgtccgcctcacctctgtttcagagcctacagatttcccacatgacccaagctgacctttatcgggtgaataacagcaattgcctcctgtccgagccaccgagctggagggcccagcatttttccaaaggactcgatctgtcaacttgtcccatcgcgctgaaatccattagcgcaaccgagacagctcaggaagccaccctgggccgatggttcgattcagaagagaaaaagggcgcagagacgcagatgccgagttacagcctttctctgggagaggaggaagaggtcgaagacctggccgtcaagctaacaagtggcgactctgagtctcatccagagccaaccgaccacgtgctccaagaaaagaagatggctctgctgagtcttctctgttccactttggtctctgaggttaacatgaacaacacatccgacccaactctcgctgccatctttgaaatttgcagagagctggcccttttggaacctgagttcatactaaaggcctccttgtacgcacgtcaacagctcaatgttagaaatgtggcgaacaatattcttgccatagctgcctttctgccagcttgtcgcccacacctgagacgctacttttgtgccatcgtgcagttaccatccgactggatccaggttgctgaactgtatcagagcttggcggaaggcgacaaaaataagttggtcccccttccagcgtgtctgcgcactgctatgacagataaattcgcccagtttgacgagtatcaacttgcaaagtacaaccctcgaaaacacagggcgaagcggcatcccaggagacctcctcgatctcctggaatggagcctcctttctctcatcgctgttttccaaggtatatcgggtttctgcgggaggaacagagaaagtttgaaaaagctggcgacaccgtaagcgagaaaaagaaccccccccgattcactttgaagaagttggtgcagcgtctccacatccacaaacccgcccagcatgtgcaagcgctcctcggctaccgatacccgagtaacctgcagctgttttccaggtctcgactgcccgggccatgggattccagtcgcgccggcaagaggatgaagctctctcgaccggagacatgggaacgggagctcagtcttcggggcaataaagcttctgtctgggaagagctgatagaaaacggaaaactaccctttatggctatgcttaggaatctctgtaacctcctccgcgtgggaatctccagtcgccatcatgagttaatcctgcagagactgcagcacgctaagtccgtgatacacagccggcagttcccgttcagatttctcaatgcgcacgatgccatcgacgcgttagaggcacagctacgcaaccaagccctgcctttcccgagtaatatcactttgatgcgcaggatccttacccgaaatgagaaaaaccgcccaagaagaaggttcctgtgtcacctaagtcggcagcagctacgcatggctatgaggatccctgtgctgtatgaacagcttaagagggagaagctgagggtgcataaggccagacaatggaaatacgacggtgagatgctcaaccggtatcgacaggcattggagacagctgtaaacctgagtgtgaagcactcgctgccattgttaccaggacggacagtgctagtttacttaaccgacgctaatgcggacaggttatgcccaaagagcaacccacaaggacctcctcttaattacgcgctgctcctgatcggtatgatgatcacacgggccgagcaggtggatgttgtgctctgcggtggagacactctaaagacggcagtcctgaaggccgaggaaggcattcttaagaccgccatcaagcttcaggctcaggtccaggaattcgacgagaacgatggctggtctctaaacactttcggcaagtacctgttaagtttggccggacaacgcgtgcccgtggacagggtgatcctactggggcagtctatggatgatggcatgattaacgtggcaaaacaactctattggcaacgggtcaatagtaaatgtcttttcgtgggcatcctacttagacgcgtccagtaccttagtactgaccttaaccccaacgacgttaccctatcaggctgcaccgatgccatcttgaagttcatcgccgaacacggggccagccatctactggagcacgtagggcagatggacaagatcttcaagatcccgccgcctccaggcaaaaccggcgtgcaatccctgcggccactcgaagaagacacgcccagtccgctggcccccgtctctcagcagggctggcgcagcataagattgttcatctcatctacatttcgcgacatgcacggcgagcgcgacctcctcttgagaagtgtcttaccagctcttcaggctcgtgccgcaccgcaccgaatatcactccatggcattgatctccgttggggcgtcaccgaggaagagacccgccgaaaccgccaattggaggtctgcctaggggaagtggagaacgcgcaattatttgtaggcatcctggggtcgagatatgggtatattcctccaagttacaatttgccagaccacccgcactttcactgggctcagcagtatccttctgggagatcagtgaccgaaatggaggtcatgcagttcctcaacaggaatcaacggctccaaccctccgcgcaagctctcatctacttcagggattcttctttcctatcttccgtacccgatgcctggaaaagcgactttgtgagtgaatccgaggaagcagcccgtcgcatctcagagctgaagtcttacctttccagacaaaaaggaattacgtgccgcagatatccatgtgaatggggtggtgtggcagccgggcggccctacgtaggaggcttagaggagtttggacaactggtgttgcaggacgtttggaatatgatacagaaactctatctgcagcccggagcgctactcgaacagcctgtgagcatcccagatgatgacctggtgcaggcgacatttcagcagttacagaaacctccgagccctgcaagacccaggctgttacaggacacagttcaaaggctgatgttgccacatgggcgcctctcattggttaccggccagagcggccagggaaaaacagctttccttgcatctctggtctcggcgctacaggctccggatggagctaaagtcgcgagtctcgtgttctttcatttctcaggtgcccgccctgaccaaggtctggcccttactctgctgcggaggctctgtacttacctgcggggccagctaaaggaacctggcgctttgccttcaacctaccggtcactggtctgggagcttcagcaacgtctgcttcccaaatctgcagagagcctgcaccctgggcagactcaagtcctgattatcgatggtgccgatcgcttagtcgatcagaacggtcagctgatttcagactggatccctaagaaactccctagatgtgtgcacctggttttgtctgtgtcctccgatgccggcttaggcgagactctagaacagagccaaggagcccatgtcctggcccttggccccctggaagcgtcggcccgggcacgcctggtaagggaggagctggcactgtacggaaaacggctggaagaaagccctttcaataaccagatgcggctgttactggttaaacgcgagagcggcaggcccctgtatctccgcctcgtgacagaccacctccgactgtttacactgtatgagcaggtgtctgagagattgcgcacgctgcccgctacggtgcccctgctcctccagcacatcctgagtactctggaaaaagaacatggcccagacgtactccctcaggccctgacagccctggaagtgactaggtccggactcactgtggatcagctccacggggtacttagcgtatggaggactctgccgaagggcactaagagttgggaagaagcagttgcagctggtaacagtggagacccctaccccatgggtccctttgcctgcctggtgcagagtctgagatcccttctcggcgagggtcctttggaacgccccggagctaggttgtgcttaccagacggacccctgcgtactgctgccaaacggtgctacggaaagagaccagggctagaagacacggcccacatactgatcgccgctcaactctggaagacctgcgacgccgacgcctccgggacgtttcgatcatgccccccagaagcgctgggtgaccttccgtaccacctgctgcagagtggtaatcggggcctcctgtccaagttcctgaccaacctgcatgttgtagcagctcacctggagctcggccttgtcagcaggctgttggaggctcacgctttgtacgcatcgtctgtcccgaaagaagaacaaaaactgcccgaagcagacgtcgcagtgtttcggacgttcctgagacagcaggcttctatactgagccaataccccaggcttctcccacaacaagcggccaaccaaccattggatagtcccctgtgtcaccaggcatccttgctttctagacgctggcacctgcagcacacactgcgctggctgaataaaccgcgaactatgaagaatcagcagagttcatcactttccctggccgtctcctcctcccctaccgccgtggcattcagtaccaacggacagcgagctgccgtagggactgccaatggaactgtgtatctgctggacttaagaacctggcaggaggagaaatctgttgtgtctggatgcgacggcattagcgcatgtttattcttaagtgacgacacccttttcctgacggcttttgacggcctgcttgagctgtgggatctccagcacggctgtcgggttcttcagactaaagcacatcaatatcagataaccggatgttgcctgtcacccgactgccggctgttagcaaccgtgtgcctaggaggctgccttaaactgtgggatacagtgagaggccagcttgcgttccaacatacttacccaaagtcccttaactgtgttgccttccatccggaggggcaggtaatagccactggaagttgggccggttcaatcagctttttccaggttgacggattaaaagttactaaagatttgggagctcccggggcctcaatcaggaccctggcctttaacgtacctggaggcgtggtagccgtcggtcggcttgatagtatggttgagctgtgggcatggcgcgagggagcacgtctggccgctttcccagctcaccatggcttcgtggcagcagccctctttttgcatgccggatgtcaactccttacagcaggggaagacgggaaagttcaggtgtggagcggttccctgggcaggcccagagggcatctcggatcattgtccctatcaccagctctgagtgtggcgctatctccggatggcgaccgggtagcagtggggtacagagccgacggaatacgaatttataaaatctcttccggaagtcaaggggcccagggacaggccttggatgtcgccgtaagtgcccttgcctggttgagtcctaaggtgttagtttctggagctgaggatggcagtctgcagggctgggctcttaaggaatgctcactgcagtccctatggctgttgtccagattccaaaagccagtcctcggattggccaccagccaggagctgctcgcatctgcttccgaagacttcacagtgcagctgtggcctcgccagcttttgacaagaccccataaagcagaagattttccttgtggcaccgagctgcggggacacgaagggcctgtgagttgctgttctttttcaacagatggcggttccctcgccacagggggtcgcgacaggtcactgctgtgctgggatgtcaggacccccaagacacccgtgttgatccactcatttccggcctgccacagggattgggtcacaggatgcgcatggaccaaagacaacctactgatcagttgctcaagcgacggatctgtcggactgtgggatcccgagtctggtcaacgactgggccaatttctgggacaccaaagcgctgtgtccgccgtggctgccgtggaagagcatgtggtaagtgtcagccgcgatggtaccctgaaagtgtgggatcatcagggtgtggagcttacaagcattccggctcactcagggcctattagtcattgtgctgccgccatggagcccagggcagctggtcaacctggctctgagttgcttgtcgtcactgtgggtctcgacggggcaactcgactatggcatcctttgcttgtgtgccagacccacacgctgcttgggcattctggcccagttcgggccgccgccgtttctgagacgagcggcctcatgctgaccgcctctgaagatgggtccgtgagactgtggcaggtgcccaaagaggccgacgatacttgcattcctcgctctagtgctgcagtcaccgccgtggcctgggcgccagatggctcaatggctgtgagtggaaaccaggctggggagttaatcttatggcaggaggctaaggccgtcgcaactgcccaggcgcccggacacatcggggccctcatttggagcagcgcacacactttctttgttctgagcgctgatgaaaaaatcagtgagtggcaggtgaaattgcggaagggctctgcacctgggaacctgagcctgcacctgaacaggatattgcaggaggatctgggtgtgctgacttctctcgattgggcccctgatggtcatttcctcatactggccaaggcggatctgaaactattatgtatgaaaccaggcgacgccccaagcgagatctggagcagttacacagaaaatccaatgatcctgagcacgcacaaggagtacggcattttcgtgctgcaacctaaggatccaggggtgcttagctttctcagacagaaggagtcaggagagtttgaggaacgccttaattttgatatcaacctcgaaaaccccagtcggactcttatcagcatcacccaggctaagcccgaatctgctctgatgggctcgtatgggacctggcccaatgccgcccagaaggaaaatgggccacaagtcacttgcggaagaaagaagaacacgccagaaacccagacccccggaaccgaccctagtacatgtagggaatccgatgcttcaatggatagtgacgcctcaatggatagcgagcccactccccacctgaaaacccgccaaaggcgaaagatccatagtggatcggtaaccgccttgcatgtcttacctgagctgctggtgaccgcatccaaggatcgggacgtgaagctctgggagaggccttccatgcagctgctgggcctgttccggtgtgaagggtccgtgtcgtgtctggagccctggcttggggccaattcaaccctacaactcgccgtcggggatgttcaaggcaacgtttattttcttaactgggaatag

SEQ ID NO: 26578 - DNA, 2031 bp, synthetic construct
  misc_feature 1..2031: note = Description of Artificial Sequence: Synthetic coding sequence
  source 1..2031: mol_type = other DNA
atgaagaaccagcagagcagcagcctgagcctggccgtgagcagctcccctactgcagtcgcattctcaaccaatgggcagcgtgcggcggtcgggactgccaacggcacagtgtatttgttagatctaagaacgtggcaagaggagaaatcggtagtgtcaggctgcgatggcatttctgcttgcctgtttctgagcgatgatacgttgtttctgactgcctttgacggcctcctggagctgtgggatcttcagcatgggtgccgcgtgctacagaccaaggcccaccagtaccagataacaggctgttgcctgtccccagactgtcgtctattagctaccgtatgcctcggtggttgcttaaaattgtgggataccgtgcggggacagctcgcatttcagcacacatatcccaagagcttgaactgcgtggcctttcatccggagggccaggttatagccacagggtcctgggccggcagtatttcctttttccaggttgatgggctaaaggtgactaaggatctgggggccccaggggctagtattcggactcttgcattcaacgtacctggcggagtggtcgcggtcggacgtctggacagcatggtcgagctgtgggcctggcgcgagggtgcgagattggcagccttccccgcccatcacgggtttgtggcagctgccctctttttgcacgctggctgtcaacttctgaccgccggggaagacggaaaggttcaggtttggtcaggatccctgggccggcccagaggacatttgggctccttgagcctgagccctgcattgtcagtggcgctctctcctgacggcgacagagtggcagtgggataccgtgctgatggtatccggatatataagattagctcagggtcacagggcgcacaaggccaggcactagatgtagctgtgagtgctttggcttggttgagtcctaaagttctggtttcaggcgcagaggatggttctctgcagggatgggctctgaaggaatgcagccttcagtccctctggctcctgtcgagatttcagaagccggttcttggcctcgccacctcccaagagctgctggcaagcgcctcagaagacttcaccgttcagctgtggcctcgccagctgctgactaggccacataaagccgaagacttcccttgtgggaccgagttacgggggcacgagggacctgtgagttgttgcagcttctccaccgatgggggctccctcgccacggggggcagagacagatctctcctgtgttgggatgtccggactccaaaaaccccagtgttaattcatagctttcccgcatgtcacagggactgggtcactggttgtgcctggacaaaagacaatttactgattagctgctccagcgacggctccgtgggactgtgggaccccgagtccggacagcgcctgggccagttcctcgggcaccagtctgcagtgagcgctgtggctgcagtggaggagcatgtggtgagtgtaagcagagacgggacattgaaagtgtgggatcaccaaggcgtggagcttaccagcatcccagcccatagcggtccaataagtcactgtgcggcagctatggaacctcgggccgctgggcaacctggaagtgaattgctggttgtaacagtaggcctcgatggcgctaccaggctgtggcacccactgctggtgtgccaaacacacaccctgttgggccattctggcccagtgagagctgccgcggtatctgagacttccggactcatgttaacagcatctgaagacgggagtgtgagactgtggcaagtgccaaaagaggctgacgacacctgcatcccgcggtcctccgctgccgtgacggccgtcgcttgggctcccgacggatccatggcggtgagcggcaaccaggctggagagctgatcctgtggcaggaagctaaggccgttgccacagcgcagtcttcgccggaacctaacagcaccggcggtctgcgcggtgcagacaagagcggactgggctcttag

SEQ ID NO: 26579 - DNA, 501 bp, synthetic construct
  misc_feature 1..501: note = Description of Artificial Sequence: Synthetic coding sequence
  source 1..501: mol_type = other DNA
atggagaagctgcacggccacgtgagcgcccaccccgacatcctgagtctggagaacagatgtctggcgatgctccccgaccttcagcccctggaaaagttgcatcaacacgtgtccactcactctgatatactctctctcaaaaatcagtgtttggcaaccctgccagatctaaaaacaatggagaagccgcacggatatgtctcggcacacccggacattctctcattggagaatcaatgcctggctactctctccgacctgaaaactatggaaaaaccacacggccacgtctctgcccacccagatatccttagtttggaaaatcggtgtctcgccaccctgtcttcgctgaaaagtactgtctccgccagcccactcttccagtccttgcagattagtcacatgacccaggccgatctgtatcgggtaaataatagcaattgtctgttgtctgaacctcctagctggagagctcagcacttcagcaagggcctgtag

SEQ ID NO: 26580 - DNA, 1260 bp, synthetic construct
  misc_feature 1..1260: note = Description of Artificial Sequence: Synthetic coding sequence
  source 1..1260: mol_type = other DNA
atggccgaggacgtgagcagcgccgcccccagcccccggggctgcgcagatggtagagatgctgaccccacagaagaacagatggcagaaacagaaaggaatgatgaggagcagtttgaatgccaagagctactggaatgccaggtgcaagtgggcgccccggaagaagaggaagaagaagaagaagatgctgggcttgtggctgaggcagaagccgtggcagctggttggatgcttgattttctgtgcctcagcttatgtagggctttccgcgacggaaggtctgaggacttcagacgaaccaggaacagtgcagaagctattatacacgggctgagttctctcacagcttgccagcttcgcacaatttacatctgccaatttctcactcggattgccgccggcaaaactcttgacgcacagtttgaaaacgatgaacggattactcccctggagagcgccctgatgatctggggatcaattgagaaagaacacgataaattgcacgaagagatccagaatttgatcaagatccaggccatagccgtttgcatggagaatgggaatttcaaagaggctgaagaggtcttcgaaaggatatttggcgaccccaactctcacatgccgtttaaaagcaaactgctcatgatcatcagccagaaggatacctttcactcattctttcagcacttttcatacaaccatatgatggagaagatcaaatcctatgtcaactacgtcctgtcagagaaaagttctaccttcttgatgaaggctgccgccaaagtggttgaatctaaacgcacgagaactatcacatcgcaggataaacccagtggaaacgacgtggaaatggagactgaagccaatctggacaccaggaaacgatctcacaaaaatctctttttgtccaagttgcagcatggaactcaacaacaggacctgaacaagaaggagcgtcgggtcggaacaccgcagagcaccaaaaaaaagaaggaaagtaggcgcgctacagaatctcggatcccggtgtccaaatcacagcctgtcactcctgaaaaacaccgggccagaaagcgccaggcctggttgtgggaagaggacaaaaatctcaggtccggcgtacgcaagtatggtgaaggaaactggtccaaaattttgctccattacaagtttaacaatcgaacctccgtgatgcttaaagaccgatggcgaactatgaaaaagctgaagctgatttccagcgactccgaggactag

SEQ ID NO: 26581 - DNA, 1320 bp, synthetic construct
  misc_feature 1..1320: note = Description of Artificial Sequence: Synthetic coding sequence
  source 1..1320: mol_type = other DNA
atggccgaggacgtgagcagcgccgcccccagcccccggggctgcgctgatggccgcgacgctgaccctacggaggaacagatggcggaaactgagcggaatgatgaagaacaattcgaatgtcaagaactgttggaatgccaggtacaggtgggcgcgcctgaagaggaggaggaggaggaggaggacgcaggtctggtggcagaggcagaggccgttgctgccggatggatgttagacttcctttgtctgagcctctgtagggcttttagggacggcaggtcggaggattttcggcgcacgaggaacagcgcagaggccatcatccatgggttgagcagcctgactgcctgccagctgaggacgatttatatctgtcagttcctaaccagaatagccgctgggaaaaccctcgatgcacagtttgaaaacgatgagagaatcacacctctggagtcagctcttatgatttggggtagcatagaaaaggaacatgacaagttgcatgaagaaatacaaaacttgattaaaatccaggcaattgccgtttgtatggagaatgggaacttcaaggaagcggaggaagtctttgagagaatatttggggacccaaacagccacatgccgtttaaatcaaagctgctgatgattattagtcagaaggacacttttcacagtttctttcagcacttttcatacaaccacatgatggagaagatcaagagctacgtaaactatgtcctttcagagaagtcatctacctttctcatgaaggcggcagctaaagtcgtggaaagcaaacgaacgcgtaccatcacaagccaggataaaccctccggcaacgatgttgagatggaaaccgaggccaacttggacactagaaaatcggtgagcgacaaacaaagcgccgtgaccgagagcagtgagggtaccgtgagtttattgcgatctcacaagaacctatttctgagtaagttgcaacatggtacacagcagcaggatctcaataagaaggagcgccgggttggaactcctcagtcaaccaaaaaaaagaaagagtctcgtagggctactgaatcacgtatacctgtctccaaatcccaacctgttactcctgagaaacaccgcgccagaaagcggcaggcgtggctctgggaagaagataaaaatctcagatcaggagtcagaaaatatggtgaaggcaattggtccaaaatcctccttcactacaagtttaataaccgcaccagtgtgatgcttaaagatcgatggcgaacaatgaaaaagctgaaactaataagctctgatagtgaagactag

SEQ ID NO: 26582 - DNA, 153 bp, synthetic construct
  misc_feature 1..153: note = Description of Artificial Sequence: Synthetic coding sequence
  source 1..153: mol_type = other DNA
atcttcagcatcatccacggcctgagcagcctgaccgcctgccagctccgaaccatatatatatgtcagttcctcactaggattgcggccggtaagaccctcgatgcccaattcgaaaacgatgagcggatcacccccttggaaagcgcgtag

SEQ ID NO: 26583 - DNA, 1503 bp, synthetic construct
  misc_feature 1..1503: note = Description of Artificial Sequence: Synthetic coding sequence
  source 1..1503: mol_type = other DNA
atggccggcggcggcggcagcagcgacggcagcggccgggccgccggccgccgggcatctcgttcatccggtcgggcccgccgcggcagacacgagcccggcctcggaggccctgcagagcggggcgcaggcgaggcccggttagaggaagctgttaatcgatgggttctgaaattttacttccatgaggccctgagagcgttccgaggaagcaggtacggcgactttcggcagatcagggatatcatgcaggccttgctcgtacggccgctgggtaaagagcatacggtgtctagactgcttagggtcatgcaatgtctgagccggatcgaagagggcgagaacctcgattgtagtttcgatatggaggccgaacttacccctctggaatctgccataaacgttctggaaatgattaaaaccgagttcaccctgactgaagccgtagtagagtcttccaggaagctggttaaggaggctgccgtaataatttgtataaagaataaagaatttgagaaagccagtaagatacttaaaaagcacatgtcaaaggatcctacaacacaaaagctccgaaacgatttattgaacatcatcagggagaagaatctcgctcaccctgttattcaaaacttctcgtatgagactttccagcagaaaatgctgcgattcctggagagccacctggatgatgctgaaccctacctcctgactatggctaagaaggcgcttaaaagtgagtccgcagcctcctcaactggtaaggaggataagcagccggcacccggaccagtggaaaagccaccaagggaaccagccagacagctccgcaatccccccaccacaatcggaatgatgacgttgaaagccgcattcaagaccctcagtggtgcacaggactccgaagccgcattcgctaagctagatcagaaggatctcgtgctgccgacccaggcccttcctgccagccccgccttgaaaaacaagcgcccgcgaaaggatgagaacgagagcagtgccccagccgacggagagggcggatccgagctccagccaaagaacaagagaatgaccatctctagacttgtgctggaggaggattcacagtcaacagaacccagcgccgggttaaacagctcccaagaagcagcctctgccccaccctctaaaccaaccgtgctgaaccagccactgccaggagagaagaatcctaaggtacctaagggcaaatggaattccagtaatggggtcgaagagaaggagacttgggtagaagaagacgaactgtttcaggtgcaggcagctcctgatgaagactctaccacaaacatcaccaaaaagcagaagtggaccgtggaggaatctgagtgggtcaaagccggtgtgcagaagtacggcgagggtaattgggcggcaatctccaaaaattatccctttgttaacaggacagctgtcatgattaaagatcggtggcgcaccatgaagcgtctaggaatgaactag

SEQ ID NO: 26584 - DNA, 1200 bp, synthetic construct
  misc_feature 1..1200: note = Description of Artificial Sequence: Synthetic coding sequence
  source 1..1200: mol_type = other DNA
atggccgaggccatggacctgggcaaggaccccaacggccccacccactcaagtaccctcttcgtccgcgacgacgggtctagcatgtccttctacgtcagaccatcgccagccaagagacgcctcagtactttgatacttcacgggggaggcacggtctgtagggtgcaggagccaggcgcggtgctgctggctcaaccgggagaagccttggcggaagcctcaggagactttatttccacccagtatatactggactgtgtagaacgaaatgagcgcttggaactggaggcttataggttagggcctgctagcgccgccgataccggatctgaggctaaacccggcgccctcgccgagggagctgccgagcccgaaccccagcggcatgcggggcggattgcctttacggatgccgacgacgtggccattcttacctatgtgaaggaaaatgctcgctcaccttcatctgtaaccggcaacgccctctggaaagccatggaaaaaagttccctgacccaacactcttggcaatcgctgaaagatcgttaccttaaacacctgcgcgggcaggaacacaagtacctgctcggggatgctcccgtaagtccgtcaagtcagaaactgaaacggaaggcggaggaggatcctgaggctgcggacagcggagagccacagaacaagcgcaccccggacctccccgaagaggagtacgttaaagaagagatacaagaaaatgaagaggccgtgaaaaaaatgcttgtcgaagcaacacgcgaattcgaagaggtcgtcgttgacgagtcgccaccagactttgagatacatattactatgtgcgacgacgaccctccaactccagaggaggacagtgagacgcagcctgatgaagaggaggaggaagaggaagaaaaggtgagtcagccagaagttggagcggcaataaagattattcggcagctcatggagaagttcaacctggaccttagcacagttacacaagcctttttgaagaattctggcgagctcgaagcgactagtgcctttctagccagtgggcagagggccgacggctatcctatttggagtcgtcaagacgacatcgatctccaaaaggacgacgaggatacccgggaagccctggtaaagaaatttggagcgcagaacgtagcaagacgcattgaattcaggaaaaagtag

SEQ ID NO: 26585 - DNA, 12735 bp, synthetic construct
  misc_feature 1..12735: note = Description of Artificial Sequence: Synthetic coding sequence
  source 1..12735: mol_type = other DNA
atgatgcccgcccagtacgccctgaccagcagcctggtgctgctggtgctcctttctacagcccgcgcaggccccttttccagccgcagcaatgtgactctgccagctcccagacctccccctcaaccaggaggacataccgttggggcaggggtcggctcccccagttcgcagttgtatgaacacaccgtggagggtggagagaagcaggtggtcttcactcacagaattaacctgccacctagcaccgggtgcggttgcccaccgggtacggagcctcctgtcctcgcgagtgaggtgcaagccctacgtgtgagattagagatccttgaggaactcgtcaagggcctgaaagagcagtgcacaggcggctgttgcccagcttctgcgcaggccggaaccggccagacagatgtgcggactctctgcagcctgcatggcgtgttcgacctatcaagatgcacctgctcttgcgaaccaggctggggtggacctacatgttcagaccctactgatgcagaaatccccccaagttctccaccttccgcgtcaggtagctgtcccgacgactgcaacgaccagggcagatgcgtgcgcggtaggtgtgtgtgtttccccgggtatacgggtccttcatgtgggtggccatcgtgccccggggattgtcagggacggggtcgttgcgtccagggtgtctgtgtgtgcagggcggggttttccgggcccgattgcagccagcggtcatgccccaggggatgtagccagaggggccgatgtgaaggcgggcgatgtgtttgcgatcctggctacaccggggatgactgtggtatgcggtcttgccccaggggctgtagccaaagaggcaggtgtgagaatggaagatgcgtgtgtaatcctggatacactggagaggattgtggcgtacggtcttgtccccgcggctgcagccagcgcgggcggtgcaaggatggcaggtgcgtatgtgaccctgggtacacaggcgaagactgtggcacccgatcatgtccgtgggattgtggcgagggcgggcgatgtgtggacgggcgatgcgtttgctggcccggttacacaggcgaggattgtagcacccgcacttgtcctcgcgactgtaggggtagggggagatgtgaagatggtgaatgcatttgcgatactggctactctggagatgattgcggcgtgcggtcctgccctggcgattgtaatcagaggggcagatgcgaggacggcaggtgtgtgtgttggcctggttatactggaactgattgtggctcaagagcgtgtcctagggattgtagaggtcggggtagatgcgagaatggggtatgcgtttgcaacgcaggatactcgggggaagactgtggcgttagaagctgtcctggcgactgcaggggccggggtcggtgtgaatctggacggtgtatgtgctggccaggatacaccggacgggactgtgggactagagcctgccccggggactgccgcggccgtggaaggtgtgtggatggacggtgcgtgtgcaatccaggcttcactggggaagactgcggaagccggcgttgccctggggactgccgaggtcatgggttgtgcgaggatggcgtttgcgtttgtgacgccggctattcaggggaggattgtagtacacggtcttgccctggtggatgtcgaggcaggggtcaatgtctcgacggtcggtgcgtttgtgaggacgggtactcgggcgaagattgtggtgtgcggcagtgccccaatgactgctcgcagcatggagtgtgtcaggacggcgtgtgtatttgttgggaaggatacgtttccgaggactgttcaatcagaacgtgtccaagtaactgtcatgggaggggtaggtgtgaggaaggcaggtgtctctgcgacccagggtacactgggcctacatgcgcgacccgaatgtgccccgcagactgcagagggcggggtcgatgtgtccaaggcgtgtgtttatgccacgtgggatatggaggagaggattgcggccaggaagagccgcctgctagtgcatgcccaggcggctgcggacctcgagaattgtgcagagcaggccaatgcgtttgcgtcgaaggatttcgcggacccgactgcgccattcaaacctgtccgggcgattgtcgaggccgaggtgaatgtcacgatggcagctgtgtctgtaaagatgggtacgccggggaagattgcggcgaagaggttccaaccatcgagggcatgaggatgcatctgctggaagaaaccacagtacgcacagagtggacacctgcccccggcccggtcgatgcttacgagatccagttcattccaaccacagagggtgcttctccaccattcacagcgagagtaccctcctctgcatccgcctatgatcagcggggcctggctcccggacaggaatatcaggtaacagtcagagctctcaggggcacctcttgggggctacctgctagcaaaactatcaccaccatgatcgacggtccgcaggatctcagagttgttgcagtgactcctactacgctagagctggggtggctgcgcccgcaggccgaagtggacagattcgtggtgtcttacgtgtcagcaggcaaccagagggtgcgattagaggtgccacccgaagctgatggcaccctgctgacggatctgatgcccggcgtggagtacgtggtgacagtcaccgccgaacgggggagggcagtttcttatcccgccagcgtgcgtgcgaacacgggcagcagccccctcggactgctcggcactacagacgaacctcctccatccggtccctccactacacaaggggcacaggcaccgttactccaacagaggcctcaggagctcggcgaactgagggttttggggcgcgatgaaaccggtcgtctgcgcgtggtttggaccgcccagcccgacactttcgcatattttcagctgcgcatgagagtccctgagggccccggcgcccatgaagaagtgctgcccggagatgttcgtcaggctctagtgcccccccctccccccggcacaccctacgaactgtcgctacacggagttcccccaggggggaagccatctgacccgatcatttatcagggtataatggataaggacgaagaaaagccgggcaaatcaagcggacctccccggctaggcgagttgaccgtgacagataggacctccgattctttactcttgagatggacagtgccagaaggtgaatttgatagcttcgtgatacaatacaaggacagggacggccagcctcaggtggtgccggtcgagggcccccaacggagcgcggtgatcactagtttggaccccggcaggaagtacaaatttgttttgtacggtttcgtcggaaaaaagcggcacggcccactggtagccgaggccaagattctcccacagagcgacccatcaccagggactcctccccaccttggaaatctgtgggtgaccgatccaacaccagatagccttcacctctcctggaccgtgcccgagggtcagttcgatacctttatggtgcaataccgggacagagatggacgcccacaggtggtcccggtggaggggcccgaacgcagtttcgtggtttcaagtctggatcctgaccacaagtatcgatttaccctctttgggatagctaataagaaacgctatggcccacttactgctgatggcaccacagctcccgagcggaaggaagaacccccgcgccctgagttcctggagcagccccttctgggcgagttgaccgtcactggcgtgactccagattctctgcgtctcagttggacagttgcacagggccccttcgattcctttatggttcagtataaggacgcccaaggccagccccaagccgtgccggtagccggcgacgaaaatgaggttacagtgcccgggcttgatcccgatagaaagtataagatgaacttgtatggacttcgcgggcggcagagagtgggcccagaaagtgtagtagcgaagacagctcctcaggaggacgtggatgagacgccgtctcctactgagctggggacagaggcaccggagtctcccgaggaacctctcttgggtgagctgaccgtcaccgggtcctccccggacagtctatccttattctggacggtgccccagggatcttttgacagcttcacagtgcaatataaagaccgagatgggaggccgcgtgccgtgcgggttggaggcaaggaatccgaagttaccgttggggggctggagcctggacacaagtataagatgcacctgtatggcctgcacgagggtcaaagggtggggccagtttctgccgttggagtgacagcaccccagcaggaggagacacctcccgcaactgaatcaccactggaaccacggctcggtgagctgacggtcacagacgtaacccctaactccgttggattatcctggacagtacccgaaggacagttcgacagcttcattgtccagtacaaggataaagacgggcaacctcaggtagtccccgtagccgcggatcagcgggaagtgactgtgtacaacctggaaccagaaaggaagtataaaatgaatatgtacggattgcacgatggacagcgcatgggtcccctgtcggtagtaattgtgactgccccactccctcctgctcccgccaccgaagcttctaaaccgcctttggaacccagactaggcgaattgaccgttactgacatcacaccagattcggttggattgtcttggaccgtgccagagggagaatttgatagtttcgtagtgcagtacaaggaccgcgacggccaaccacaggtggtgccagtcgccgctgatcagcgcgaggtgaccatccccgacctggaaccgtctagaaaatacaagtttctcctctttgggattcaggatggcaagcgtagaagcccagtgtccgtggaggcaaaaacagttgccagaggggacgcctcacccggggccccacctcggttgggtgaactctgggtcactgaccctacacccgattcgctgaggctgtcctggacagttccggaagggcagttcgattctttcgtggtccagtttaaggataaagacggccctcaggttgtcccggttgagggacacgaaaggtcagttactgttaccccactcgatgcaggcagaaagtatcgattcctcctgtacggactgctcgggaagaaacgacatggccccttgaccgccgacggcacaactgaggcaaggtccgccatggatgacaccggtactaaaaggcctccgaagccgcgtcttggcgaagagctgcaggtgaccactgtgacacagaactctgtcgggctgtcctggacggtgcctgaggggcaattcgatagttttgttgtgcaatataaggaccgggacggccagcctcaggttgtaccggtagagggaagcctacgtgaggtttcagtgcccggcctggaccccgctcatcggtacaagctcctgttgtacggtttgcaccatggaaagcgcgtgggaccgatctccgcagtggcaattaccgcgggccgggaagagaccgagacggaaacgacagctccaacgccacccgctcctgaaccccacctgggtgaactcaccgtagaagaagccactagccacaccttacatctgtcttggatggtcaccgagggggagttcgatagtttcgagattcagtatacggaccgcgacggtcagctgcagatggtacgaattggtggtgaccgcaatgacatcacactgtccgggctggagagcgaccacaggtatttagtgaccctgtacgggttctctgatggcaagcacgttggccccgttcacgtagaggccctcaccgtgcccgaggaagagaagccctctgaaccccctacagctacgccggagccaccaattaagcccagactgggggaattgaccgtgaccgacgccactccggacagcctctctctgtcttggaccgtcccggagggacagtttgaccatttcctggtgcagtacaggaacggtgacggtcagcctaaagccgtgagagtacccggccacgaggagggcgtgactatcagcggtctggagcccgaccacaagtataaaatgaacttgtatgggttccacggcggtcagagaatggggcctgtcagtgtggtcggtgtaactgctgcagaggaagaaacaccaagccctacagaacctagcatggaggctccggagcccgctgaggagcctctgctcggggagcttacggtgactggtagttcccctgattccctgtctctgtcatggaccgtacctcaggggagattcgattcattcactgtgcaatacaaggatagggatggtaggccgcaggtcgtgagagttggcggcgaagaaagtgaggttacagttgggggacttgaaccaggccgcaagtataaaatgcacttgtacgggctgcacgaaggacgtagggtcggcccagtgagtgccgtgggggttaccgcgcccgaggaagagagccccgacgctcctctggctaagcttcggctcggacagatgacagtccgagatattactagcgacagtctatcactgtcttggaccgtgccagaaggccagttcgatcactttctggtacagttcaagaatggcgatgggcaacccaaagcggttcgggtgcctgggcatgaggatggggttactatatcaggactggaacctgaccacaagtacaagatgaatctgtacgggttccacgggggccaacgggtgggcccagttagcgccgtgggcttaaccgcccccggcaaggatgaggaaatggcgcccgcctccactgagcctcctaccccagagcctcccattaagccccggctcgaggagctgaccgtaacagacgctactccggattccctgtctttgtcctggacagttcccgagggccagttcgaccatttcttggttcagtacaaaaacggcgatggacagccaaaggccactcgcgtcccaggacatgaggacagagttactatttcgggactcgaacccgacaacaaatataagatgaacctttacggctttcatggtggacaacgggttggtccagtgtccgccattggggtcacggctgcagaagaggagaccccttccccaaccgagcccagtatggaagccccagagcctccagaggaaccccttctgggagagttgactgtgaccggatctagcccagactcactgtccctgtcctggaccgtaccccaagggcggttcgattcattcaccgtgcagtataaagacagagacggaaggccgcaagtggtgcgcgtgggtggagaagagtctgaagtcaccgtgggtggactggagccgggccgcaagtataaaatgcatctatatggacttcatgagggcaggcgagtgggacctgtgtctacagtcggagtgacagcccctcaggaagacgtagatgagaccccctctccgactgagcccggaacagaagcacccgggcctccggaagaaccacttctgggcgaactcaccgtgacagggtcctcaccggactcacttagcctgagttggacagtgccgcaagggcgatttgattcctttacagtacagtataaagatagggacgggcgcccccaggcagttagggtgggagggcaggagtccaaagtaacggtacgcgggctggaacccggcaggaaatacaaaatgcacttatacggcttgcatgaagggcggcgtttaggacccgtctcagctgtcggcgtgaccgaggacgaggctgagacgacccaggccgtgcccactatgacgccggaaccccccattaaaccacggctgggggaactcacgatgacagacgccacacccgattccctgtcgttgtcttggactgtaccggaaggacaatttgaccatttcctggtgcaatataggaacggagatggacagccaaaggcggtccgagtgcctggccatgaggatggtgttacgatctccgggctcgagcctgatcataagtataaaatgaatctgtacggtttccatggtgggcagcgcgtcgggcctataagcgtgatcggtgtgaccgccgccgaggaagagactcctagtcctaccgaactgtccaccgaggcgccagagcctcctgaagaaccactactgggcgagcttaccgtaacagggtcatcaccagattcactctcactttcttggactatccctcaggggcacttcgattctttcacggtgcagtacaaggacagggacgggcgtccacaagttatgcgagtccgtggagaggaaagtgaagttactgtgggaggactggaacctggcagaaagtataaaatgcacctgtacggcctgcatgagggtagacgagttggacctgtgagtacagtgggtgttacagcaccggaagacgaggccgagaccacgcaggcggttccaacaaccacgccagagcctccgaataagcctcgactgggagagctgactgtgacagatgcgactccagacagtctctctctgagttggatggtgcccgaggggcaattcgaccactttctggtccagtacaggaatggggacggccagcccaaagtggtgcgtgtgcctggtcacgaggacggagtcacgatctcagggctggaaccagaccataagtataagatgaacctttatggattccatgggggccagcgcgtcgggcctatcagcgtaatcggtgtgactgctgcggaggaggagacccccgcccccacggagccctctaccgaagctcctgagccccccgaggagcctctgctcggcgaacttactgtgacagggagcagtcccgactcactgtctctgtcgtggacaattccacagggcaggttcgactcattcacagtgcaatacaaggatcgggacgggcgccctcaagtggtcagagtccgaggggaagaatcagaggtcaccgtgggcggactggagcctgggtgtaagtataaaatgcacctgtatggactgcatgagggacaacgggtgggaccagtttcagcagtcggcgtgaccgccccaaaggatgaggctgaaaccactcaggccgtgccgaccatgactcccgaaccgcccattaagcccaggctgggggaactgacagtaaccgacgctaccccagatagcctctcactgagctggatggtccccgaaggacagtttgaccactttctggtacagtatcgcaacggagatggacagccaaaggcagtgagagttccgggccatgaagacggcgtgaccatctcaggcctggagcccgaccacaagtacaagatgaacctgtatggatttcacggggggcagagagtggggcccgtttcggctattggagtgactgaagaggaaactccctccccaaccgaaccttccacagaagcccccgaagcccctgaagaacccttgctcggagaactgaccgtcaccgggtcctctccagactcactgtccctttcgtggaccgtaccacagggtcggttcgatagtttcacagtacagtacaaagatcgggatgggcagcctcaggtcgtgcgggtgaggggcgaggagtcggaggtgacagtggggggactcgaacccgggcggaaatacaaaatgcacctctacggcctccatgagggccagcgtgtgggtccggtctcgacggtgggcatcaccgccccattgccaacacctctccctgtcgaaccaaggctgggcgagctggcagtggccgcagtgacaagcgatagcgtaggactgtcttggactgtagctcagggtcctttcgattcatttctggtccagtacagggatgcacaagggcagccgcaggctgtgcccgtcagcggcgatctgagagccgtggccgtgagtggcctggatcctgcccgtaagtataagttcttattattcggcctacagaacggtaagcgccatggtcccgttcctgttgaggccagaacagcgccggacaccaagcctagccctcgcctgggagagctgaccgttaccgatgcaactccggactctgtcggcctgtcctggaccgttccggaaggcgaattcgacagctttgttgtacagtacaaagataaggacggccggctgcaggtggtgccagtagctgctaaccagagggaggtgaccgtacagggccttgagccttcgagaaagtacagatttctgttatacggcttgagcggcagaaaacgcttgggccctatctctgcggactccacgactgctcctctagagaaggagctgcctccccatttgggcgaattgaccgttgccgaagaaacttcctctagcctgcgtctgtcatggactgttgctcaagggccctttgatagcttcgtcgtgcagtacagggacaccgatgggcagccgagggccgtacctgttgcggccgatcagcgaaccgttactgtcgaggacctggaaccaggcaaaaagtacaagttcttgctctatgggctattaggaggcaagagactaggtcctgtgtctgcgttaggcatgacggctccagaggaggacactcccgccccggagctggcgcctgaagcccctgagccccccgaagagcctcgccttggtgtactcaccgtcactgatacaacacccgactctatgagactgtcttggtcagtggcccagggcccatttgacagtttcgtagtgcaatacgaggacaccaacggacagccccaggccttactggtggacggggaccagagcaagatcctgatctctggactcgagcctagcacaccctataggttcctgttgtacgggttgcatgagggcaagcgcctcggtccactgtcagcagaaggtacgacggggctggctccagcaggtcagacatcggaggaaagtcgtccacggctttcacaactttcagtgacagacgtaaccactagtagcctccggctgaactgggaggcccccccgggcgccttcgattcctttctactcaggtttggagttccctccccatccactctcgagccacaccctcggccgctcctgcagcgtgagttgatggtgccaggtacgagacactccgctgtgctgagggatctcagatctgggacactatattcattgacattatacggactcagagggccacacaaagcagacagtatccaaggaaccgctaggacactatcccctgtgcttgaaagtcccagagacctgcagttctctgaaattagggagacatctgctaaggtgaactggatgccccctccaagccgggccgacagtttcaaggtttcataccagttggctgacggcggcgagccccagtctgtccaagtggacggccaggcccgcactcagaagctgcagggtctcataccaggcgcaagatacgaagtgacagtcgtatccgtgaggggctttgaagagtctgaaccattgacaggatttctcactaccgtccccgacgggccaactcagctgagggcacttaatctgaccgaagggttcgccgtcctgcactggaaacccccacagaatccggttgatacctacgacgtgcaggtgacagccccaggggcacctccccttcaggcggaaacaccaggtagcgccgtggactatccattgcacgaccttgtgctgcacacaaattacactgctacagtcagaggcctccggggacctaacctgactagccccgccagtatcacattcactaccggcctcgaggcacctcgagaccttgaggctaaggaggtcacgccgaggacggcactcttgacgtggactgagccccccgtccgacctgctggttatttattatcattccataccccagggggccagaaccaggagatccttttgcctggaggaataacatctcatcagctattaggactcttcccctcaacttcatataacgcaaggctgcaggcgatgtggggtcaatcgcttctgccacccgtgtcaacaagttttacaactggcggcctcaggatcccctttcccagggactgcggtgaggagatgcagaacggggctggtgcgtcgcggacatccactatttttctgaatggcaaccgggaacgcccactcaatgtgttctgcgacatggaaaccgatggggggggctggcttgtgttccagcgccgcatggatggccagactgatttttggcgcgattgggaggactatgcacatgggttcggtaatattagtggcgagttttggttagggaatgaggcactgcattcactgactcaggccggagactacagtatgagagttgacctgcgcgccggcgatgaggccgtgttcgcccaatacgatagctttcacgtggacagcgcagccgagtattaccgactccatcttgaaggttatcacggaactgcaggggacagcatgtcctatcatagcggctcggtattcagcgcccgcgatagggatccaaactctctactcattagctgcgcagtgtcttacaggggggcgtggtggtaccgcaactgtcactacgccaaccttaacggcctttatggttccaccgtcgaccaccagggagttagctggtatcattggaagggattcgagttctccgtaccatttacagaaatgaagctgagaccaagaaatttccgatctcctgccggcggcggttag

SEQ ID NO: 26586 - DNA, 12729 bp, synthetic construct
  misc_feature 1..12729: note = Description of Artificial Sequence: Synthetic coding sequence
  source 1..12729: mol_type = other DNA
atgatgcccgcccagtacgccctgaccagcagcctggtgctgctggtgttgctgtccaccgccagggcaggaccattttcttcacgcagcaacgtgacccttccggccccacggccgcccccccaacctggaggtcacaccgtcggagcgggggtaggctctccttcctcccagctatacgagcacaccgtggagggcggcgaaaagcaggtcgttttcacccaccgtataaatctgcccccatccacgggctgtggctgtcctcccggcaccgagccacctgtactagctagcgaggtgcaggcattgagggtgaggctggaaatccttgaagaactcgtgaaggggttgaaggagcaatgcaccggtggctgttgccctgcgagcgcccaggcaggaacgggccagaccgacgtgaggaccctgtgcagcctgcacggagtgttcgacctttcccgctgcacatgttcctgtgagccaggctggggcggaccaacatgttctgatcccacagacgcagagatcccaccaagtagccctccatctgcctccgggtcttgcccagatgattgtaacgatcaggggcgctgtgtgagggggagatgcgtttgttttccgggatacactgggcccagctgcggatggccttcttgccccggggactgccagggccggggtcggtgcgtacagggcgtctgcgtgtgtcgggccggcttctcagggccagactgcagtcaaaggagctgtcctcgcggctgttctcaaagaggaaggtgcgagggggggcgatgcgtatgtgatcctggttataccggcgatgattgtggcatgcgcagttgccctagaggttgctctcaaagaggccggtgcgaaaatggcagatgtgtatgcaaccctggctataccggagaggattgcggggtcaggtcgtgccctaggggatgcagccagcgtggcagatgtaaagatgggaggtgcgtctgcgaccccggctatacaggcgaggactgcgggacccggtcatgcccttgggattgcggcgaggggggtcgctgtgtggatggtcgttgtgtgtgctggccaggatacaccggtgaggattgctcaacgcgaacctgcccgagggactgtagaggccggggccgctgtgaagatggcgagtgtatttgcgacacaggttattcgggagacgattgcggggttcgatcttgccccggagattgtaaccagcgcgggcgctgtgaggacgggagatgcgtgtgctggcccggctatactgggacggactgcgggagcagagcatgtccgcgggactgtagaggaaggggccgctgcgagaacggagtctgcgtgtgcaacgctggctactctggagaagactgcggcgtgagaagctgtccaggggactgtcgcggaagaggacgatgtgagtccgggcgatgcatgtgttggccaggctatactggtcgagattgtggtactcgcgcctgtccaggtgattgcagaggtaggggacgctgtgtggatggaaggtgcgtatgtaacccaggtttcacaggagaggattgcgggtcgcgccggtgccccggcgattgtagagggcacggcctgtgtgaagatggggtgtgtgtctgcgacgctggatactctggtgaggactgcagcacacgctcttgcccagggggttgtaggggaagaggccaatgcctcgacggccgatgcgtctgcgaggacggctactctggagaagattgtggcgttcggcaatgccccaacgattgtagccaacatggcgtttgccaagacggcgtgtgtatctgttgggagggttatgtcagtgaggactgcagcatccgtacgtgccctagtaactgtcatggacgggggcgctgcgaggaagggcggtgcctatgtgatccaggctatactgggcctacttgtgccacgagaatgtgtcccgctgattgtcggggccgcggccgctgcgtccaaggcgtgtgtctgtgccatgtcggctatggaggtgaggactgtggtcaggaagaacccccagccagcgcatgtccaggtggatgtggcccaagggagctgtgccgtgctggccagtgcgtgtgcgttgagggattccggggcccagactgtgccattcagacatgccctggagactgtagggggagaggcgagtgccacgatggcagctgcgtgtgtaaggatggatacgccggtgaggattgcggagaggaggtccctactatcgaaggcatgcgtatgcacttactggaggagaccactgtgagaacagagtggaccccagccccaggccctgtcgacgcatatgaaatccagtttattccaactacagaaggcgcttctcccccattcacggccagggttccaagtagcgcctctgcctatgatcaaaggggacttgcacccgggcaagaatatcaggtgaccgtgagagctctaagaggaacgtcctggggtctccccgcttccaagaccatcaccaccatgattgacggtcctcaggacctgcgcgtggtggcagtgaccccgactaccctggagctgggctggctgcgaccccaagctgaagtggatagatttgtcgtgtcgtatgtgtccgccggcaatcaacgggttcgactggaagtccctcccgaagccgatgggacccttctaactgaccttatgccaggggtcgagtacgtggttacagtaacggccgaacgtggacgagccgtctcatacccagctagtgttcgagcaaatacaggctccagtcccctcggtctgctggggactactgacgaaccacctccctctggacccagtacgacgcaaggcgctcaggctcccttactgcagcaaaggccacaagaactaggggaacttagagtcttaggaagagatgagactggccgcctgcgcgtagtgtggactgcacaaccagacaccttcgcttacttccagcttcggatgagagtgccggaggggccgggcgcccacgaggaagtcctgccgggcgacgtacgccaggccctggtgcctcccccaccgccaggtaccccatatgagttgtccctgcatggcgtcccaccgggggggaagccctctgacccgatcatttaccaggggattatggacaaagatgaagagaagccaggcaaatcctcaggtcccccccgcctcggcgaactgaccgtcaccgaccgcacgtccgatagcctactactcaggtggaccgtcccagaaggcgagtttgactcctttgttatacagtataaggatagagacggccaaccccaggtagtacccgttgaggggcctcaacgcagtgccgtcatcacctctctggacccgggtagaaagtacaaattcgtgctatacggttttgtcgggaagaaacgacacggacctctggttgcggaagctaagattctgccccaatccgaccctagcccaggcacacctcctcacctcggcaatctctgggtgaccgacccaacacctgactctttgcacctgtcatggactgtccccgagggtcagtttgatacattcatggtgcagtaccgtgacagagatggccgcccccaagttgtaccggtcgaggggccagagagaagcttcgtagtatctagtctggatccagatcacaagtacaggttcaccttatttggcattgccaataagaaacggtacggcccccttaccgctgacggaaccactgcccctgaacggaaagaggagccccctcggccagagtttctcgaacaaccgctgttgggggaactgaccgtaacgggggtgacaccagatagccttagactgagttggacagtggcccagggcccattcgattcgtttatggttcaatacaaagacgctcaaggacagcctcaagccgtgcccgtagctggagacgaaaacgaggtcaccgtcccggggctggatccagaccgaaagtataaaatgaacctttacgggctgagagggcgccagcgggtcggccctgaaagcgtggtggcgaaaacagccccccaggaagatgtagatgaaactcccagccctactgaattagggaccgaggcacctgagtctcccgaggaaccacttcttggagagcttacggtcacagggtcttctcctgactcattatcccttttctggacggtgccacagggatcttttgacagtttcaccgtgcagtacaaagaccgggacgggcgtccaagagccgtcagggtcggggggaaggaatcagaggtgactgtgggcggcctggagcctggccacaagtacaaaatgcacctgtacggcttgcacgagggccaaagagtgggacctgtatccgcggtaggagtgacagcccctcagcaggaagaaacccccccagctacagagtcccctctggaaccccgtctcggagaactaaccgtgaccgatgttacccctaatagcgtggggctttcttggacagttccagagggacagtttgacagctttattgtgcaatacaaggataaggacggccaaccacaggtcgtgcccgttgccgccgatcagcgggaagttaccgtgtacaacttagaaccagaacggaaatacaaaatgaacatgtacgggctgcacgatgggcagagaatgggccctctttcagtcgtgatcgttacagcgcctctacctcctgctccagccactgaagcttccaagccccccctcgaacctcgactgggggaactgacagtgaccgacattactcctgattccgtgggactatcttggaccgtgccggaaggtgaattcgacagcttcgtcgtccagtataaggaccgcgatggccagccacaggtggtccctgtggctgccgatcaacgggaagtgactatcccggacctggaaccctcacgtaagtataaattcctcctgtttggcatccaagacggtaagcgacgaagccccgtcagtgtggaggcaaagaccgtggctcgcggcgatgcatcgccaggggcccccccaagactcggcgagctgtgggtaacagatccgaccccggactccttacggttgagttggaccgttcctgaaggccagtttgactcctttgtcgtgcagttcaaggataaagacggaccacaggtcgttcctgtggagggacacgagagaagtgtgactgttactccactggatgctggtcgcaaataccggttcttgctgtacggtttgctgggtaagaaaagacacggcccactgacggcagatgggacgaccgaggcaagatcggctatggacgacactggcactaaacggccacccaaaccaagacttggagaagaattacaggtaacaacagtaacccagaactcagttggcctgtcttggacagttccagaagggcagttcgattcattcgtcgttcagtataaggatcgtgacgggcagcctcaggtagttcccgtggaaggaagcctgcgtgaagtctctgtgcccggcctggatccggcccaccgatataagctgctgctgtacgggttacatcacggaaaacgggtgggccccatcagcgctgtggctattaccgccggcagggaggaaacagagactgagacgacggcaccaacccctccggctcccgagccccacctgggggagctgaccgtagaagaagctacgtctcacactctgcatctgtcctggatggtcaccgagggcgaattcgattcttttgaaattcagtataccgatagagatgggcagctgcagatggtgcgcattgggggagacaggaatgacattaccctctctgggttagagtccgaccaccgatatctggtgaccctgtacggcttttctgatggaaaacacgtggggccagtccatgtcgaagcactcaccgtgcccgaagaggaaaagccgtcagagcctcctacagcaaccccagaaccgccaatcaaacctaggctcggggaactcaccgtaaccgatgctaccccggatagcctgtcgttgagttggacagttcccgagggtcagttcgaccacttcctagtccagtaccgaaatggagacgggcagcccaaggcagttagggtaccaggtcacgaggagggcgtgacaatttctgggctcgagccagatcataagtacaagatgaatttatatgggtttcatggaggtcagagaatgggccccgtaagcgtggtgggggtcactgcagctgaggaggagaccccatccccaaccgaacctagcatggaagcccccgagccagctgaggagcccctcctcggcgaattaaccgtcacaggctccagcccagactccttaagcctaagctggaccgtaccccaggggcgttttgatagtttcacagtccagtacaaagatcgggatggccgcccccaggtagttcgcgtcggtggtgaggagtcagaagtgaccgtaggcggcctggagcccgggaggaagtacaagatgcatctttacggactccacgagggtcgaagagtcgggcccgtgagcgcagtgggcgtgaccgcccctgaagaagaaagccctgatgcccctcttgcgaaactgcgcctgggccaaatgacagtgcgcgatatcactagcgactctctcagtctgtcttggactgtacccgagggccagtttgaccatttcctggtgcagttcaagaacggggatggccaacctaaggcagtcagggtgccagggcatgaagacggggtcacaatatcaggattagagccagaccacaaatataagatgaacctgtacgggttccatggcggtcagagggtcggcccagtgtccgccgtgggcctaacggctccaggtaaggacgaggagatggctccagcctctacagagccacccactccagagccccccattaagcctcggctcgaggagctgactgttactgatgccactccagactccctgtcattgagctggactgttcctgagggccaatttgaccatttcctcgtgcagtataaaaatggcgacggacagccaaaggccacccgcgttcctgggcacgaggacagagttacaatatctgggctcgagccagataacaaatataagatgaatttgtatggctttcatgggggtcaaagggttgggcccgtttcagctatcggcgttaccgccgccgaagaggagactccatcccccactgagccttcaatggaggctcctgagcctccggaggaaccactgctcggggagctcacggtgaccggttcatcacctgactcactaagcctgtcgtggaccgtgccccagggtcgctttgatagctttacggtgcagtacaaagacagagacggtcgccctcaggttgtgagagtggggggggaagagtccgaagtcacggtaggtgggttagagccaggcaggaaatacaaaatgcacctctacgggttacacgagggcaggagggttggcccagtgtccacagtgggcgtgacggctcctcaggaggatgtggatgagaccccgtcacccactgaacccggcacagaagctcccggaccgccagaggagcctcttctgggagagcttactgtaactggaagtagcccagacagcctatctctttcctggacagtgccacagggccgcttcgatagtttcacagtgcagtacaaagacagggatggaagaccccaggccgtgcgcgtgggcggccaagaaagcaaagttactgtgaggggactggaacccggcagaaagtacaaaatgcacctctatggcctgcacgaggggcgaaggcttggcccggtgtccgccgttggggtcacagaggacgaagctgagacgacccaggccgtacccacaatgactcctgagccaccgatcaagccacgactgggcgaactgacaatgaccgacgcgacaccggactctctgagcctcagttggacggtgcccgagggccagttcgaccacttcttggtgcaataccggaatggcgatggtcagcctaaagcggtgagggtcccaggacacgaggatggcgtgacaattagtggactggaaccagaccataaatacaagatgaacttgtacggctttcatggggggcagcgagtggggccaattagtgttataggcgtgacggcggccgaggaggagacaccatctccaaccgagctgtcaacagaggcaccagagcccccagaagagcctctccttggcgagctgaccgttaccggaagcagccccgactcactgtctttgtcttggacgattccccagggtcacttcgattccttcacggtgcagtacaaagacagagacggccgcccacaagtcatgcgggtccggggagaagaatctgaagtgactgtggggggcctcgaacctgggcggaagtacaagatgcacttatacggcctacatgaaggccgaagagtcggaccagttagtacagtcggggtcacggaggacgaagctgaaactacacaggccgtgcccactactaccccagagccgccgaacaaaccccgtctgggggagctgactgttaccgacgctacacccgattcgttgtctttatcatggatggtccccgagggccagttcgatcatttcctggtgcagtacaggaacggtgacgggcaaccaaaggtggtgagggtccctggccatgaagatggcgtgaccattagcgggcttgaacctgaccataagtataagatgaacctgtatggctttcatggggggcagcgagtcggaccgatatctgtgattggagtgactgcagctgaggaggagactccggcgcccacagagccctcgacggaggcccccgaacccccagaagagcctctactgggcgaactgactgtaacagggtctagccccgacagtctgagcttgtcctggactatcccgcagggtcggttcgacagctttacagttcagtataaagaccgcgacggcagaccccaggtggtgagggttcgcggggaagaatctgaggtgactgttggcggtcttgaacctgggtgtaaatataagatgcacctctacgggctacacgaagggcagcgagtgggtcccgtgtctgcagtcggagttactgcccccaaagatgaagccgaaacaactcaggccgtccccacaatgactcctgaaccaccaataaaacccaggctgggtgagctgactgttaccgacgccacacccgacagtctcagtctgagttggatggttcctgagggacagttcgatcacttcctggttcagtacaggaacggcgatggccagcccaaggccgttcgcgtgccaggccacgaggatggcgtcaccatttccggtctcgagcctgaccataagtataaaatgaacctttatggctttcatgggggacagcgggtcgggccagtttcagccatcggagttactgaggaggaaactccttcccccactgagccgtccaccgaggctcctgaagctcccgaagaacctctgttgggcgagttgacagtcaccggtagttcccccgatagcctcagcctgagctggacggtaccccaaggcagattcgacagctttaccgtccagtacaaagatcgtgatggccagccacaggtagttcgagtgcgaggagaggagagcgaggtcaccgtgggcggactggagcccggtaggaagtacaagatgcatctgtatggactacatgaaggacaacgtgtcggcccagtgagcactgtcggcataaccgcacctcttcctacgccactgcccgtggagcctcgcctgggggaacttgccgtggccgcggttaccagcgacagcgtcggtctgtcttggacagtcgcacagggaccatttgactctttcctggtgcagtacagagacgcacagggccagccacaggccgttcctgtttccggcgacctcagagccgtggcggtgtctggactcgatcccgcacgaaaatataagttcctgctttttggcctgcagaacggaaagaggcatggacctgtccctgttgaggctaggacagcccctgatacaaagccatcgccccggctcggtgaattaaccgtgaccgacgccacccccgacagtgtaggccttagttggactgttccagagggagaattcgactcctttgttgtacaatataaagataaggatggacgcctccaggtagtacccgttgcagctaaccagcgcgaagtcaccgtgcagggcctggaaccatcacgcaagtatcggttccttctgtatgggctaagcgggcgcaaacggctgggccccataagcgctgactctaccaccgcacccctggagaaggagctgccccctcacctgggcgaacttacagtagctgaagagacatccagcagtctaaggttatcctggacggtggcccagggtccctttgattccttcgtagtgcaatatagagacaccgatggccaacccagagctgtgcccgtggctgcggaccagaggactgtgactgtggaagacctcgagcccggaaagaagtataagtttctgctttacgggcttctcggtggtaaaagattgggtcccgtgagcgcactggggatgaccgcacctgaggaggatacccccgcacctgagttagcgcccgaggcccctgagccaccagaggaaccaagactaggggtgctgaccgtcacagatacgaccccagacagcatgcgattgtcatggtcagtagcgcagggtccctttgactcatttgtggtgcaatatgaagacaccaacggtcagccacaggctttgttggtggacggagaccaatctaaaattctcatctccggacttgaacctagtaccccatacagattcttgctctatggactgcacgaagggaagcgactcggacctctgtccgctgaggggaccactggcctggcacccgccggccagacatcagaggagtcacgtcctcggctctcgcagctgagcgtgaccgacgtgactacctcttcacttaggctgaactgggaggcacctcccggcgctttcgatagcttcctgcttcgatttggagtgcctagccctagcaccctcgagcctcaccctcgcccacttctgcagcgcgagctgatggtgccaggaaccagacactctgctgtgttgcgggacctgaggtcaggaactctgtactctctcacactatacggacttcgcggacctcacaaggctgactctattcaaggcaccgcccggacgttgagccccgtcctggagtcaccacgcgatctgcagtttagcgagatccgcgaaactagcgccaaagtcaactggatgcccccccctagtagagcggatagttttaaagttagctaccagctagccgatggaggcgaacctcagtcagttcaggttgacggacaggccaggacccagaaattgcagggtttgataccgggtgcacgctacgaagtaacagtggtttccgttagggggtttgaagaaagtgagcctctcacaggtttcctgacaacagtgcccgacggaccaacccagctgagagccttgaatctgacagaggggttcgcggttctgcattggaaaccccctcagaacccggtggacacctatgacgtgcaagtcacagccccaggcgctccccctctgcaggcagaaacaccaggtagtgcagttgattacccactgcacgatctggtgctgcacaccaactatacagccacggttagaggcctgagggggcctaatcttacaagccccgccagtatcacctttactacagggcttgaggctccacgagacttagaagccaaggaggtgacacccagaacagcactgctcacttggacagaacccccagttcgaccggccggctacctgctgagttttcacaccccaggcggacaaaatcaagaaattttgctgccaggcggcatcacctcacaccagctgctgggactctttccttccacttcatacaacgcccgactccaggctatgtggggccagtctttgctgcctccagtgtctactagtttcaccaccggaggcctccgtatcccttttccacgcgactgcggagaggaaatgcagaacggcgccggtgcttccaggacttccaccatcttccttaatggaaaccgcgagaggccactcaatgtgttttgcgatatggaaacggatggcgggggatggctggtcttccagagacggatggatggccaaaccgacttttggcgagattgggaagactatgcacatggattcgggaatatcagcggcgaattctggctcggcaatgaggccttacactcccttactcaagcgggcgactactcaatgcgggtagatcttagagcaggggacgaggccgtgttcgcccagtatgactcctttcacgttgactcagctgccgaatactaccgcttgcatttggaggggtaccatggaaccgcaggcgatagtatgagctatcatagtggctcagtcttttcagcaagagacagggatccaaattctttgctgatatcatgcgcggtgtcttaccgcggggcctggtggtaccgtaactgccactacgccaacctcaacggtttgtacgggtcaacagtggaccaccagggcgtttcctggtaccattggaaggggtttgagttctccgtgccattcacagagatgaagctgagaccgcgcaatttccgctcacctgctggcggaggctag

SEQ ID NO: 26587 - DNA, 2022 bp, synthetic construct
  misc_feature 1..2022: note = Description of Artificial Sequence: Synthetic coding sequence
  source 1..2022: mol_type = other DNA
atgcggctgagctggagcgtggcccagggccccttcgacagcttcgtggtgcagtacgaagatacaaatggacagccacaggcactcctcgttgacggagaccagtccaaaatcctcatttcaggactggagccaagtaccccataccgattcctcctttatggtctgcacgaggggaagcgactcgggcctctctctgccgaaggaacgaccggcctggcgcccgccggccaaacaagtgaggagagccgcccccggcttagccagctctctgtcacagacgtgactacgtcatcactgcggctgaactgggaggcgccgcctggcgctttcgattcctttctccttcggttcggcgtcccaagcccttccaccctggagccccatccacgtccccttctgcagcgggaactgatggtgccaggcacccgccatagcgcggtcctcagggaccttcgttctggcacactgtattccttgactctctacgggttgagagggccacataaggccgattctatacaggggacagccagaaccctgtccccagttcttgaaagcccccgggacctgcaatttagtgaaattcgagaaacaagcgccaaggttaactggatgcctcccccgtctagggcagattctttcaaagtgagttatcaactagccgatggcggtgaacctcagagcgtccaagtcgacggccaagccagaacacagaagctgcagggcttaatacccggtgcaaggtatgaagtgaccgttgtatcagtccgtgggttcgaggaatccgaacctctcaccgggttcctgacaaccgtgccagacgggcccacccaactgagagcattgaatctgaccgaaggatttgccgtgctgcattggaaacctcctcagaatcctgtggacacgtacgacgttcaggtgacggccccaggggcccctcccctgcaggccgagacaccaggatctgccgtagactatccccttcacgatttggtgctgcacaccaactacaccgcaacagtccgcggattgcggggccccaacctgacatctcccgcgtccattacatttacaacaggcctggaggcacctagagatcttgaagctaaagaagttaccccacgaacagctctgctgacatggaccgaacctcccgttaggcccgctggatacctgttatcctttcatactccggggggtcagaaccaggagatcctccttccagggggcattacatctcatcaactgctcgggctctttccttcaacatcatacaacgctcgactgcaggctatgtggggtcagagtcttttgcctccagtctcgactagctttactacaggcggactccgtattccgtttccgagggattgcggagaagaaatgcagaacggcgcgggcgcaagtcggacatccaccattttcctgaacggcaaccgggagcggccattgaacgtgttctgcgacatggagacagatggtggcggctggctggtcttccagcgacggatggatggccagactgatttctggcgggattgggaggattacgctcacggtttcggcaatatttccggtgagttctggctgggtaacgaggccctgcactcgcttactcaagccggcgattactcaatgcgcgtcgacctgagggctggggatgaagccgtgtttgctcaatatgacagctttcatgtcgattctgctgctgagtactatagattgcacttggagggctaccacgggacagcgggagactctatgagctaccactccggcagcgtgtttagcgctcgagatagggacccgaattctctgctcatctcttgcgctgtgtcctaccgaggagcctggtggtaccgtaattgccactatgcgaacctcaatggtctttatggctcaacagtggaccatcagggcgtgtcatggtatcattggaaaggttttgagttctcagtgccctttacagagatgaagttgcgcccccgaaatttccgctctccagccggaggtggctag

SEQ ID NO: 26588 - DNA, 954 bp, synthetic construct
  misc_feature 1..954: note = Description of Artificial Sequence: Synthetic coding sequence
  source 1..954: mol_type = other DNA
atggccaagaacccccccgagaactgcgaggactgccacatcctgaatgcagaggcctttaaatcgaagaagatctgtaaatccttgaagatttgcggcttggtgtttggaatcctggccctcacacttatagtactgttttggggctcgaagcacttttggcccgaagtcccgaaaaaggcctatgatatggaacacaccttctatagcaatggcgaaaaaaaaaagatatatatggaaattgatcctgtgactaggaccgagatctttagaagtggtaacggcacggatgaaacactggaggtgcacgattttaagaacggatacaccgggatctatttcgttggcctccagaaatgtttcattaaaacgcagattaaagttatccctgaattttcggaaccggaggaggagatcgacgaaaacgaggagatcaccaccacgttcttcgagcagagcgttatatgggtgcccgcagagaaaccaatcgagaaccgcgatttcctgaaaaacagcaagatcctggagatctgcgataacgttaccatgtactggatcaatccgaccctcataagtgtcagcgagctgcaggatttcgaggaagagggtgaggatctccactttcccgccaacgagaagaaaggtatcgaacagaacgaacagtgggttgtgcctcaggtgaaagtggaaaaaacaaggcacgctaggcaggcttcagaagaagaactgcccattaatgactataccgagaacgggatcgagtttgaccctatgttggatgaaagaggttattgttgtatatattgccgaagaggtaatcggtattgcagacgcgtttgtgaaccactacttggttattatccctacccctattgctaccagggcggcagagtcatctgccgcgtgattatgccttgtaactggtgggttgccagaatgcttgggagagtctag

SEQ ID NO: 26589 - DNA, 1356 bp, synthetic construct
  misc_feature 1..1356: note = Description of Artificial Sequence: Synthetic coding sequence
  source 1..1356: mol_type = other DNA
atggccacccccctggtggccggccccgccgccctgcggttcgccgcggcggccagctggcaggttgtaagggggaggtgtgtagagcattttccccgcgttctggagtttttgcggagtctgagagccgtggctccaggcctggttcgttataggcatcacgagagattatgcatgggcttaaaagccaaagtggtggtggaactgattctccaggggaggccctgggctcaagttcttaaggccctgaatcaccactttccagaatccggcccaatagtgcgggatccaaaagcgacgaaacaggacctgaggaagatcctggaggcccaggagaccttttaccagcaagtgaagcaactgtctgaggcacccgtggatctggcgtctaagctgcaagagctggagcaagagtacggggaacctttcctggctgctatggaaaagcttcttttcgagtatttatgccagctagagaaggctctgcctaccccgcaggcccagcagctccaggacgtgttgtcatggatgcagcccggcgtctctattaccagttccctagcatggcgccagtatggagtggacatgggctggttgctgccggaatgctctgtgacagattcggttaatctggccgagcctatggaacagaatccgccacagcaacagcggctcgccctgcacaacccgctacctaaagcaaaacccggaacccacctcccccaaggcccatctagtcgtactcacccagagcctctagcaggtagacacttcaacctggctccgctcggaagacgcagggttcaaagccagtgggcgtcaacacgaggggggcacaaggagcggcctaccgtaatgctgttccctttccggaatctgggttcccctacccaggtgatatccaagccagaatccaaagaggaacacgctatctatacagcagatctcgcgatgggaacacgtgcagcctctacaggaaagtcaaagtccccatgccagaccctcggtggccgggccctgaaggagaacccggtggatctgcctgcaacggagcaaaaggaaaattgtctggactgttacatggaccccctcagactctcactgcttcctcccagggcaagaaaacctgtgtgcccaccgtcactgtgcagcagtgtcataactatcggagatctggtgttagattcagatgaggaagagaatgggcagggggaagggaaagaaagccttgagaattaccagaagaccaaatttgatacgctcatccctaccctctgcgagtatctgccacccagcggtcacggcgccattcccgtgagtagttgcgactgtcgcgattctagtagaccactgtag

SEQ ID NO: 26590 - DNA, 1065 bp, synthetic construct
  misc_feature 1..1065: note = Description of Artificial Sequence: Synthetic coding sequence
  source 1..1065: mol_type = other DNA
atggccacccccctggtggccggccccgccgccctgcggttcgccgccgccgcgagctggcaggttgttagaggaagatgcgttgagcattttcctagagtcttggaatttcttcgttctttacgcgccgtggcccccggacttgttagatataggcatcacgaacgcctgtgcatgggcctgaaagccaaggtggtggtcgagttgatacttcagggtaggccctgggcacaggtcctcaaagctcttaaccatcatttcccggagtcaggacctatcgtgagagatccaaaggcaaccaagcaagacctacggaagatcttggaggcccaagagaccttttatcagcaggtcaagcagcttagtgaagctccagtggacctggctagcaaactgcaggagcttgagcaggagtatggcgagccattccttgccgccatggagaagctgctgtttgaatacctctgtcagctggagaaagcactgcccactccccaggcccagcagttacaggacgtcctttcatggatgcagccaggggtgagtattacctcaagcctggcctggaggcagtacggtgtcgacatgggatggttgttgcccgaatgctcagtgaccgattccgtgaacctggctgaacccatggagcagaaccctccacagcaacagaggcttgctctccataaccccttacctaaagccaagcctggtacccatctgccacagggaccctcctcccgcacacatcccgaacccctggctgggaggcactttaaccttgccccattggggcgccgccgcgttcagagccagtgggcctcaactagagggggccataaggagagacccaccgtaatgttatttcccttccgaaacttaggttcccccactcaggttatcagtaagcccgaaagcaaggaggagcatgccatctatacagctgatctggcaatgggcacaagagcggcttccacaggtaaatctaaaagtccttgccagacactgggtggcagagcactgaaggaaaacccggtggacctgccagccactgaacagaaggagtag

SEQ ID NO: 26591 - DNA, 423 bp, synthetic construct
  misc_feature 1..423: note = Description of Artificial Sequence: Synthetic coding sequence
  source 1..423: mol_type = other DNA
atggagcagaaccccccccagcagcagcggctggccctgcacaaccctttacctaaggccaaaccagggactcacctacctcagggccccagctctaggacccacccagagccactggccggtcgccatttcaacctggctcccttaggtagacgcagggtgcagagccagtgggcttccaccaggggaggtcacaaagagcggcctaccgtgatgttgtttccattcaggaacttaggaagtcctacacaggtaatcagtaagcccgaaagcaaagaagagcacgctatctacactgccgaccttgctatgggcacacgcgcggcctcaacaggcaaatcaaaatccccctgccagactctagggggccgagccttgaaggaaaatcccgttgatctgccagccaccgaacagaaggaatag

SEQ ID NO: 26592 - DNA, 1251 bp, synthetic construct
  misc_feature 1..1251: note = Description of Artificial Sequence: Synthetic coding sequence
  source 1..1251: mol_type = other DNA
atggccacccccctggtggccggccccgccgccctgcggttcgccgcagcagccagctggcaggttgtcagaggaaggtgtgtggagcactttcctagagtgctcgagttcctgcggtcactgcgggctgtcgcgccaggccttgtcaggtaccgacaccacgaaaggctgtgtatgggcctcaaagccaaaaccaaacaggacctacggaagatcctggaagcccaggagacgttctatcagcaggttaagcagttatctgaggctccagtagacctcgcttccaagctccaggaactggaacaggaatacggcgaaccctttctcgcagcaatggaaaagcttttatttgagtatttgtgtcagctcgaaaaagccttgccgactccgcaggctcagcagttgcaagatgtgttaagctggatgcagcctggggtctccatcacctcgtctctcgcttggcggcaatatggagtggacatggggtggctgcttcctgaatgtagcgttaccgattcagtcaacctcgccgagccgatggaacagaaccctcctcaacagcagaggctggctttgcacaaccccctgccgaaggctaagcctggcacccatttgccccagggcccctcttctcgaacacaccccgagccgctcgccggacgacacttcaacctcgctccactgggacggcggcgggtgcagagccaatgggcctctaccagggggggtcacaaagaacgccccactgtgatgctttttccattcaggaatctgggctccccaactcaagtgatctcaaaacctgagtcgaaagaagaacatgccatttacaccgccgacttggctatggggaccagggccgcctccaccggcaagagtaaatctccttgtcaaactctcggagggcgagctttaaaggaaaacccggtagacctgcccgcaacagaacaaaaagagaattgcttagattgttatatggatccgttgcgcctctctttgctacccccgagggcccggaaacctgtctgtcccccatcactttgctccagcgtaatcacaatcggcgatctggtactggactccgatgaagaggagaatggccaaggggagggaaaggaatccctggaaaactatcaaaaaactaagtttgatactctgataccaacactttgtgagtacctgccaccgtctggccatggggccatacctgtgagcagttgcgattgcagagactcaagcagacccctatag

SEQ ID NO: 26593 - DNA, 3498 bp, synthetic construct
  misc_feature 1..3498: note = Description of Artificial Sequence: Synthetic coding sequence
  source 1..3498: mol_type = other DNA
atggagcaggaccggaccaaccacgtggagggcaaccggctgagcccttttctcatcccttctcctcccatctgtcagaccgagcctctagcaacaaagctgcaaaacggaagcccgctaccagagcgcgcccatcccgaggtgaatggtgacaccaagtggcactccttcaagtcttattatggaatcccttgcatgaagggatcgcaaaactctcgggtaagtccagattttacacaggagagtcgcgggtacagcaaatgtcttcagaatggggggattaagaggacagtgtctgaaccctctctgtccggactactgcagattaagaaactaaagcaagatcagaaggctaatggagagcgtagaaactttggcgtgtctcaagaaagaaaccctggggagagttcacaacctaatgtgtctgacttgtccgacaaaaaggagtccgtgagttctgtcgcccaggaaaatgcagtcaaggacttcacctccttcagcacgcataactgtagcggccctgaaaaccctgagctgcagatactgaatgagcaagagggtaaaagcgcaaactatcatgacaagaacattgtgctgctgaaaaataaggctgtcctcatgccaaacggagctacagtatccgctagtagcgttgaacacacacacggcgaactattggaaaaaactctctctcagtactatcctgactgtgttagtatagctgtccagaaaacaaccagccatatcaatgcaataaattctcaagccaccaatgaattgtcgtgtgagatcacccacccctcacacactagtggacaaatcaattccgcccaaacgtcaaactcagagctcccaccgaagcctgcagccgtcgtgagcgaggcgtgcgatgccgacgatgcagacaatgccagcaaactggccgctatgttgaatacatgcagtttccagaagccagaacagttacagcagcagaaatcggtgttcgagatctgtccctcacctgcagaaaacaacatccagggcactactaaactagcaagcggggaagaattctgttccgggtcctcctcaaatctgcaggcaccgggcgggagttccgagagatatcttaaacagaatgaaatgaacggggcatattttaaacaaagcagcgtattcaccaaagattcgttttcagccaccaccactcctccccccccaagtcagctcctgctcagtccgcctccgcccctgccgcaagtgccgcagctcccctccgaaggcaagtctaccctcaacggtggcgtcctcgaagaacaccatcactacccaaatcaaagcaacactaccctccttcgggaagttaagatcgaaggtaagcccgaagcaccacccagccaaagtccaaacccatcaacgcacgtgtgcagcccaagtcccatgctgtccgaaagaccacagaataactgtgttaaccggaacgatatacagaccgctggtacaatgacggtccctttgtgtagcgagaaaacccgcccaatgagtgagcatctcaagcacaacccccccatctttgggtcctccggcgaactgcaagacaactgtcagcagttaatgaggaataaggaacaggaaattctgaagggtagagacaaagaacaaaccagagacctggtgcctcccacacaacactatctcaagcccggctggatcgagttaaaagctccaaggttccaccaggcagaatcccacctaaagagaaacgaagcttctctaccttctattttgcagtatcagcctaacctgtccaaccagatgacaagcaagcaatatactggcaactccaacatgcccggtggcttgccccggcaggcttacactcagaaaaccacccagctggaacacaagagccaaatgtatcaggtcgaaatgaatcaggggcagtcccagggaaccgtggatcagcacctacagttccagaagcctagccatcaagtgcacttttcgaaaaccgatcacttgcccaaggctcacgtgcaatctctgtgtgggaccaggttccatttccagcagagggccgatagccagacagagaagctcatgagccccgttttaaagcagcatctaaaccagcaggctagcgagactgagccctttagcaatagccacctcctacagcacaagccacataagcaggctgcgcaaacccagcccagccaatcttctcatctgcctcagaaccagcagcagcagcagaagctgcagattaagaacaaggaagaaattctgcaaacatttcctcatcctcagtctaataacgaccagcagcgggaaggctctttcttcgggcaaaccaaagtagaggaatgcttccatggagaaaaccaatatagcaagtccagcgaattcgagacacataatgttcaaatgggtttggaggaggtccagaacattaacagacgtaactctccctactcccagactatgaagagttccgcctgtaagatccaggttagctgttccaacaacacccatctcgtttctgaaaacaaagagcagactactcaccccgaactcttcgccggcaacaaaactcaaaacctgcatcatatgcagtattttcctaataacgtgatcccaaaacaagacctgttacatcgctgtttccaggagcaggaacagaagagccagcaggccagcgttcttcagggctataaaaaccggaaccaggacatgagtggccagcaggctgcccaactggctcagcagagatatttgatccataaccacgctaatgtcttccccgtacccgaccagggagggagccacacgcagacccctcctcaaaaggatactcaaaaacatgcagcgctcagatggcacctgttgcagaagcaagagcagcagcagactcagcagcctcagaccgagtcctgccactctcaaatgcaccgccctattaaagtggagcctggctgcaagccacatgcatgtatgcacacagctcccccggaaaacaaaacatggaaaaaagtgaccaagcaagagaaccccccggctagctgtgacaacgtacagcaaaaaagcatcatcgagactatggagcaacatctgaaacagtttcatgctaaaagtctgtttgaccataaggcactgaccttgaaatcccagaagcaggtgaaagtggagatgtcagggcccgttacagtgctgacccgccagaccactgctgcagaattggacagccacacacccgctctggagcagcagacaacttcctctgaaaagaccccaacaaaacggactgcagcctctgtcctgaacaactttatcgagagcccctccaaactgctggatactccaatcaagaacctgttggacacccctgtaaaaacccaatatgactttcccagctgtcggtgcgttggtaaatgccagaagtgtaccgagacgcatggtgtctacccagagctcgcaaacctgtcgagcgacatggggttcagcttttttttctag

SEQ ID NO: 26594 - DNA, 6009 bp, synthetic construct
  misc_feature 1..6009: note = Description of Artificial Sequence: Synthetic coding sequence
  source 1..6009: mol_type = other DNA
atggagcaggaccggaccaaccacgtggagggcaaccggctgagccccttcctgatcccctccccacctatctgccagacagagcctctggctaccaaactgcagaacgggagtcctcttccagagcgtgcccatcccgaagttaacggggacacgaagtggcacagctttaagtcctactatggcatcccatgtatgaagggctcgcagaattctagggtctcacccgactttacccaggaatcaaggggctatagtaagtgcctgcaaaacggagggataaaacgcacggtatccgaaccttccttgagcgggttgctgcagattaagaagcttaagcaagatcaaaaagctaatggggagcgacggaactttggagtgtctcaggagagaaaccccggcgaaagcagtcaacccaacgtgagcgatctgtctgacaaaaaagaatcagtctcctcggttgcacaggaaaacgctgtcaaggattttactagtttcagcacccacaactgttctggacccgaaaacccggaactgcagattcttaacgaacaggagggtaaaagtgccaactatcatgataagaacattgttttactcaagaataaagctgtgctgatgccaaatggggccaccgtgtcagcgagttccgtcgagcatacacatggcgagctcctggagaaaactctcagtcagtactaccccgactgcgtcagcatcgccgtgcagaagaccaccagtcacataaatgctattaatagccaagccactaatgagctcagctgcgagataacccatcccagtcatacctctggacagattaactcagcccagacatccaacagcgagttgccgcccaagcctgctgccgtagtctccgaggcatgtgacgcggatgatgctgacaatgcatcgaaactagctgccatgctgaacacatgcagcttccagaaacctgagcagctgcagcagcagaaatcagtatttgagatttgcccttctcccgctgagaacaatattcagggcactaccaagctcgcctcaggcgaggagttttgcagcggatcttcctccaatctgcaagctcccggcggaagttctgaaagatacctgaagcagaacgaaatgaacggtgcttactttaaacaaagttccgtgttcaccaaggatagtttcagtgccaccaccaccccaccccctccatcacagctgttgctcagccccccccccccattgccacaggtacctcagttacctagcgagggtaaaagtaccctaaacggaggggtgctggaagaacatcaccactaccccaaccaaagcaacaccactctactgagagaggtgaaaattgagggtaagcccgaggcgccccctagccagtctcctaatcccagtactcatgtgtgctccccaagcccaatgctgtctgagagaccccagaacaactgtgtaaatcgcaacgacatacaaacggctggcactatgacagtgccactgtgttctgaaaagaccaggcccatgagcgagcacctgaagcacaaccccccaatttttgggtcttccggcgagcttcaggataattgccagcagctgatgagaaacaaagagcaggaaatcttaaagggccgagataaagagcaaacaagagacctggtacccccaacccagcattacttaaaacccgggtggatcgagttaaaggcccctagattccaccaggcagagagccacttgaaacggaatgaggcatccttaccttcaatcctacagtatcagcctaatctcagtaatcagatgacctccaagcaatacaccgggaactccaacatgccgggtggcctcccacgacaagcctatacacagaagactacccagctggagcacaagagtcagatgtaccaggtggagatgaatcaagggcagtcacagggaaccgtggaccagcacttacaatttcagaaaccaagccatcaggtacatttctcgaaaaccgaccatctgcccaaagcacacgtgcaaagcctgtgtggcacaaggtttcacttccagcaacgcgctgactcccagactgagaagttgatgtccccagtgctgaaacagcatcttaatcagcaggcaagcgagacagagccgttttctaactctcatctattgcagcataagcctcacaagcaagctgcccaaacgcaaccttcacaaagcagtcatttgcctcagaaccaacagcagcagcagaaattgcagattaagaataaggaggagattctgcaaacattcccacatccgcaatcaaacaacgaccagcagcgggagggaagcttttttggacaaaccaaagtggaagaatgcttccacggggagaatcagtatagtaagagttcagagttcgagacccacaacgtgcagatggggctcgaagaagttcagaatatcaaccgcagaaattcaccttatagccaaaccatgaaaagctcagcctgtaaaatacaggtgagttgcagcaacaatacacaccttgtgtctgaaaataaagaacagacgacacaccccgaactctttgcaggtaacaagacacaaaacctgcaccacatgcagtatttccccaacaatgtgatccccaaacaggatctgctgcaccggtgtttccaagaacaagagcagaagagccagcaggcctccgtcctccaaggatacaaaaatagaaatcaagacatgagcgggcagcaggctgctcagttggctcaacagcgctacctcatacacaaccacgctaacgtgtttcctgtgcccgaccagggagggtcccatacccaaaccccaccgcaaaaagacacgcagaagcacgctgccctgcgttggcatctcctgcagaagcaggaacagcaacagacccagcaaccgcagaccgagtcctgccattctcagatgcatagaccaataaaagtggaaccgggctgcaaaccgcacgcttgcatgcatacagccccgcccgaaaataaaacttggaagaaggttacaaagcaggaaaacccacccgcaagttgtgataatgttcagcagaaaagtatcatcgaaaccatggagcagcacctgaagcagtttcacgctaaatcactctttgaccataaagctctcactctgaaaagccagaagcaggtgaaggttgagatgagtggccccgtgacggtcctgacaagacagactacagcagctgagctggacagccacacgcccgccctcgaacaacagacaaccagtagtgagaagacgcctacgaagcgcactgccgccagcgtcctgaacaattttatcgagagcccaagcaaactgctggacacaccgatcaaaaacctactcgatactcctgtcaaaacacagtatgactttccatcctgcagatgtgtagagcagattatcgagaaagacgagggacccttttatactcacttaggtgccgggcctaacgtggcagctattagagaaattatggaggagaggtttggccagaaggggaaagctataaggatcgagagagtgatttacacggggaaggaaggtaagtccagtcagggttgcccaattgccaaatgggtcgtccgtagatcatcctctgaggagaagctgctttgtctggtgagggaacgggccggacacacttgcgaagctgcagtgattgttatcctgatccttgtgtgggagggcatccccctgtctttagcggataagctgtactccgagctgacagaaacattaagaaagtacggcaccctaaccaatcgaaggtgtgcccttaatgaggagaggacctgtgcttgtcagggcctggacccagagacctgtggcgcaagctttagtttcgggtgttcttggagtatgtactataacggttgcaagtttgcaagatccaaaattccccggaaatttaaactcttgggggatgatcccaaggaagaagagaagcttgaaagccacctgcaaaacctctcaaccctcatggcacctacatataagaagctggccccagacgcatacaataatcagatcgaatacgagcatcgagctcccgaatgtagactcgggttgaaggaaggcagacctttttcgggggtaacagcctgtctggacttctgcgcccacgcgcacagggatctccacaacatgcagaacggcagcaccctggtgtgcaccctgacgcgcgaggataaccgcgaattcggcggcaagcccgaggatgaacagctgcacgttctgccactgtacaaggtgtccgacgtggatgagtttgggagcgtggaagcccaggaagagaagaagcgcagtggagcaattcaggtcttgagctctttcaggagaaaggtcaggatgttggctgagcccgtcaaaacatgcaggcagcggaagctcgaggcgaagaaagctgccgctgagaagctgtctagcctggagaattcgtcgaacaagaacgagaaagagaagagtgccccttctagaacaaagcagactgagaatgcatctcaagcaaaacagcttgctgagttacttcgtctctctggcccggtgatgcagcagtcccagcagccccaaccactccagaagcaaccaccccagcctcaacagcagcagcgtccccagcagcagcaaccacaccacccccagactgaatccgtgaattcctatagtgctagtggatccaccaatccgtacatgcgaagacctaatcctgtctccccatatcctaactcctcccacaccagcgacatctacgggagtacctcccctatgaatttctactcgaccagcagccaggcagcaggatcctacttgaactcctccaaccccatgaacccatatcctgggttgctgaaccagaacactcagtatccctcctaccaatgtaacgggaatttgagcgtagacaattgtagtccttatcttgggtcctattcgccacagtcccaaccaatggatttgtataggtaccccagccaagacccactgtcgaaactcagtttgccacctatccatactttgtaccagccccgcttcggcaacagtcagtcatttacgtctaagtatttggggtacggaaatcagaacatgcagggggatggcttcagctcttgtacgattcgtccgaacgtacatcatgtcggaaaactgcctccttaccctacccacgagatggatggccatttcatgggtgccaccagtcgcctcccaccaaatctgtccaacccgaatatggattataagaacggtgagcatcattcgccatcccatatcatccataattacagcgctgctcccggcatgtttaacagttcactgcacgccctacatctccagaacaaagaaaacgacatgctgtctcacaccgctaatggcctcagtaagatgttaccggcactcaatcacgatagaactgcatgtgtgcagggaggcctgcacaaactctccgacgccaatggccaagagaaacagccccttgctttagtacagggagtggcatcaggtgccgaagacaacgatgaagtgtggtccgattccgagcagagttttctcgaccccgatattggcggagtggccgtagccccaacccacggcagtatccttattgagtgtgctaagagagaattgcatgccacaacccccctgaagaatcctaatcgcaatcaccctacacgaatttctttagttttttatcagcataaatccatgaacgagcctaagcacggcctcgccctgtgggaggccaagatggccgaaaaggcccgtgagaaagaggaggaatgcgaaaaatacggccccgattacgttccacagaaaagccatggcaaaaaggtaaaaagggagcctgccgagccacacgaaacaagcgagcccacctacctccgattcatcaagtccctggccgagaggacgatgtcagtgaccaccgatagcaccgtgacaacaagcccttatgcattcacccgagttaccggtccctataacaggtacatctag

SEQ ID NO: 26595 - DNA, 3498 bp, synthetic construct
  misc_feature 1..3498: note = Description of Artificial Sequence: Synthetic coding sequence
  source 1..3498: mol_type = other DNA
atggagcaggaccggaccaaccacgtggagggcaaccggctgagcccattcctgataccaagcccacccatctgccagacagaacccctggcgacaaaactgcaaaacggaagtccgctacccgaacgagctcatccggaagtgaatggggacacgaagtggcattcattcaagtcctattacggcatcccatgtatgaaggggtcgcagaactcaagggtctccccagattttacacaggagtctaggggttactcgaagtgccttcagaacggaggaataaagcggaccgtatccgaaccatcactgtctggtttgctgcaaatcaaaaaactgaagcaagatcagaaagctaacggtgagagacggaactttggtgtgagccaagagcggaacccgggggagtcctctcagccaaacgtatctgatttatccgacaagaaggagagcgtgtctagcgttgctcaggagaacgcagtcaaggacttcacatcctttagcacacacaattgctccggtccagaaaatccagaattgcagatactcaacgaacaggaggggaaaagcgctaattatcacgacaaaaatattgtgttgctcaagaataaagctgtgctgatgcctaatggcgcaacagtttctgctagtagtgtggagcatacccacggagagcttcttgaaaagacccttagccagtactatcccgattgcgttagcatcgcggtccagaaaacaacttctcatatcaatgccatcaattcccaggctacaaatgagctgagctgcgagatcacacaccctagtcatacgtctggccagatcaactcagcccagacttccaacagcgagttgccacccaaaccagctgccgtggtctctgaggcttgtgatgccgatgatgcagacaacgcctctaaactcgccgccatgcttaacacatgctctttccagaaacccgagcaattgcagcagcaaaagtcggttttcgagatctgtccgtcccccgcagagaataacatccaaggcaccactaagctggcgtccggcgaggaattttgcagcgggtccagctctaatctgcaagcccccgggggttcctccgagcgctatttgaagcagaatgaaatgaacggcgcatactttaagcaatcatcagtttttaccaaggattctttcagcgcaaccaccactcctcctccccccagtcagctcctcctgtcaccccccccgcctctgccccaggtccctcagctgcctagtgagggaaaatcaaccctcaacggcggcgtcctggaggagcatcatcattaccccaaccagtctaatactaccttattgcgagaggtgaagatcgagggcaagcccgaagcacctcccagccaatccccaaacccatccacacatgtctgttctccatctccaatgctaagcgagcgaccccagaataattgtgtcaatcgaaatgacatacagaccgctggcacaatgacagtccccctgtgttcagagaaaacaagacccatgtctgaacatctaaagcacaatccacccatctttggatcttctggtgaactgcaggataattgtcagcagctcatgcggaataaggaacaggaaattctgaaaggtagggacaaggagcagacacgggatttggtacccccaacacagcactacttgaagcccgggtggatcgagctgaaggcaccacggttccatcaggccgagagccatctaaagagaaatgaagcaagtctgccctcaatcttacagtatcaacccaatctttctaatcaaatgaccagcaagcaatataccggtaattctaacatgcccggaggcctcccgcggcaggcctacacccagaagactacacagcttgagcacaagagccagatgtatcaagtcgagatgaaccagggccaatcgcagggcaccgtcgaccagcacctgcagttccaaaagccgtcccaccaggtgcacttctccaaaaccgaccatctccccaaggcccacgtgcagagcctgtgtggtacccgattccactttcagcagagagccgactcacagactgagaagctgatgtcacctgtgctgaaacaacatctcaaccagcaggccagtgagaccgagccctttagcaacagtcatcttctccaacacaaaccgcacaaacaggcagcccaaacccaacccagtcagagctctcatttgccccaaaaccaacagcagcagcagaagctgcagattaagaataaagaggagattctgcagacattccctcacccgcagagcaataacgaccagcagcgagaaggaagtttcttcgggcagaccaaggtggaggagtgctttcatggggagaaccagtactctaagagtagcgagtttgagacccacaacgtacagatggggctggaggaggtacagaatattaatcggaggaactctccctattcccagacaatgaagtcatccgcatgcaagattcaagtatcatgtagcaacaatacccacctggtatctgaaaataaggagcagaccacacaccccgagctctttgctggcaataagacccaaaacttgcatcacatgcaatatttccctaacaacgtgattcccaaacaggacttgcttcacaggtgctttcaggagcaggagcagaagagccagcaggcctctgtactacagggctacaagaacaggaatcaggatatgagtggccagcaggcggcccaactcgcacagcagcggtatctcattcataatcacgctaatgtgtttccagtaccagatcagggagggtcccatacgcagaccccaccccagaaagacactcagaaacacgcagccctccgatggcacctcctacaaaagcaggaacagcagcagacccaacagccgcaaaccgaatcttgtcactctcagatgcacaggcccataaaagtggagccaggttgtaaacctcatgcctgcatgcacactgcgcctccagagaacaagacctggaaaaaggttaccaaacaagagaacccccctgcctcctgtgataacgtgcagcagaagtccatcatcgagaccatggagcagcacctgaagcagtttcatgccaagagcctatttgatcataaggctttgacgttaaaaagccaaaagcaggtgaaagtcgaaatgagtggtccagtcaccgtgcttaccagacaaaccaccgccgctgagctagattctcacaccccagcactggagcagcagaccacctcctcagaaaagacgccgaccaagagaacggctgcctcagttctgaacaatttcatagaaagcccatcgaagctgctggacactccaatcaagaacttacttgacaccccggttaagacacagtatgatttcccatcttgtcggtgcgtgggaaagtgtcagaagtgtaccgagacccatggagtctaccccgaactggcaaatctctctagtgacatgggattctcattttttttctag

SEQ ID NO: 26596 - DNA, 333 bp, synthetic construct
  misc_feature 1..333: note = Description of Artificial Sequence: Synthetic coding sequence
  source 1..333: mol_type = other DNA
atggagcaggaccggaccaaccacgtggagggcaaccggctgagcccattcctgatcccctctcctcctatctgtcaaacggagccactggctaccaagctgcagaatggcagtccactgcctgagcgcgcccaccccgaggtcaacggcgacactaaatggcactcattcaagagctactacggaattccttgtatgaagggatcacagaattccagggtgagtcctgatttcacacaggagagccgtggttacagcaagtgtctgcagaatggtgggatcaagagaactgtctctgaaccttctttgagtggactccttcagattaaatag

SEQ ID NO: 26597 - DNA, 1914 bp, synthetic construct
  misc_feature 1..1914: note = Description of Artificial Sequence: Synthetic coding sequence
  source 1..1914: mol_type = other DNA
atggagcaggaccggaccaaccacgtggagggcaaccggctgagcccattcttaattccctcaccaccgatttgtcagacagagccgctagccaccaagctgcagaacgggtcccccctgcctgaaagagcacatcccgaggtcaatggagacacaaagtggcattcattcaaatcatactatgggatcccctgcatgaagggttcacaaaattctcgcgtgtctccagacttcacccaggaaagcaggggctactcaaaatgccttcagaacgggggaatcaaaaggaccgtttcagagccgagcctaagcggcctgttacagatcaagaagctaaaacaagatcagaaagcaaacggcgagcggaggaactttggggtgagtcaggagcgcaaccccggtgagtcctcacagccaaacgtatcagatctttccgacaagaaggagagtgttagtagtgttgcccaggaaaatgccgtaaaggactttacgagcttctccactcacaactgctcaggacccgaaaatcccgaactccagatattaaacgaacaagagggaaagtccgccaactatcatgataaaaacatcgttttgcttaaaaacaaagccgtcttgatgcccaatggagcgaccgtgtctgcctccagtgtggaacatacgcatggcgagttacttgagaagacccttagtcaatactatccggactgtgtatccatcgccgttcagaaaactacaagccacataaacgcgatcaatagccaggccaccaatgaactctcttgcgaaatcactcaccctagccatactagcggccagattaactctgcccaaacgtcaaactcagaactcccccccaagcccgccgcagtcgtgtccgaagcatgtgacgcagatgatgctgacaatgcgtccaaactcgcggcaatgttgaatacgtgttccttccaaaagcccgagcagctccagcagcaaaaaagtgtgtttgagatctgtccatcaccagcggaaaataacattcaaggaacaacaaaattagcatcaggtgaggaattctgttccgggtcttcttctaatctacaggccccaggcggctcttccgagaggtatctgaaacagaacgagatgaatggcgcctacttcaagcagtcctctgtgttcacgaaggactccttttcagccaccacaacacccccccctcccagtcagttgctgctgagcccacccccaccgctgccacaggtcccccaactgccctctgaaggaaagtcgactctcaatgggggcgtgctcgaggagcatcatcactaccctaatcagagtaacactaccctcctgcgggaagtcaagatcgagggaaaacctgaagcgccgccatctcaatctcccaacccttctacccacgtctgtagcccgtcacccatgttgtcagagcggccacagaataattgcgtcaacaggaatgatatccagaccgccggaactatgactgtgcccttgtgtagcgaaaagactcgcccgatgtctgagcatctcaagcacaatccacccatctttggctcaagtggagagttacaggataactgccagcagctcatgaggaacaaggaacaggagattcttaagggtcgcgacaaagagcagacccgcgacttggtacctcccacgcaacattacctgaagcctggttggatagagctgaaggctccacgctttcatcaggcagaatcgcacttgaagcggaacgaagctagcctcccatcaatcctacagtaccagcccaacctgagtaatcagatgacctctaagcagtacaccggcaatagcaacatgcctggtgggctccccagacaagcttacactcaaaagacaactcagctgtccactagccacaagtgtaccaagctcaagtag

SEQ ID NO: 26598 - DNA, 6009 bp, synthetic construct
  misc_feature 1..6009: note = Description of Artificial Sequence: Synthetic coding sequence
  source 1..6009: mol_type = other DNA
atggagcaggaccggaccaaccacgtggagggcaaccggctgagcccgttcctcattccgtcccccccaatttgtcaaacagaacctctcgctacaaagttacagaatggctctcccctgccagagcgggcacaccccgaagtcaacggcgatacaaaatggcactctttcaagtcttattacggcataccgtgtatgaagggttcccagaatagccgcgtgtcacctgatttcacccaagaaagcaggggctattcaaagtgcctccaaaacggcggcatcaagcgcactgtgtccgagcccagcctgtccggactcctccagattaagaagctgaagcaggaccagaaggcaaatggagagcggaggaattttggagtctcacaggagagaaatccaggcgaaagcagtcagcccaacgtgtccgacctgtctgacaagaaagagagcgttagctctgttgcccaagagaatgccgtgaaagactttaccagcttcagcactcataactgcagtggtcccgagaaccccgagctgcaaatcctaaatgaacaagaaggaaagtccgcgaactaccatgacaaaaatatcgttctattgaagaacaaagccgtcctaatgccaaacggggccacagtaagtgcctcaagcgtggaacacactcacggcgagcttttagaaaaaaccctttcacaatactacccagattgcgtgtctatcgccgtccagaagaccacatctcatataaacgctattaattcccaagcaacaaatgagttgtcatgcgaaattacacacccaagccatacgagcggccagatcaatagcgcacagaccagtaactcggagctgccacccaaacctgcagccgttgtttcggaagcttgcgacgcagatgatgccgacaacgcctcgaagctggcagcaatgctgaatacttgtagcttccagaaaccagagcagctgcagcagcagaaatcggttttcgagatttgtccatctccagccgaaaacaacattcagggaacaacaaagctcgcaagtggagaggagttttgcagtggaagctcatccaatcttcaggctcctgggggctcttccgaaagatacctgaagcaaaatgagatgaatggggcatattttaagcagagcagcgtgtttacgaaggatagcttttctgcgaccacgacacccccacctccttcccaactattactgagtccccccccacccttgccccaggtgccacaactgccatctgaaggtaaaagcacactgaacggcggcgtgctggaggagcaccaccattatccgaaccaatcaaatactaccctgctgcgcgaagtgaagatcgagggaaaacccgaggctcccccatctcagtcgcccaatccgtcaacacatgtctgttccccatcacccatgctctccgaaagacctcagaacaattgcgtaaacagaaacgatatccagaccgctggaaccatgacagtacccctgtgttccgaaaaaacccgccccatgtctgagcacttgaagcacaatccccctatttttggcagttccggagagctccaggataactgccagcagctcatgagaaacaaagaacaggagattttaaaggggcgagacaaggagcagacgagagatcttgtgccacctacccagcactacctcaaacccggctggatcgagcttaaggcccctaggttccaccaagccgagtctcacctaaaacgaaatgaggcctcgttgccctcaatcctccaataccagcccaacctttctaatcagatgacatccaagcagtacacaggaaatagcaatatgcccggcggcttgcctcgccaggcgtacactcagaagacgacccagctcgaacacaaatctcaaatgtaccaggtggagatgaaccaggggcagagccaggggaccgtagaccagcatctgcagttccagaagccaagccaccaggtgcatttctccaagacggatcatctgcccaaggcccacgtccagtcactctgcggcactagatttcactttcagcaaagggccgatagccagaccgagaagctgatgtcccctgtgctgaagcaacatctaaatcaacaagcatcagagaccgaaccattctctaactcgcatctcctgcaacacaaaccacacaagcaggcggctcaaacccagccctcccagtctagccacttaccgcagaaccagcagcagcagcagaagctgcagattaaaaacaaggaagagatcctccaaacattcccacatccccagtctaataacgaccagcagagagagggctccttcttcggacaaaccaaagttgaagagtgtttccacggcgagaatcagtactctaagagtagcgagttcgaaacgcacaatgttcagatggggcttgaggaagttcagaacataaaccgaaggaacagcccctatagccagacaatgaaatccagtgcctgtaagatacaggtctcttgtagtaataacacacacctggtctccgaaaataaggagcagactactcatcctgagctcttcgcaggtaacaaaactcagaaccttcaccatatgcagtatttcccaaacaacgtcatacccaagcaggacctgctgcatagatgtttccaggagcaggaacagaaaagtcaacaagcgtccgtgctccaaggctacaaaaacaggaaccaggatatgagtggccaacaggccgcgcaattagctcagcagcgttatttgatacacaatcacgcaaacgtgtttccagtaccggatcagggaggcagccatacacagacccccccacaaaaagatactcagaagcacgcagctctgcggtggcatctcctccagaagcaggagcaacagcagacacagcagccacagaccgagagctgccactctcagatgcatcgccccatcaaggtggagcctggctgcaagccacatgcatgtatgcacaccgccccacctgagaacaagacatggaaaaaagtcacgaagcaggaaaacccccccgcctcctgtgacaacgtgcagcagaaatccataattgagaccatggaacagcatcttaagcagtttcacgcgaagtctcttttcgaccataaagcactcactctcaagtcccagaagcaggtcaaggtggagatgtcaggcccagttaccgtgctgaccagacaaacaaccgctgctgaactggatagccacactcctgccctcgagcaacagacaactagctccgaaaaaactcctacaaagcgcacagccgcctcagtactgaacaattttattgagtcacctagtaagctgctggacacccctataaagaacttgctcgacacccctgtgaagacacagtacgattttccttcctgtcgctgcgtcgagcagattattgaaaaagatgaggggccattttacactcacttaggtgcaggcccgaatgtcgcggccataagggaaataatggaagaacggttcggacagaagggtaaggccattcggattgaacgtgtcatatacactgggaaagaaggtaagtcctcccaggggtgcccaattgcaaagtgggttgttagaaggtcatcctcagaagagaaacttctgtgcctggtgagggaaagagctggccatacctgcgaggcggctgttatagtaattctgattttagtctgggaaggaatccctctatctctggccgacaagctctatagcgaattgaccgaaacactccgcaaatacggtacactgactaacaggagatgcgcgttgaacgaagagaggacttgtgcatgccagggtctcgaccccgagacttgtggcgcgtcgttcagctttggttgtagctggagcatgtactacaatggatgcaagtttgcccgatctaagatcccgaggaaatttaaactgctgggggacgaccccaaggaagaggagaagcttgagtcccacctgcagaacctatccactctgatggctcctacttataaaaagctcgctcctgacgcatacaacaatcagatagagtacgaacacagagctcccgaatgccggctgggacttaaagaggggaggccattcagcggagtgactgcttgcctggacttctgcgcccacgctcaccgtgatttgcataacatgcaaaatggttctaccttagtctgcactctgactcgggaggacaatcgggaatttggggggaaacccgaggatgagcaactgcatgtactccctctctataaggtcagcgatgtcgacgaatttggcagcgtagaggctcaggaggagaagaaaaggtctggtgcgatccaggtgttgtctagttttagacggaaggtacggatgctggccgagcctgtcaaaacttgtagacagcgcaaactggaggctaaaaaggcggccgctgagaagttgtcaagcctcgagaattccagcaacaagaacgaaaaagaaaaaagcgccccttctaggaccaagcagaccgaaaacgctagtcaggccaagcagttggcggaactactgcgactgtcgggacccgtgatgcagcagtcccagcagccccagcccctccagaagcagcctccgcagccccaacagcagcagcgtccacagcaacagcaaccacaccatccacagacagaatctgtcaactcctattcagcctccgggtccaccaatccatacatgaggcgtccaaaccctgtgagcccctatcctaattcttcccataccagcgacatttatgggtctacctccccgatgaatttctactctacgtcatcccaggccgccggctcatacttaaactcaagcaatcccatgaatccataccctggtctgctgaaccagaacacacagtaccctagttaccagtgtaatggtaacctgtctgtcgataactgtagtccatatctcggttcctacagccctcagtcgcagcctatggatctgtacaggtatccgtctcaggatcccctgtcaaaattgagtctgcctccaatccataccctgtaccagcccaggtttgggaatagccaatccttcacttccaaatatctggggtatggtaaccagaacatgcaaggtgacgggttttcatcctgtaccatccggcctaatgtgcatcatgtgggcaagctgcctccatacccaacccatgagatggatggccatttcatgggcgcaacttcccggctaccgccaaatcttagtaatccaaatatggattataagaatggagagcaccactctccatcccacataatccataattactccgctgcccccgggatgtttaactccagtctgcatgccctccatctgcagaacaaagaaaatgatatgctcagtcatactgcaaacggcctgtccaagatgttgccagcattgaaccacgataggaccgcatgcgtgcagggcggtcttcataaactaagcgatgcaaacgggcaggaaaagcagccactggccttggttcagggcgtggcaagtggcgccgaggacaacgatgaggtttggtcagattctgaacagtctttccttgacccagacatcggcggtgtggccgttgctccaacccatggttctatccttatcgaatgtgccaagagggaactgcatgctaccaccccattaaaaaacccgaataggaaccacccaactcggatatcacttgtcttctatcagcacaaaagcatgaacgagcccaagcacggcctcgccctctgggaagccaagatggccgagaaagctagggagaaggaggaggagtgtgaaaaatacgggcctgattatgtgccacagaagtcgcatggcaaaaaggtcaagcgcgaaccagccgaaccgcatgagacatctgaacccacatatctgcgctttataaagagcctggcagaacgaaccatgtctgttactaccgactctaccgtcacgacaagcccctatgcattcacaagggttaccggaccatacaatcgctacatctag

SEQ ID NO: 26599 - DNA, 3585 bp, synthetic construct
  misc_feature 1..3585: note = Description of Artificial Sequence: Synthetic coding sequence
  source 1..3585: mol_type = other DNA
atggagcaggaccggaccaaccacgtggagggcaaccggctgagccccttcctgataccttctccacccatctgtcagacggagccgctggcaacaaagctgcaaaatggctcccccctgcctgagcgcgcccaccccgaagtgaatggcgacaccaagtggcactcattcaagtcctattacgggatcccctgcatgaagggatcacagaactcgcgcgttagtccagacttcacccaggagtccagggggtatagtaaatgtctgcagaacggcggtattaagagaacagtgtctgagccatccttaagcgggctactgcaaatcaaaaagctaaagcaggaccagaaggctaatggtgaacgcagaaattttggagtaagccaggagaggaaccctggagagtctagtcagcctaatgtgagtgatctgtcggataagaaggaatccgtgtcctccgtggcccaggaaaatgctgtgaaagacttcaccagcttctctacccacaactgttccggcccggaaaaccccgagctgcagattctcaacgaacaggagggtaagtccgccaactaccacgacaagaatatcgtcctcctcaagaacaaggcagttctcatgcccaatggggccacagtctctgctagctcggtggagcacacccatggggagttgcttgagaagacactgtcacagtactaccccgactgcgtgtcaatcgcagtacagaaaacaaccagccacattaacgctattaacagccaggctaccaatgagcttagctgtgagatcactcatccaagccacacctccggccagataaattcagcacagacatcgaacagtgagctgcctccaaaaccggctgcggtggtcagcgaagcctgcgacgcagatgacgccgacaacgcaagtaagctggcggccatgctaaatacatgtagttttcagaagcctgagcagctgcagcagcagaagtccgtctttgaaatctgccccagtcctgcggaaaacaacattcaggggaccaccaagctcgcgtctggggaagagttctgcagcggtagcagttccaacctccaagctccgggcggttcctctgagaggtatctgaaacaaaacgagatgaacggggcctatttcaagcagagttcagtgtttaccaaggactcctttagtgccaccactacgcctcctcccccctctcagctgctactaagtccccccccgccattgcctcaagtaccacaattgccaagtgaggggaaatctactcttaacggtggcgttctggaggagcatcatcattaccctaatcagtcgaacaccaccctgctaagagaggtgaaaattgagggcaagcccgaggctccaccttctcagtctccgaacccctctactcacgtgtgtagtccctcacctatgcttagcgagcgtccccaaaacaactgcgtgaaccgcaatgacatccagacagccggtactatgactgtaccactttgcagcgagaagactagacctatgagtgagcacttgaagcacaatccccctatctttggatcatcaggcgaactccaggataactgccagcagctgatgcgaaacaaggagcaagagattctcaaggggcgtgacaaagagcagactcgtgatctcgtgccccccacccagcattatctgaaaccagggtggattgaactgaaggcccccagatttcaccaggccgagtctcatctcaaacgaaacgaggcctctctgccatcgatcttgcagtaccagcctaacctgtcaaaccagatgacatccaagcaatatactggtaattccaacatgcccggtggcctgcctcgccaggcctatacccaaaaaaccacacaactcgagcacaaatcccagatgtaccaggtggagatgaatcagggtcagtctcaggggaccgtggaccagcatctccagttccagaagcccagtcatcaagttcactttagtaagactgaccatttacccaaagctcacgtccagtctctatgtgggacgcgctttcactttcagcagagggccgatagccagacagaaaagttgatgagtccagtgctgaagcaacacttaaatcagcaggcaagcgagaccgaaccattttctaattctcacttgcttcagcacaagcctcacaagcaggcagcccaaacccaaccatctcagtctagccacctgccacagaatcagcaacagcagcagaaactgcagattaagaacaaggaggagatactccagactttccctcatccacagagcaataacgaccagcagagggagggctcattttttggccagaccaaggtcgaagagtgttttcacggcgagaaccaatattccaaatcttctgagtttgagacccacaatgtccagatgggtctggaggaagttcaaaatatcaatcggcgcaattccccttacagtcaaacgatgaaaagctctgcctgtaagatccaggtgtcctgctcaaacaatactcacctggtgtctgagaataaagaacaaaccacgcatccagaattgttcgccggtaacaagacacagaacctgcatcacatgcagtactttccgaataacgtgatccctaaacaggacctattacatcggtgcttccaggagcaggaacagaagtctcagcaggcctcggtacttcagggttacaaaaataggaaccaggacatgtcagggcagcaggccgctcaacttgcccagcaacgctatctgattcataatcatgcgaacgtgtttcctgtccctgaccagggtggtagccatacgcagacacctcctcagaaggatactcagaaacacgccgctcttaggtggcatctgctccagaagcaggaacaacagcagactcagcagccacagactgaaagctgtcactctcagatgcatcgaccgatcaaggtggaaccaggatgcaaaccacacgcatgcatgcatacagccccgcccgaaaataaaacatggaagaaggttacgaaacaggagaatccgcccgcttcctgtgacaatgttcaacaaaaaagcataattgagacgatggagcagcatctgaagcagttccatgccaaatctttatttgatcataaggccctgacactgaagagccaaaagcaggtcaaagttgagatgtccggcccggtcaccgtattgactcggcagacgacagctgccgaactcgacagccacaccccagctctcgaacaacagacgacatcaagcgagaaaacccccactaagcgcaccgctgcaagtgtcctcaataactttattgagtcaccctcaaaattgctggatacccctataaaaaacctcttggatacaccagtaaagactcagtacgacttcccaagctgccgatgcgtcgggttggacaggcgagtcaagctcctcggtctgaaagaatccagtatcctggttaagaaagccaaagtgctgagggacgtgctgctcctgagcggctggttcgctgaagccgccgttaaaaggagttattgtgtctggtgcggaagtgaactggccactcctgtgcgccttcagtag

SEQ ID NO: 26600 - DNA, 6072 bp, synthetic construct
  misc_feature 1..6072: note = Description of Artificial Sequence: Synthetic coding sequence
  source 1..6072: mol_type = other DNA
atgatccaggaggagcagatccagctggagggcagcctggtggacggaccagaggccagcctgatggagcaggacagaaccaaccacgttgaggggaacagactcagtccatttctgataccatcacctcccatttgccaaacggagcctctggcaactaagctgcagaacggctcacctcttcccgagcgagctcatccagaagtcaacggagacaccaagtggcactcattcaagtcttattacggcatcccttgcatgaaagggtcacagaattcgcgcgtgtcccctgattttactcaagagtctagagggtactccaagtgcctgcagaacggaggcatcaagagaactgtgtctgaacccagcctgagcgggctactccagattaaaaaactcaaacaggatcagaaggcgaatggagagagacggaacttcggggtcagccaggaaaggaatcccggcgagagctcccagccgaatgtgtccgacttatcggacaaaaaggagagtgttagctccgtagctcaagagaatgccgtcaaggactttacatctttttcaacccataactgctcgggaccagaaaacccagagctgcaaatattgaatgaacaagagggcaagtccgcgaactatcatgacaaaaacatcgtgctcctgaaaaacaaagctgttctaatgcccaacggagcaacagtgtcagcaagctctgttgagcacactcatggcgaactcctcgagaaaactctctcgcaatactacccagattgcgtctctatagccgtccagaaaactacaagccacattaatgcaatcaactcacaggctactaatgagctctcttgtgagatcacacaccctagccacacctccgggcaaataaacagcgcccagacgtcaaatagcgaactgccacccaagccagccgccgttgtatccgaggcctgtgacgcagatgatgctgacaatgccagcaagttggccgcaatgctaaatacttgcagcttccagaagcccgagcagctgcagcagcagaagagcgtgttcgagatttgtcctagtcccgccgagaataatattcagggcacaaccaaactggctagtggggaggaattctgctctgggtcaagctccaacctccaagcaccaggtggttcatcagagcgctaccttaagcagaacgaaatgaatggagcctactttaagcagtctagcgtattcaccaaggattccttttccgctacaacaactccaccacctccatcacagctgttactctcaccgcctcccccactcccccaggtgcctcagcttccgtccgaaggcaaaagtactcttaacgggggtgtccttgaggagcatcaccattaccccaaccaatcaaacaccacactcctacgggaagtgaagatcgagggcaagcctgaggctcctccttcccagagccctaacccctcaacccacgtttgtagtccctccccaatgttaagtgaacggccgcagaataactgcgtcaatcgcaacgatattcagactgccgggactatgactgttcccctctgtagtgagaaaacacggccgatgagtgagcatctcaaacataaccctcccatcttcggatcttccggagagctgcaagacaactgccagcagcttatgcggaacaaggagcaagaaattcttaagggacgggataaagaacaaaccagagacctggtgccccctacacagcactatctgaaacctggctggatcgaactgaaagctcctcgctttcatcaggctgaaagtcacttgaagaggaatgaggcctctctgcccagtatcctgcagtaccagcccaatctgtctaaccagatgacctcgaaacagtacacaggcaattctaacatgccgggcggactgcccagacaagcttatacacagaagacgacacagctggaacacaagtctcagatgtatcaggtggagatgaatcagggtcaatcacagggaacagtggaccagcacttgcagttccaaaagcccagtcaccaagtccatttttccaagacagatcatttaccaaaggctcatgtgcagtcgctttgcggcacgaggtttcacttccagcagcgtgccgactctcagactgagaagcttatgtcacctgttctgaagcagcaccttaaccaacaggcatctgagactgagccatttagtaactcccacttgcttcagcataaaccacataagcaagccgcacagacacaaccatctcagtcctcccacctgccacagaaccaacagcagcaacagaaattacaaataaaaaacaaagaagagatcttgcagacctttccccacccccaaagcaataacgatcagcagcgggagggcagctttttcggacagacaaaagtcgaagaatgcttccatggtgaaaatcagtattctaagagctcagagttcgagacccacaatgtgcaaatgggcctcgaagaagtccaaaatattaaccgccgcaactctccttacagtcagaccatgaagtcctctgcgtgcaaaatccaagttagctgttcgaacaatacacacctggtgtccgagaacaaggaacagacaactcatccagagctgttcgcgggcaacaagacacagaacctacaccacatgcagtacttccccaacaatgttatcccaaaacaagatcttctccatcgctgcttccaggaacaggagcagaagtcgcagcaagctagcgtcctccaggggtacaagaatcgaaaccaggatatgtccgggcagcaggctgcccaactggctcagcaacggtaccttattcacaaccatgccaacgtgttcccagtgccagatcagggaggcagtcacactcagactcctcctcagaaggatactcaaaaacacgctgctctgcggtggcatctgctgcagaaacaggaacagcagcaaacacaacaaccccagacagagtcctgtcatagccagatgcatagacctatcaaggtggagccaggctgcaagccgcatgcttgcatgcacactgcaccccccgagaataaaacctggaagaaggtcactaaacaggaaaatcctccagcctcttgcgacaacgtacagcagaaaagtatcatcgaaacaatggagcagcacctcaaacagttccatgccaaatcgctgttcgatcacaaagctctgactctcaaatcacagaaacaagtgaaagtggagatgagcggacccgtgacagtcctgactcgtcagacgaccgctgctgagctggattcccatacacccgcgctggaacagcagaccacaagctcggagaagacaccaacaaaaagaactgctgctagtgtcctgaataactttatcgagtcaccaagcaaactattggacacccccataaagaacttattggacactccagtcaagacgcagtatgatttcccgagctgccgctgcgtggagcagattatcgagaaagatgaaggcccgttctatacccatttgggcgcgggtcccaatgtcgcggcaatcagagagataatggaggagcgcttcggtcagaagggcaaggccatacggattgagcgtgttatttacaccggcaaggaaggcaaatcgagtcagggatgccccatagccaagtgggtggttcgccggagctcatccgaggagaagctgctgtgcctcgtgcgagagagagccgggcacacctgcgaggctgccgttatcgtgattttaattttagtatgggagggaattcccctaagcctcgcagacaagttgtattccgagctgactgagactcttaggaaatacgggactctaaccaacaggaggtgcgctttgaatgaggagcgtacctgtgcctgtcaggggctggacccagaaacgtgtggtgcctcattttcattcggctgtagctggtccatgtactacaatggttgcaagttcgcgcggtccaaaattccccggaaattcaagctgctgggagatgatcccaaagaggaagagaagcttgaatctcacttgcagaacctgtccaccttgatggccccgacctacaaaaagctggcacctgacgcttataataaccaaattgagtatgagcacagggccccagagtgccggttgggccttaaggagggccgcccattcagcggcgttacggcctgtctggacttctgcgcccatgcccacagggatttgcacaatatgcagaacgggtctacgctcgtgtgcacgctgacaagagaagataaccgcgaattcggtggaaagcccgaagatgagcagctgcacgtattaccactatataaggtgtccgatgtagatgagttcgggtccgtggaagcacaagaggagaagaaaagaagtggcgccattcaggtcctctcttccttcagacgaaaagtcaggatgctagcagagccagttaagacatgtaggcagcggaaactggaggcgaagaaggcagccgcggaaaagttaagttctttagagaatagctccaacaagaacgagaaagagaagtctgccccgtcccgcacaaagcagacagagaatgcctcccaggccaagcagctggctgaacttctgcggctgtcgggccctgtaatgcagcaatcgcagcagcctcagcccttgcaaaagcagccccctcagcctcagcagcagcagcgcccacagcagcagcaaccgcatcatccccaaaccgaaagcgtgaactcctattccgcctccggatccacaaatccatatatgcggcgacctaacccagtgtctccttatcctaattcgtcacatactagcgacatttatgggtctacatctcctatgaacttttattcaacatcctctcaagcagcaggcagctatctcaattccagtaacccaatgaacccataccccggtctgctcaaccaaaacacccagtatccgagctatcagtgcaacggaaacctttccgtcgacaactgctctccctatctgggcagttatagccctcaatcccagcccatggacctgtatcgctatccttcccaggaccctctgtcaaagctgtcattgcctcccattcataccctgtaccagccaaggtttggaaatagccaatcatttacctcaaagtaccttgggtatggaaaccagaacatgcaaggggacggttttagctcgtgcaccatccggcctaacgtgcaccacgtcggtaaattgccaccgtatccaacccacgaaatggatggccacttcatgggcgcgaccagcaggttgccgccaaatctgagcaacccaaacatggattataagaacggcgagcatcacagccctagccatatcatccacaattacagtgctgcacctggtatgtttaactcctctttacacgcgctgcatttgcagaataaagagaacgacatgctgtcacataccgcgaatggactgagcaagatgctccctgccctaaaccacgacaggactgcttgtgtgcaggggggtttacataagctcagcgatgccaatggtcaggaaaagcagccgctggccttggtgcagggggttgcaagcggagcagaggacaacgatgaggtgtggtcggattcagaacaaagctttctggaccccgacataggcggcgtggctgttgctcctacccacggttccatcctcatcgagtgtgccaagcgcgagctacacgcgaccacgcctttaaaaaacccaaatcgcaaccaccccacaaggataagcttggtcttctaccaacataaatcaatgaacgagcctaagcatggactagctctgtgggaagcaaagatggctgagaaagcgcgggaaaaagaggaagaatgcgaaaagtatggccccgactacgtgccacagaagtctcacgggaaaaaggtcaaacgggagccagcggagcctcacgagacttcagagcccacttacctgagattcattaaatcactcgcagaaagaacaatgtccgttaccacggactccacagtgacaacatctccttatgctttcacacgtgttaccggcccatataatcggtacatttag

SEQ ID NO: 26601 - DNA, 615 bp, synthetic construct
  misc_feature 1..615: note = Description of Artificial Sequence: Synthetic coding sequence
  source 1..615: mol_type = other DNA
atggtgtgcggcggcttcgcctgcagcaagaactgcctgtgcgccttaaatctgctatacaccctggtgtcattattgctgatcggtattgcagcctggggaatcggttttgggctgataagctctctaagagttgtgggtgtggtgatcgccgtgggtattttcctgtttctgatcgcgctggtcggcttgattggcgccgtgaagcaccatcaagtgctgttatttttctacatgatcatcctcttactcgttttcatcgtgcaattctcagtttcatgcgcgtgcctggcgctgaaccaggagcagcaagggcagcttcttgaggtgggctggaacaacacagcctcagcccgaaacgatatacagcgcaatttgaactgctgtggattccggagcgtgaaccccaatgatacctgcttagcctcatgtgtgaaatctgatcatagctgctccccctgcgcgcctataataggagaatatgcaggggaagtactccgatttgtcggcgggatcggtttgttcttttccttcacggagattctgggcgtctggttaacctaccgataccgtaaccaaaaggatccccgcgctaacccctccgcgtttctctag

SEQ ID NO: 26602 - DNA, 738 bp, synthetic construct
  misc_feature 1..738: note = Description of Artificial Sequence: Synthetic coding sequence
  source 1..738: mol_type = other DNA
atggccagccccagccggcggctgcagaccaagcccgtgatcacctgctttaaatcagtgctactcatctacacatttatcttctggattaccggtgtgatcctactcgccgtcggtatctgggggaaggtgtccttggagaattacttttctctcctgaatgaaaaggcaacaaatgtgccgttcgttctcatcgccacagggaccgttatcatcctgttgggcactttcggatgtttcgctacctgccgtgcatctgcttggatgttgaagctctacgcgatgttcttgacgctcgttttcctggtcgaacttgttgcagcaattgtgggttttgttttccgccacgaaatcaagaattccttcaagaataattacgaaaaggctctgaagcaatataacagtaccggtgattatcggagtcacgcggtcgataagattcagaataccttgcactgctgtggagtcacggactacagggattggaccgacaccaattattattctgagaaagggttcccaaaatcatgttgcaaactagaagactgcactcctcagagggatgctgacaaggtcaataacgaaggctgctttatcaaggtgatgaccatcatcgagtctgaaatgggagttgtggctgggatctcctttggcgttgcctgcttccaactgatcggaatattcctggcctattgtctttcaagggcaattaccaataaccagtacgagatagtgtag

SEQ ID NO: 26603 - DNA, 684 bp, synthetic construct
  misc_feature 1..684: note = Description of Artificial Sequence: Synthetic coding sequence
  source 1..684: mol_type = other DNA
atggccagccccagccggcggctgcagaccaagcccgtgatcacctgtttcaaaagcgtgcttctgatctacacatttattttctggatcactggggtcattctgttggcggtcggtatttggggcaaagtgagcctagaaaactacttttcactgctgaacgagaaggcaactttcggttgtttcgccacttgtagagcctccgcttggatgttaaaactctacgcaatgttcctaacccttgtctttctagtcgagcttgtcgctgccattgtaggtttcgtattcagacatgagatcaaaaattcttttaaaaataactatgaaaaggccctgaagcagtacaattcaactggcgactatcgctctcacgccgtagataaaatacagaatacactgcactgctgtggtgtaaccgattaccgcgattggaccgatactaattactatagtgaaaaaggatttccgaagtcctgctgtaaactggaagactgtactccgcagagggacgccgacaaagtgaacaatgaggggtgttttatcaaggtcatgaccatcattgagtctgaaatgggagtggttgcaggaatttctttcggcgtggcttgcttccagctcattggaatatttctagcttactgtctttctcgggctatcaccaataaccaatacgaaatcgtttag

SEQ ID NO: 26604 - DNA, 669 bp, synthetic construct
  misc_feature 1..669: note = Description of Artificial Sequence: Synthetic coding sequence
  source 1..669: mol_type = other DNA
atggagcggaagggcagcgccgccggcgccaagggcaaccccagccccccggccgcaggtgaaggccaaagaccccctcctcctctctgtgttccggggggcgggggaggtgccccggccagagggcaagtaggtgcagcggctgagcccgccgaattgatccgccgtgctcatgagttcaagagtcagggagcccaatgttacaaggataagaagttccgggaagctattggaaaataccatagggcactcctcgaactgaagggacttctcccaccgccgggcgagcgggagagggatagtaggccagcttcccctgccggggccctgaaacccgggcggctcagtgaggaacagtccaagactgtcgaggcaatcgaaattgactgttataatagtttggccgcctgtttgctccaggctgaacttgtcaactacgagcgagtgaaggaatactgcctgaaagtgctgaaaaaagaaggcgaaaatttcaaggccttgtatagatctggagtcgccttttaccacctgggagattatgacaaggctctgtactatttaaaggaagccaggactcaacagcctaccgatacaaatgtcattcggtacatacagctcaccgagatgaagctcagtaggtgcagccagagggaaaaagaagctatgtag

SEQ ID NO: 26605 - DNA, 258 bp, synthetic construct
  misc_feature 1..258: note = Description of Artificial Sequence: Synthetic coding sequence
  source 1..258: mol_type = other DNA
atggtgaagcagatcgagagcaagaccgccttccaggaggccctggacgctgccggtgataagttggtcgtagttgacttttcagctacctggtgtggcccgtgtaaaatgataaaaccattttttcacgatgtagcatccgaatgtgaagtcaagtgcatgccgaccttccaatttttcaaaaagggacagaaggtgggcgagttttctggagccaacaaagaaaaattagaggctaccataaacgagctcgtttag

SEQ ID NO: 26606 - DNA, 318 bp, synthetic construct
  misc_feature 1..318: note = Description of Artificial Sequence: Synthetic coding sequence
  source 1..318: mol_type = other DNA
atggtgaagcagatcgagagcaagaccgccttccaggaggccctggacgcggctggtgacaagctggtggtggtggacttctctgccacttggtgtggcccttgtaaaatgattaagcccttcttccactcgctcagcgagaaatatagcaacgtaatatttctggaggtcgatgtggatgattgtcaagatgttgcctctgagtgtgaagttaagtgtatgccaaccttccagtttttcaaaaaaggccaaaaagtgggggaattttccggcgcaaataaggagaagctggaggctacaataaatgagctggtatag

SEQ ID NO: 26607 - DNA, 1176 bp, synthetic construct
  misc_feature 1..1176: note = Description of Artificial Sequence: Synthetic coding sequence
  source 1..1176: mol_type = other DNA
atggtgatgttcaagaagatcaagagcttcgaggtggtgttcaacgaccctgaaaaggtgtacggaagtggcgaaaaagtcgccggccgagtcatagtcgaggtgtgtgaggtgaccagggtcaaggctgtgcgaattctggcatgtggagtggccaaggttctatggatgcaaggctcccagcagtgtaagcagacctctgaatatctgcgctacgaggatacactgctgcttgaagaccagcccactggagagaacgaaatggtgattatgcgtcccggcaataaatacgagtacaagttcggctttgaactgcctcaggggcctctgggcacctctttcaaaggcaaatacggctgcgtagactattgggtgaaagcatttctcgacaggcctagtcagccaacacaggagactaagaaaaatttcgaggtcgtcgacctcgtggacgtcaatactcctgacttaatggcccctgtcagcgcaaagaaagaaaagaaagtcagctgtatgttcatcccagacgggcgggtttccgtgagcgcacgaatcgatcgaaaaggattctgcgagggagatgaaataagcatccatgcagacttcgagaacacatgcagccggatagttgtacctaaggccgcaatcgtcgctcgccatacttacttagctaatggtcagaccaaagtcctgacacaaaaacttagttccgttaggggcaatcacattataagtggtacatgcgcctcttggaggggcaaaagcctgcgcgtgcaaaaaatacgcccttcaattctcggatgtaacatccttcgggtggaatactcgctgctgatctacgtcagcgtcccgggctccaaaaaggtgattctggatctaccactggttattggatccaggtctgggctcagctcccgcacgagttccatggcttcacgcacctccagtgagatgtcctgggttgatttgaacatcccggataccccagaagcaccaccttgttacatggacgttatcccggaagaccaccggctcgaatcaccaactaccccacttcttgatgatatggacggcagccaggactccccaatctttatgtacgcccccgagtttaagtttatgcccccccccacttatactgaggtcgacccatgcattcttaacaacaacgtgcagtag

SEQ ID NO: 26608 - DNA, 1494 bp, synthetic construct
  misc_feature 1..1494: note = Description of Artificial Sequence: Synthetic coding sequence
  source 1..1494: mol_type = other DNA
atgaacggccccgaggacctgcccaagagctacgactacgacctgatcatcatcggtggaggcagcggaggactggcggcagctaaggaggccgcccagtacggtaagaaggtaatggtccttgattttgtgacaccaacccctttagggacaagatggggactcggggggacctgtgtgaacgtggggtgcatccccaaaaaactgatgcaccaggccgcgctgctgggccaggccctgcaggattcccgaaactacggctggaaagtggaagagaccgttaagcacgattgggacagaatgatcgaagcagtgcagaatcatatcgggtcactgaattggggctatagggtagccctacgcgagaagaaggtcgtatatgaaaacgcatatgggcagtttataggcccacaccggatcaaggcaactaacaataaaggcaaagaaaagatttattccgcggagagattcctgatcgctacaggcgaaagacccagatacttgggaatcccaggcgacaaggaatattgtattagttcagacgacctctttagcctgccctattgtcccggtaagacactggttgttggggcaagctatgttgccttggagtgcgcaggatttctggccggcataggattggatgtcactgttatggtgagatccatcttgctccggggctttgatcaagacatggcgaataaaataggggagcatatggaggagcatggcataaaattcatccggcagttcgtgccaatcaaggtcgagcagatcgaggcaggcacacctggtagactgcgggtggtagcacagagcactaacagtgaggaaatcatagagggagagtataatactgttatgttggctattggccgggacgcttgtacgagaaaaataggcctggaaacggtgggggttaagatcaatgaaaagacaggtaagataccagtcaccgatgaagaacagactaatgtcccatacatttacgccattggtgacattctcgaggacaaagtcgaattaacacccgtggctatacaggcaggtagactgcttgcacagcgcctttacgcagggtcgaccgtcaaatgtgattacgagaacgtgccaaccactgtcttcacccctctggagtatggggcttgcggtttgagcgaggaaaaagctgttgaaaagtttggagaggaaaacatcgaggtctatcactcttacttctggcctctggagtggaccattccgagccgcgataacaacaaatgttatgcaaagataatttgcaacaccaaagataacgaacgcgtggtcggcttccacgtgctaggccctaatgcgggagaagtgacacaagggttcgctgccgccctgaagtgtgggctcactaaaaagcagcttgacagtacaattggtattcacccggtgtgcgccgaggtcttcacaactctttcagttaccaaaaggtctggagccagtatcttacaggcaggatgctag

SEQ ID NO: 26609 - DNA, 1746 bp, synthetic construct
  misc_feature 1..1746: note = Description of Artificial Sequence: Synthetic coding sequence
  source 1..1746: mol_type = other DNA
atgcagcaggtgatgctgacctgcaagggcgtgaaccggggccacgcagtaccagctggcccagggaggaaaccccggccgagacgaagttcccgccttttagctggagagaaacatctgactaggtctgccctgttactttgccacaccgaggatggaagggcgttagaaggaaccctcagtgaattagctgcggagacagacctgccggttgtgttcgtgaagcaacgaaagatcggtggacatgggcctacactgaaagcttatcaggaggggcgcttgcagaaactcctgaagatgaatggtcccgaggacctccctaagtcctatgactacgacctcatcattataggaggcgggtccggtgggctcgctgccgcgaaggaagcagcccaatatggcaagaaagtgatggttctggattttgtgactccgacaccacttggcactcggtgggggttgggtggcacctgcgtgaatgtcggatgtatccctaaaaaactcatgcatcaagctgccttgttgggccaggccctgcaggacagtcgcaactacgggtggaaagtggaggagaccgtaaagcacgattgggaccggatgatcgaagctgttcagaatcatatcgggtcccttaactggggttatagagtcgctctcagagagaaaaaggtcgtgtacgagaatgcctatggccagtttataggcccacaccgcataaaggcaactaataacaagggtaaagaaaagatttacagcgcagaaagattcctgatagccacgggggagcgtccccgctacttgggcattccaggcgacaaggagtattgcatcagcagcgacgatttatttagcttaccatactgtcctggaaagacactagtcgtgggtgcttcatatgtggctctggagtgcgccgggtttctcgcaggaatcggattagacgtgaccgtgatggtgcggtcgatcctactgcgtggttttgaccaggatatggccaacaaaatcggtgagcatatggaagaacacggaatcaaatttattcgtcagtttgtgcccatcaaggttgaacagattgaagccggcacaccagggagacttcgggtggtggcacagagcaccaattcggaggaaatcattgaaggcgaatataataccgtcatgctagctatagggagggatgcatgcactcggaagatcgggttagagacagtgggcgtcaaaataaacgagaaaactgggaagatcccagtgacggacgaggagcagactaacgttccatacatctatgctatcggtgacattctggaagacaaggtcgagcttacgccagttgctatccaggctggtaggttacttgctcagcggttatatgctggatccaccgtaaagtgtgactacgagaacgttccaactaccgtgttcacacccctcgagtatggggcttgcggtctttcagaagagaaggcagtagaaaagtttggggaggaaaacatcgaagtatatcactcctatttctggcccctggagtggactataccctcccgtgacaacaacaagtgctatgctaaaatcatctgcaacaccaaggacaacgagagggttgtgggctttcacgtgcttggcccgaacgcaggggaagtaacccagggctttgccgcggccctgaaatgcggtctgacgaaaaaacaattagacagcactattggcatccatccagtttgcgccgagttttttagtttcatctag

SEQ ID NO: 26610 - DNA, 1650 bp, synthetic construct
  misc_feature 1..1650: note = Description of Artificial Sequence: Synthetic coding sequence
  source 1..1650: mol_type = other DNA
atgagctgcgaggacggccgggccctggagggcaccctgagcgagctggcggccgaaaccgacttgccagttgtctttgtgaagcagagaaagatcggcggccacgggcctacactgaaagcttatcaggagggaagactccagaagctcctgaagatgaatgggcccgaggatctgcctaaatcttatgactacgaccttattattatcggcggtgggagcggtggactcgccgcggcgaaggaagccgctcagtatggcaaaaaagtgatggtgctcgatttcgtgacccctaccccgctcggaacaaggtgggggctaggcgggacttgcgtgaacgtcgggtgtatcccaaagaagctgatgcatcaggcggcgctgctgggacaggctttgcaggacagccgtaattacggatggaaggtagaagagaccgtgaaacatgactgggaccgcatgattgaagctgtacagaaccacatagggtcgctgaattggggttacagggtcgcccttagggagaagaaggtcgtgtacgaaaatgcctatggccagtttatagggccacaccgtatcaaagcaaccaataataagggaaaggagaagatctactcggctgagcgcttcctgattgcgaccggagagagaccccggtacctgggaataccaggtgataaggagtactgtattagctcggatgatttatttagccttccctattgtcccggcaagacacttgtagttggagccagctacgtagctctcgagtgcgctggctttctcgcaggaattgggttggatgtgacagtcatggtccgctctatcttgctccggggtttcgaccaggatatggccaataaaattggagaacacatggaagaacacgggatcaagtttattcggcagttcgtgcccatcaaggtcgaacagatcgaggccggcacacccggaagactgcgcgtggtagcacagtctactaactccgaagagattattgagggggaatacaacactgtcatgctggcgattgggcgcgatgcatgcaccaggaaaatcggtctggaaaccgtgggagtgaagattaacgagaaaacagggaagatacctgtcactgacgaggagcagaccaacgtgccttatatctacgccataggagacattctagaagataaggttgaactcaccccggtggcaatacaggcaggaaggctcctcgcacagagactttatgcaggcagtaccgtcaagtgtgattacgagaatgtgcctaccactgtatttacccctctggagtacggggcttgtgggctgagtgaagagaaggccgtggagaagttcggagaagaaaatattgaggtatatcattcctatttttggcccctcgagtggaccatcccatcaagggataataataagtgctatgcaaaaatcatatgtaacacaaaagacaatgaacgggttgtcggatttcacgtactgggacctaacgctggtgaagttacccagggattcgcagccgcactgaaatgcggtttgaccaagaaacaactcgacagtacaatcgggattcaccctgtttgtgctgaggtgttcacgactctgagtgtaactaaacgttctggcgccagcatcttgcaggctggctgttag

SEQ ID NO: 26611 - DNA, 1626 bp, synthetic construct
  misc_feature 1..1626: note = Description of Artificial Sequence: Synthetic coding sequence
  source 1..1626: mol_type = other DNA
atgctgagccggctggtgctgaacagctgggcccaggccatcatccgaccaaggcctccaaaggtcctggggctgcaggtgactacattctctgaggcataccaggaggggcggctgcaaaaattacttaagatgaacggcccagaagatctgccaaaatcctacgactacgatttaattatcattgggggaggatccggaggactagccgccgccaaagaggccgctcagtacggcaaaaaagtgatggtgctagatttcgtgacccccactcccttaggaaccaggtggggtctgggagggacttgcgtgaatgtagggtgtattccgaagaaactcatgcaccaggcagccctcctgggccaggccctccaggatagcagaaactatggctggaaggtcgaggaaaccgtgaaacatgactgggatcgaatgatagaggccgtacagaatcacatagggtccttaaactggggctacagggtggctctgagagaaaagaaagtagtgtatgagaacgcttacggacagttcatcggtccacatcggattaaggccaccaataacaagggcaaggaaaagatttactctgcagagaggttcctgattgctacgggagaacggcccagatacttggggatccccggagacaaggagtactgcatttcctcagatgacctgttcagcctgccctactgccctggcaagaccttagttgtcggggcctcctacgtggcgctagagtgtgccggatttctcgccgggatcggcctggatgtcactgtgatggtccgcagtatcttactgcgaggctttgatcaggacatggctaacaaaataggcgagcatatggaggaacacggtatcaaattcatcagacagttcgtgccaattaaggtcgagcaaatagaagcagggacccctgggagactgcgcgtagtggcccagtccacaaattctgaggagataatagaaggagaatataacactgttatgttggcgattggcagagacgcatgcacccggaaaataggactggagaccgtcggagtcaagattaacgagaagaccggtaaaatcccagtcaccgacgaggaacaaaccaatgtaccttatatatacgccatcggggatattctcgaggataaagtggagctcacgcccgtggctatccaagcaggccgcctcctggcccagcgtttgtacgccgggagtaccgtcaaatgcgactacgagaacgtgccaacaaccgtgttcactcctctggagtatggagcctgtggcctgtccgaggaaaaagcggtggagaaattcggagaggaaaacattgaggtttaccatagctatttctggccattggagtggaccattccatccagagacaacaacaaatgctatgcaaagataatctgtaacacaaaggacaatgaaagggtcgtcgggttccacgtactggggccaaatgccggtgaggttactcaggggttcgccgcagcccttaagtgcgggcttacgaaaaagcagcttgactcaaccattggcatccaccctgtatgtgccgaggtgttcacgactctgtccgtcacaaagagaagtggtgcatctatactccaagctggttgctag

SEQ ID NO: 26612 - DNA, 1839 bp, synthetic construct
  misc_feature 1..1839: note = Description of Artificial Sequence: Synthetic coding sequence
  source 1..1839: mol_type = other DNA
atgcccgtggacgactactggctgtgcctgcccgccagctgcgcccgccccttcgtgcaaacagtccgagtagttcagtcttgtccacactgctgttggttccctggggtgctgcctagtgtgcctgagccacttcgcatgcccgccatgttgcccaccgggagtcactcggctgtcctgcccccaagtcattgtagtaccgcccctccgtcaacctcccaagagccgtctagtagcgcagacccgaagctttgtttgagcccaccaacctctgattcaagacaggagcggaatgtccagttcggcctggcttatcaggagggacgcttacagaaactgctcaaaatgaatggcccagaggatcttcctaaatcttacgattacgatctcataatcatagggggaggctcagggggcctggctgccgctaaggaagctgctcagtacgggaagaaggtcatggtattggactttgttactcccacgcctctcggcactcgctgggggctgggggggacctgcgtgaacgtgggatgcattccaaagaagctgatgcatcaagctgcactgctcggccaggcccttcaggactccaggaactacggatggaaagttgaggagacagtgaagcacgactgggataggatgatcgaggccgtccaaaaccatatcgggagcctcaactggggttatagagttgctctgcgggaaaagaaagtggtgtacgaaaacgcctacgggcagtttataggaccccataggatcaaggcgacaaataacaagggcaaggaaaagatctattctgccgaacgctttctcatcgccacaggcgaaagaccaagatacctgggcatccccggagacaaggagtattgtatctcgtctgatgacctgtttagcctaccatattgtcctggcaagaccctggtagttggcgctagctacgtggcattagaatgtgcgggcttcctggcgggaatcggcttggatgtcactgtgatggtacgctcaattctcctgaggggcttcgatcaggacatggccaacaaaattggcgagcacatggaagagcacggaatcaaattcatccgtcagttcgtaccgatcaaggtggagcaaatcgaggccggtactcccggacggctgagggtggtggcgcagtcaacgaatagcgaagagatcatcgaaggagagtacaacaccgtgatgcttgccattggtagagatgcgtgtacaaggaagattggcctcgaaactgtgggcgtgaagattaacgagaagacaggtaagattccagtcactgacgaggagcaaacgaacgtgccctacatttatgcaatcggcgatatcctggaagataaggttgaactgacacccgtagctatccaggctgggcgtttactggctcaaagactgtacgcgggcagcacagtgaaatgcgactacgagaacgtacctaccaccgtctttacacccctggagtacggagcttgtggcctttccgaagagaaagccgtggaaaagttcggggaagagaacattgaggtttaccattcctacttctggcctctcgagtggacaattccctcgcgagacaacaataagtgttatgccaagattatctgcaatacgaaggacaacgagcgtgtagtgggattccatgtgttagggccaaatgccggcgaggttacacaggggttcgccgctgctctgaaatgcggcttgactaaaaagcagctggattctacaattgggatacatcccgtgtgcgccgaagttttcacaacgctctccgtcactaagcgttccggcgcctcaattcttcaggcaggatgttag

SEQ ID NO: 26613 - DNA, 1944 bp, synthetic construct
  misc_feature 1..1944: note = Description of Artificial Sequence: Synthetic coding sequence
  source 1..1944: mol_type = other DNA
atgggctgcgccgagggcaaggccgtggccgccgccgcccccaccgagttgcagaccaaaggtaaaaatggagatggccgccggcggtccgccaaagaccaccaccctggaaagaccctgcccgagaacccagccgggttcactagcaccgccacagccgacagcagagccctgctccaggcctatattgacgggcattctgtagttatctttagccggtctacctgcactcggtgcactgaggtgaagaagttgttcaagtccctttgcgtgccctactttgttcttgagcttgatcagaccgaagacggacgtgcgctggagggtacgctctccgagctggctgccgaaacagatctgcccgtcgtctttgtgaagcagagaaagatcggtggccatggacccactttgaaagcttaccaagagggccgactgcagaagctcctaaagatgaacggtcccgaggacctacccaagtcgtatgactacgacttgattataattgggggcggatccggcggcctcgctgcagccaaagaggctgcccaatatgggaaaaaggtcatggtcctggactttgtaactcctaccccacttggtacacgctggggcctgggcggaacgtgcgtaaacgtcggatgtatccctaagaaactgatgcatcaggccgcgctgttagggcaagctctgcaggactcacgaaactatgggtggaaggtcgaggagaccgtcaaacacgactgggaccggatgattgaagcggtccagaatcacattgggtccctgaactggggttatcgggtcgcactaagggagaagaaagtggtttatgagaacgcatacggtcagttcataggtcctcataggatcaaggcaaccaacaataagggcaaggagaaaatctactctgcggaacgattcctaattgccactggcgagcggcccaggtatctcggaatcccaggcgataaagagtactgtatctcttctgatgacctcttttctctcccatactgccctggcaaaactctagtggtgggggctagctacgttgcccttgaatgtgccggatttctggccggaatcggccttgatgtcaccgtgatggtgaggtcaatcctactccggggatttgaccaggatatggctaacaagatcggagaacacatggaagagcatggcatcaaattcataaggcagtttgttcccattaaagtggagcaaatcgaagcagggactcccgggcgactccgtgtggttgcccagtcaacaaactctgaggaaattatagaaggtgaatataacacagtcatgcttgccatcggcagagatgcgtgcaccaggaaaataggcctcgaaacagtgggggtgaaaattaacgaaaaaactggaaagatccccgtaacagatgaggagcagactaatgttccatacatttatgctatcggagacattctggaagacaaggtggaactcacccccgtggctattcaggcgggacgtcttcttgcgcagcgtctctacgccggctctacagtgaaatgcgactatgagaacgtcccaaccactgtatttaccccgctggaatacggagcatgcggactctccgaagagaaggcagtggagaaattcggggaggagaacatcgaggtgtaccactcatacttttggcctctggagtggaccatcccatcgagagacaataacaaatgctatgctaagatcatttgtaacactaaggacaacgagcgcgtggtgggctttcacgtgctgggccccaatgctggagaggttacccagggattcgccgcagctctcaaatgcggtttgacaaaaaaacagcttgactctaccattggtatccaccccgtgtgcgcagaggtattcaccacattgtcggtcacaaagcgatcaggcgcatcaatcctgcaggccggttgctag

SEQ ID NO: 26614 - DNA, 1500 bp, synthetic construct
  misc_feature 1..1500: note = Description of Artificial Sequence: Synthetic coding sequence
  source 1..1500: mol_type = other DNA
  modified_base 1492: mod_base = OTHER; note = uracil
atgaacggccccgaggacctgcccaagagctacgactacgacctgattattatcgggggtggatccggggggctggccgccgcaaaagaagctgctcagtacgggaagaaagtgatggtgctggacttcgtgacacccaccccactgggcacccgttggggcctaggtggtacctgcgtaaatgtgggctgtattcctaagaaattgatgcaccaagccgcgttactcgggcaggctctgcaggattcacggaattacggatggaaggtggaggaaaccgttaaacacgattgggaccgaatgattgaagctgtgcaaaaccacatcggcagcctgaattggggctaccgggtcgccctaagggagaagaaagtagtttacgaaaatgcttacggtcagttcattggacctcaccgaatcaaagccaccaataataagggcaaagagaaaatctattctgcagagaggtttctcatcgccacaggtgaaaggccccgctacctggggattccgggcgataaggaatactgtatctcctctgatgatttgttctcccttccatattgcccaggtaagaccctggtggtaggggcgagctatgtggcacttgagtgcgccggatttctggccggcatcggtctggacgttacggtgatggtacggtctattttactgcggggctttgatcaggacatggcaaataaaatcggcgagcatatggaggagcatggtattaaattcatccgccagtttgtgcctattaaggttgagcagattgaggccggaaccccaggcaggctgcgggtcgtagcacaaagcaccaactctgaagaaatcatcgagggcgaatataacaccgtcatgctggctattggaagggacgcctgcactagaaagattggccttgaaaccgtgggcgtgaaaataaacgagaaaacgggcaaaatcccggtgaccgacgaggagcagaccaacgtaccatacatctatgcaatcggtgatattctggaagacaaggttgaacttaccccagtggcaatccaggcagggcggctcctagctcaacgcctatacgccggcagcactgtcaagtgcgattatgagaacgtgccaacaactgtgttcaccccactcgaatacggcgcctgcgggctgagcgaagaaaaagccgttgagaagtttggggaagaaaacattgaagtctaccacagttatttttggccactggaatggacaatcccttcccgtgataacaacaaatgctacgctaaaattatatgcaatactaaagacaacgaaagagtggtggggttccatgtactcggccctaatgctggagaagtcactcaaggttttgccgctgcgctgaagtgcgggcttaccaagaaacagctggatagcacgatcggtattcaccccgtgtgtgccgaggtcttcaccaccctgagtgtgacaaaaaggtcaggtgctagcatcctccaggcaggatgttgaggttag

SEQ ID NO: 26615 - DNA, 1500 bp, synthetic construct
  misc_feature 1..1500: note = Description of Artificial Sequence: Synthetic coding sequence
  source 1..1500: mol_type = other DNA
  modified_base 1492: mod_base = OTHER; note = uracil
atgaacggccccgaggacctgcccaagagctacgactacgacctgataattatcggtggaggctccggcggcctagctgccgcaaaggaagcagcacagtatggcaagaaagtcatggtgttggacttcgttacgcctacgcccttaggtactcggtggggactgggggggacgtgcgttaacgttgggtgtattcctaagaagctaatgcatcaggctgccctgctgggccaagcccttcaggactctagaaactatggttggaaagttgaagagaccgtcaagcacgactgggatcgtatgattgaggccgtgcagaatcacatcggatcactgaattggggctaccgcgtagcactcagggagaagaaggttgtgtatgaaaacgcttacgggcagttcattggtccccatagaattaaagccaccaacaacaaagggaaggaaaaaatttactccgccgagcgtttcctgatcgctaccggggagcggccccggtatctggggatccccggcgataaggaatattgcatttcatccgatgatctgttcagtctcccatactgcccaggaaaaactcttgtggtcggtgcatcatacgtggccctggagtgcgcgggctttctagcagggatcgggttagacgtgaccgtgatggttcgttcaatattgctccgaggttttgaccaagacatggccaacaagattggagagcatatggaggagcacggaattaagttcatccgccagttcgtcccaatcaaggtggagcagatcgaggcgggcacacccgggagactccgagtggtggcgcagtcaactaactcggaggaaatcatcgaaggcgaatacaacactgttatgctggcaatcggccgcgacgcttgcactaggaaaatcggtctcgagacagtaggcgttaagattaacgagaaaacaggaaagattcctgtgacagatgaggagcagaccaatgtgccctacatatacgctattggcgacattctggaggacaaggttgagctcacccctgtggcaattcaagccggacgacttctggcccagcgcctgtatgctggctccactgtcaagtgtgactatgagaacgtgcctaccacggtgttcacccccctcgaatacggcgcttgcgggctatcggaggagaaggcagtagaaaagtttggcgaggaaaacattgaagtgtatcactcatatttctggccattagaatggacaattccctcaagagacaataacaaatgttacgcaaagatcatctgcaacaccaaagataatgagcgggtcgttggcttccacgttctaggtccgaatgctggcgaggtgacacagggtttcgccgccgccctgaaatgcggccttacaaaaaagcaactggatagtaccattggaattcaccctgtctgcgccgaggtgtttacaactctgagtgtcaccaagaggtcgggcgcttctatcctccaggcaggctgctgaggctag

SEQ ID NO: 26616 - DNA, 1950 bp, synthetic construct
  misc_feature 1..1950: note = Description of Artificial Sequence: Synthetic coding sequence
  source 1..1950: mol_type = other DNA
  modified_base 1942: mod_base = OTHER; note = uracil
atgggctgcgccgagggcaaggccgtggccgccgccgcccccaccgagctgcagactaaaggcaaaaacggtgacggacgtcggcgaagtgccaaggatcaccatcccggtaagaccttgcctgagaatcctgccggatttacgtccacagccaccgcagactctcgggctctcctgcaagcctatatcgacggccactcagtggtgatcttcagcagatcaacctgcacacgctgcacagaggtgaagaagctatttaaatctctatgcgtcccctatttcgtgctcgagctggatcaaacagaggatgggcgcgctctcgagggtaccctatctgagcttgccgctgaaaccgacctgcctgtggtgttcgtgaaacaaaggaagatcggtggccacgggcccactcttaaagcttaccaggagggcagactccagaagttgttgaaaatgaacggccctgaggatctgcctaagtcttacgactacgacctcattattataggcggaggctcaggggggctcgccgccgctaaggaggccgctcaatacggaaaaaaagtgatggtgctggactttgtcacccctacgcctctgggcacacggtgggggctcggaggcacatgtgtcaacgttggttgcattccaaaaaagcttatgcaccaagccgccctgctgggtcaagctcttcaggatagcagaaattatggttggaaggtagaggagacagtgaagcacgattgggaccggatgatcgaagcagtgcagaaccacataggctctctgaattggggttaccgcgtagctttgagggaaaaaaaggtggtatacgagaacgcctacggccagtttatcgggccccatcgaattaaagctacaaacaacaagggaaaagaaaaaatctacagcgcggaacggttcctgatcgccacaggggaacggccccgatacctaggtatccctggagacaaagaatactgcatttcttccgatgatttgttctctctaccgtattgtcctgggaagactctggtcgtgggcgctagctatgtggccctggagtgcgcagggttcctggctggaattggcctcgatgtgacagttatggtgagaagtattctgttgaggggatttgaccaggacatggccaataaaatcggcgagcatatggaggagcacggtatcaagttcataagacaattcgtcccgattaaggtggagcaaatagaagcgggcacaccagggagactccgcgttgtagcgcagtcaaccaactccgaagagatcatcgagggagaatacaataccgttatgctggcgataggaagagatgcctgcactcgcaaaatcggcctggaaaccgtgggggtcaagatcaacgagaagactgggaaaattcccgtgaccgacgaagaacagaccaatgtgccatacatatacgctatcggcgatatacttgaagacaaggtggagctgactcctgtcgcaatacaggctggtaggctgctcgctcagcggctttacgcggggtcaaccgtaaagtgcgactatgagaatgtccctacaacagtctttacaccactggaatacggggcctgcgggctgagcgaggagaaggccgttgagaagtttggcgaagagaatattgaagtgtaccacagctacttctggccactagagtggacaatcccgtcgagagacaacaacaagtgttacgccaagatcatctgtaacactaaggataatgagcgagttgtgggttttcacgtcttgggacccaatgccggggaggttacccaaggattcgcagcagcactcaagtgcggcctcacgaagaagcagcttgatagcaccatcggtatccacccagtttgcgcagaggtcttcacgaccttgtccgttaccaagcgatccggcgcatcaattctccaggccggatgttgaggttag

SEQ ID NO: 26617 - DNA, 213 bp, synthetic construct
  misc_feature 1..213: note = Description of Artificial Sequence: Synthetic coding sequence
  source 1..213: mol_type = other DNA
atgaacggccccgaggacctgcccaagagctacgactacgacctgatcataatcggcgggggaagcggtggcttagcggccgccaaagaggccgctcaatacggtaaaaaggtcatggtcctcgattttgtaaccccaacgcctctgggaacccgctggggtctgggcgggacctgcgttaatgtggggtgtatcccgaagaagttgatgtag

SEQ ID NO: 26618 - DNA, 1632 bp, synthetic construct
  misc_feature 1..1632: note = Description of Artificial Sequence: Synthetic coding sequence
  source 1..1632: mol_type = other DNA
  modified_base 1624: mod_base = OTHER; note = uracil
atgctgagccggctggtgctgaacagctgggcccaggccatcatcaggccaagaccaccaaaagtgctaggcctgcaggtgacaacattcagcgaagcctaccaggagggtcgtctgcaaaagctccttaagatgaacgggcccgaggacctgcccaagagttatgattacgacttgatcatcataggcggcggaagcggagggctggcagccgctaaggaggccgcacagtacggcaaaaaggttatggtgctggatttcgtgaccccaacgcctctgggcactcgatggggtcttggcggtacgtgcgtaaacgtgggctgtattccgaagaagctgatgcaccaggccgctctgctgggacaagccctgcaggatagtcggaattacggatggaaagtagaggagactgttaagcatgattgggatcgaatgattgaggcggtgcaaaatcatattgggagtcttaactggggatatagagtggcccttcgcgagaagaaggtcgtgtatgagaacgcttacggccagttcataggaccacaccgcattaaggcgaccaacaacaaagggaaagagaagatctattcagctgagcgatttctgatcgctactggagaacgaccccggtatttgggtatccccggcgataaggagtactgcatttcctccgacgacctgttctctctcccatactgtcccggaaagacccttgtggtgggtgccagctatgtcgccctagagtgcgcaggattccttgcgggcatagggctggacgtaactgttatggtacgctctatactgctccgcggctttgatcaagacatggctaataagatcggagaacatatggaggaacacgggattaaattcatacgccagttcgtgccaattaaagtggagcaaatagaggctgggactcccgggaggctgcgcgttgttgcccagtcaacaaactctgaagaaatcatagagggggaatacaacacggtgatgctggccatcgggcgcgatgcctgtactcgtaagatcgggctggagaccgttggcgtgaagattaacgagaagacaggaaagattccggtcaccgacgaagaacagactaatgtgccttacatctatgccatcggagatatcctcgaagataaggtggagttgacccccgtagctattcaggccgggcgactactggcccagcgtttatacgctgggagcacggtgaaatgcgattacgaaaacgtgcccacaactgttttcacccccctggaatacggcgcatgcgggctgtctgaagagaaagccgtggaaaagttcggagaagaaaacattgaggtttatcatagttatttctggccgctcgagtggacaataccgagcagggataacaacaaatgttatgctaagattatctgcaatacaaaggacaacgagcgagtggtgggctttcacgtgcttggaccgaacgccggagaagtcacccaggggttcgccgccgcactaaaatgtggtctgacaaagaagcaacttgattccactatcggaattcatccagtatgtgctgaagtttttaccacactgtcagtgaccaagaggtccggggcctccatcctgcaggcgggctgttgaggatag

SEQ ID NO: 26619 - DNA, 315 bp, synthetic construct
  misc_feature 1..315: note = Description of Artificial Sequence: Synthetic coding sequence
  source 1..315: mol_type = other DNA
atgaacggccccgaggacctgcccaagagctacgactacgacctgataataatcgggggcgggtccggaggcctcgcggcggccaaggaagctgctcagtatgggaaaaaagtgatggtgctcgacttcgttacccccactccattaggaacaaggtgggggctgggcggtacctgtgtcaacgtgggatgcatcccgaagaaactaatgcaccaggcagctctgctggggcaggctttgcaggattcccgaaattacggctggaaggtggaagagacagtgaaacacgattgggacagaatgatcgaagcttag

SEQ ID NO: 26620 - DNA, 1656 bp, synthetic construct
  misc_feature 1..1656: note = Description of Artificial Sequence: Synthetic coding sequence
  source 1..1656: mol_type = other DNA
  modified_base 1648: mod_base = OTHER; note = uracil
atgagctgcgaggacggccgggccctggagggcaccctgagcgagctcgctgcggaaacggatctgcccgtggtgttcgtcaagcaacgcaagatagggggccacgggccaactcttaaagcataccaggagggaaggctacagaaactgcttaagatgaacggcccagaggatctccctaaaagctatgactacgacctgattataatcggcggcggatcaggcggccttgcagccgcgaaggaagctgcccagtacgggaaaaaggtgatggtccttgactttgttactcccacccctcttgggactagatggggtcttggtgggacttgcgttaacgttggttgtatccctaagaaactgatgcatcaggcagcattgctgggacaggcactgcaagattcacgaaactatggttggaaggttgaggaaaccgtcaaacacgactgggaccggatgattgaggcggttcaaaatcatatcgggagcctcaattggggctaccgggtcgccctgcgggagaaaaaagtagtgtacgagaacgcttatggacagttcatcggtccgcaccgcatcaaagccacaaataataaggggaaagagaagatctacagtgccgaaagatttctgatcgccacgggagaacggccacgctatttaggtattcccggcgacaaggagtattgcatctcgagcgacgacctgttctccttgccatactgtcccggaaagacgctcgttgtcggtgcgtcatatgtcgcactggagtgcgctggattcttggctggtatcggcctggatgttacagttatggtcagatcaatcctcctcagggggttcgatcaggatatggcgaacaaaattggggagcatatggaggagcatggcatcaaattcatcagacagttcgtccccatcaaggtcgaacagatcgaggccggcacacccggacgtttacgcgtcgttgctcaatctacaaactcagaagagatcattgagggcgagtacaacaccgtcatgcttgccatcgggcgcgatgcttgcaccaggaagatcggcctcgagaccgtgggggttaagatcaatgagaagacaggcaagattcccgtgaccgacgaagaacagacgaatgtcccatacatttatgcaatcggcgacattcttgaagataaggtcgagctgacgccagtagcaattcaggcagggaggctcctggctcagagattatatgctgggtcgactgtaaaatgtgactatgaaaacgtgcccactacagtgtttacccccctcgagtacggcgcatgcggcctgagtgaggagaaagccgtggagaagtttggtgaagaaaacatagaagtgtatcactcatacttctggcctttggaatggacaattccatctagggataacaataagtgttatgctaaaattatttgcaataccaaagacaatgaacgcgtcgtgggctttcacgtgcttggacccaacgccggagaggttactcaagggttcgcggccgcactgaagtgcgggctgaccaagaaacagctggactcaactattggcatccatcccgtctgtgctgaagtgttcactacattgtccgtcaccaaacgaagcggagcgtccattctgcaggcaggttgctgaggatag

SEQ ID NO: 26621 - DNA, 1707 bp, synthetic construct
  misc_feature 1..1707: note = Description of Artificial Sequence: Synthetic coding sequence
  source 1..1707: mol_type = other DNA
  modified_base 1699: mod_base = OTHER; note = uracil
atgcccgccatgctgcccaccggcagccacagcgccgtgctgcccccaagtcactgcagcaccgcgccgccttcgacatcgcaagagccaagcagttcggccgatccaaaactttgtttgagcccccctacatctgatagcaggcaggaacgtaacgtgcagtttggactggcataccaggaaggtaggcttcaaaagttattgaagatgaacggacctgaagacctgcctaagagctatgattacgatcttatcattattggcggcgggtcaggaggcttggccgcagcgaaggaggccgcccaatatggcaagaaagtcatggtcttggacttcgttacaccaactcctctgggaaccaggtggggcctcggcggtacctgcgtaaatgtcggctgcattcctaagaagctgatgcaccaggcagcacttctcggacaggccctgcaggattctcgtaattatggttggaaggtggaagagacggtcaaacacgactgggaccgaatgatcgaggctgtccagaaccacattggaagcttgaactggggctatcgggtggcattgcgggagaaaaaggtggtgtatgaaaacgcttatggccaatttattggaccccaccggatcaaggcaaccaacaataaggggaaggagaaaatatacagcgcagaaaggtttttgatcgccactggagaaagaccccggtatctgggaattcccggcgacaaggagtattgtattagttccgacgaccttttctccctgccctactgtcccggcaaaacactggttgtgggagcctcatacgtggcactggagtgcgccggattcttggccggaatagggctggatgtcacggttatggtgaggtctatcctgctgcggggtttcgaccaggacatggccaacaaaataggggagcacatggaggagcatggaataaagttcattcgacagttcgtacccatcaaagtggagcagatagaggccggcacgccaggcagattacgggtggtggcccaatctactaacagcgaggaaattatcgaaggagagtacaataccgtaatgctagctattggccgggacgcatgtaccagaaagataggactggaaaccgtgggcgtaaagattaacgagaagacaggtaaaatcccagtgactgacgaggaacaaacaaacgtcccttatatctatgcaattggtgatattctcgaagacaaggtggagcttaccccagttgctatccaggccggtcgcctgctggcccagcgtctgtacgccggctccaccgttaagtgcgattacgaaaatgtgccgacaacagtgttcacacccctcgagtatggagcctgtgggttgtcagaggagaaagccgttgagaaattcggggaggagaacatcgaggtgtaccacagttacttttggcctctggaatggaccattccatcaagggacaataacaagtgctatgcaaagatcatatgcaacaccaaagacaatgagagagtagtaggattccacgtcctgggtcctaacgccggagaggtcacccagggcttcgctgcggccctcaaatgcggcctgacaaaaaagcagctcgattctaccataggcatacacccggtgtgtgcggaggtgttcaccacactgtccgtcacgaaacgctcgggggcctctatcttgcaagcaggttgctgaggctag

SEQ ID NO: 26622 - DNA, 528 bp, synthetic construct
  misc_feature 1..528: note = Description of Artificial Sequence: Synthetic coding sequence
  source 1..528: mol_type = other DNA
atgaacggccccgaggacctgcccaagagctacgactacgacctgattatcatcggcggcggatccggaggcttagctgcagccaaggaagcagcccagtacgggaagaaagtgatggtactagattttgtaacccccacccctcttggtaccagatgggggctgggtggaacatgcgtgaacgtcggctgtattcccaaaaaactcatgcaccaggcagcactgttaggccaggccctgcaggattcaagaaattacggctggaaggtggaagagacggtgaaacacgattgggatcgaatgatcgaggccgtgcaaaatcatatcgggagtttaaactggggttacagagtggccctgcgggagaagaaggtagtctatgaaaatgcatacggacagtttattggacctcatcgcatcaaagccacaaacaataagggcaaggagaaaatttattcggccgagcgcttccttatcgcaacaggcgagcggccacgctacctggggataccaggagacaaggaatag

SEQ ID NO: 26623 - DNA, 162 bp, synthetic construct
  misc_feature 1..162: note = Description of Artificial Sequence: Synthetic coding sequence
  source 1..162: mol_type = other DNA
atgaacggccccgaggacctgcccaagagctacgactacgacctgattatcattggtggcggcagcggcgggcttgcggcagccaaggaagcggcacagtacggcaagaaggtgatggtgctcgacttcgtcaccccaacccccctgggcacccgctggtag

SEQ ID NO: 26624 - DNA, 219 bp, synthetic construct
  misc_feature 1..219: note = Description of Artificial Sequence: Synthetic coding sequence
  source 1..219: mol_type = other DNA
atgaacggccccgaggacctgcccaagagctacgactacgacctgattataattggaggggggtctggcggactggccgccgccaaggaagccgctcagtacgggaaaaaggtgatggtgctagacttcgtcacaccaaccccacttggaacccgttggggcctgggaggcacctgtgtaaacgtcggctgcattcctaaaaagcttatgcaccagtag

SEQ ID NO: 26625 - DNA, 420 bp, synthetic construct
  misc_feature 1..420: note = Description of Artificial Sequence: Synthetic coding sequence
  source 1..420: mol_type = other DNA
atgctgagccggctggtgctgaacagctgggcccaggccatcatccggcctcgcccgcctaaagttttaggactccaggttaccacattctcagaagcatatcaggagggccggttgcagaagcttctaaagatgaacgggccggaggacctgcctaaaagctacgactacgacctgatcatcattgggggcggttccggcggcctggccgccgccaaagaggcggcccaatacggtaaaaaagtgatggtgttggattttgtgacccctacccccttgggcacacgttgggggttggggggaacctgtgtcaacgtggggtgtattccaaagaagttgatgcatcaggcagccctcctcggccaagcactgcaggactcccggaattacggatggaaggtcgaagagactggtatgtag

SEQ ID NO: 26626 - DNA, 1380 bp, synthetic construct
  misc_feature 1..1380: note = Description of Artificial Sequence: Synthetic coding sequence
  source 1..1380: mol_type = other DNA
atggtgctggacttcgtgacccccacccccctgggcacccggtggggactgggcgggacttgcgtcaatgtgggctgtatccctaaaaagttgatgcatcaggcggcactgctcgggcaggcattgcaggattcccggaactatggctggaaggtggaggaaacagtgaagcacgattgggacaggatgatcgaagccgtccaaaaccacatcggttccctgaattgggggtacagagttgctctccgcgaaaaaaaggtagtgtatgagaacgcctacggccaatttatcggtccacaccgaattaaagctaccaacaacaagggtaaggagaaaatttactcggccgagaggttcctgattgctacgggtgaaaggcctaggtacctgggtatccccggcgacaaagagtactgcataagctccgacgatcttttctccctaccgtattgtcccggcaaaacccttgttgtgggagcttcctacgtcgccctggagtgtgcgggctttttggcaggaattggcctagacgtaacagtaatggtgcgcagtatcctcctgcggggcttcgaccaggatatggccaacaagattggcgagcatatggaggagcacgggatcaagttcattcgacagttcgtgcctatcaaggtggaacagatcgaggctggcacccccggcagactgcgcgtggtggcccagtccacaaacagcgaggagatcattgaaggtgaatataatacagtcatgctggccattggcagggatgcttgcaccaggaagattggcctcgaaactgtcggggtgaagattaatgagaaaacaggcaagattcctgtgactgatgaagaacagaccaatgtgccttacatctatgccatcggagatatcctggaggacaaggtggaacttacacctgtcgctattcaggctggccggttattagctcagcggctgtatgcagggtcaactgtgaaatgcgattatgagaacgtgccgacaacggtgtttactcctctcgagtatggagcctgtggcctctccgaagagaaggcagtggaaaagtttggggaagagaatattgaggtatatcacagttacttttggccgctcgagtggacaattccttctagggataacaacaagtgctacgccaagattatctgcaatactaaggacaatgagcgagtcgtgggctttcatgtcttaggacctaacgcgggggaggtgacacagggctttgctgcagccttaaaatgtggacttacaaaaaaacagctcgacagtaccatcggcattcacccagtttgtgccgaggtctttactactctctcggtgaccaaacgcagtggcgcctcgatactgcaagctggatgctag

SEQ ID NO: 26627 - DNA, 1644 bp, synthetic construct
  misc_feature 1..1644: note = Description of Artificial Sequence: Synthetic coding sequence
  source 1..1644: mol_type = other DNA
atggaggacggccgggccctggagggcaccctgagcgagctggccgccgagactgacctgcccgttgtctttgtcaagcagcgcaagataggaggacacggccccactctgaaagcctatcaggagggaagactccagaaactgctgaagatgaatgggcccgaggacctccccaagagctatgactatgacttaatcatcatcggagggggctcaggcggccttgcagccgccaaggaggctgcacagtacggaaagaaggttatggttctcgacttcgtcacccccactccgttgggcactcggtggggattgggaggaacctgtgtgaacgtgggctgcatacccaagaagctcatgcaccaagctgcccttctgggacaggcacttcaggactcccgaaattacggttggaaggtggaggaaactgtgaaacatgattgggacaggatgattgaggccgtacagaaccacattggcagcctaaattgggggtaccgagtggctctaagagaaaagaaagtagtgtacgagaacgcatacggtcagttcatcggccctcatcgaatcaaagccacaaacaacaagggtaaggagaagatttattccgccgaacgcttccttatcgccaccggggagcggcctagatacttaggcatcccaggtgacaaggagtattgcatcagctcagacgatctttttagtctgccttattgccctggcaagacattggtggtgggggcctcctacgtcgcactagagtgcgcaggatttcttgccggcatcggtctcgatgtgactgttatggttcgttcgatcttattgaggggatttgaccaggatatggcgaacaagattggagagcacatggaagaacacggcatcaaatttataaggcaattcgttccaattaaggttgagcaaattgaagccggtactcccgggcgtctgagagtagtcgcccaatccaccaactccgaggagatcatcgagggggaatataatactgtcatgctggccattggtagggacgcgtgcacaaggaagatagggctggaaacggttggagttaagatcaacgaaaaaacaggaaagatccccgtgaccgatgaggaacagactaacgtcccgtacatctacgccattggtgacatactggaagacaaggtggaactgaccccagttgccattcaggccgggaggctgctcgcccagaggctatacgctgggtccactgtgaagtgtgactacgagaacgttccgaccactgtgttcaccccgctggagtatggcgcatgtggtttgtccgaagagaaggctgtcgagaaatttggcgaagaaaacatcgaagtttaccattcttacttttggccactagaatggaccatcccatccagagataataacaagtgttatgctaagattatttgtaatacgaaggataacgagcgagtggtcgggtttcacgtgctagggcccaacgctggggaggtcacacagggattcgccgctgctctaaaatgtggcttgaccaaaaaacagctggattccacgatcgggattcacccggtgtgcgccgaagtatttacaaccttaagcgtcaccaaaaggagtggcgccagtatcctgcaggctgggtgttag

SEQ ID NO: 26628 - DNA, 945 bp, synthetic construct
  misc_feature 1..945: note = Description of Artificial Sequence: Synthetic coding sequence
  source 1..945: mol_type = other DNA
atgggcagccaggccctgccccccggccccatgcagaccctgatcttcttcgatatggaggccacgggcctgccattttctcaacccaaagtcactgagttgtgtcttttagccgtgcatcgatgtgctttagagtccccgccaacatcacagggcccacctccaacagtccccccccctcccagggtggtggataaattatcactctgcgtggcccccggtaaggcatgctctcccgccgcctccgaaatcacaggactgagcaccgctgtgctcgctgcccatggccggcagtgttttgacgataacctggctaacctcctgcttgcctttcttaggcgccaacctcagccttggtgcctggtggcgcataatggagatcgctacgactttccgctcctgcaggccgagctcgcgatgcttggacttacgtcggctctggatggagccttttgcgttgactctattactgccctgaaggctctggaacgagcttcttccccctccgaacatggaccccgcaagtcatattcacttgggtcaatctatactagactgtatggccagtctccccccgattcccacacagcggagggagatgtgctggcgttgctgtccatctgtcagtggcgaccacaggctctcctacggtgggtggatgcccatgctagacctttcggcacaatcagaccaatgtatggcgtgaccgcctctgcccgaactaaacctcgacccagcgctgttacaacaaccgcccacctggcaacaacacggaatacttctccctcattaggcgagtcaagagggaccaaagacctgccacccgtgaaagacccgggcgctctatctcgggagggactactggctccactgggtctgctggctatcctcaccctggctgtcgctaccctgtatggactatctcttgctactcctggagaatag

SEQ ID NO: 26629 - DNA, 1110 bp, synthetic construct
  misc_feature 1..1110: note = Description of Artificial Sequence: Synthetic coding sequence
  source 1..1110: mol_type = other DNA
atgggccccggcgcccggcggcagggccggatcgtgcagggccggccagaaatgtgtttttgccccccaccaacgccgttgcctcctctgagaattctcacccttggaacccatactcccacaccttgcagcagcccgggcagcgccgcgggaacctacccaactatgggcagccaggccctgccccccggtccaatgcagaccctcatctttttcgatatggaagctactggccttccattctcccagcccaaagtgacagaactctgtctgctggccgtgcataggtgcgccttggagtcccctcccaccagccagggccccccaccaactgtgccaccaccgccgcgcgttgtggataaactgagcctgtgcgtggcgcctggcaaagcctgcagtccagcggcctcagaaataacaggactcagtacagcggttctggcagcccatggcaggcagtgctttgacgataacctggcaaatcttcttttagcttttctgcgtagacagcctcagccgtggtgcctggtggctcacaacggcgatcggtacgactttcccctcttgcaagccgagttggccatgctggggttaacctccgctctagatggagcgttctgtgtcgattccattactgcactcaaggctctggagcgcgctagcagtccttctgagcatggtccaagaaaaagttattctctgggatctatttatacgcgactctatggtcagtcgccacccgattcacatacggcagagggcgatgtactcgctctgttgtcaatctgccagtggagaccccaagccttgctaaggtgggtggatgcccatgcacgcccctttgggaccattcgaccaatgtacggcgtgactgcctcagccagaactaaaccccgaccatccgccgtcacaaccaccgcccacctggccacgaccaggaacactagcccctctctgggggagtcccggggcacaaaggatttaccccccgttaaagatcccggtgccctctcccgtgaaggcttgctggcccctctgggactcctcgccattctgacattggccgtcgctacactctatggactctctttagctacgcctggagagtag

SEQ ID NO: 26630 - DNA, 528 bp, synthetic construct
  misc_feature 1..528: note = Description of Artificial Sequence: Synthetic coding sequence
  source 1..528: mol_type = other DNA
atgctgggcctgaccagcgccctggacggcgccttctgcgtggactcaattaccgcactcaaagctctagagagggcatcctccccgtctgagcatggaccaaggaaaagctattctttagggtcaatatatacaagactgtatgggcagtcccccccggactcccacactgcggagggcgatgtgctagcccttctcagtatctgccagtggaggccacaagccctgctgaggtgggtagacgcccatgctagaccattcggaaccatccggcctatgtatggagtcacagcaagcgccagaacgaagccccgtccctctgccgtaaccaccactgcccacctggctactacgagaaacacaagccctagcctcggtgagtcccgaggaacaaaggacttgcctccagtgaaagatcctggagccctttcccgagaggggctgctggctcctctaggattattagccattctaacattggcagttgctaccttgtacggactgagtctcgctacgccaggggagtag

SEQ ID NO: 26631 - DNA, 945 bp, synthetic construct
  misc_feature 1..945: note = Description of Artificial Sequence: Synthetic coding sequence
  source 1..945: mol_type = other DNA
atgggcagccaggccctgccccccggccccatgcagaccctgatctttttcgacatggaggccaccgggttaccattcagccaacctaaagtcaccgagctttgtttgctggcagtgcatagatgcgccttggagtcccccccaacaagtcaagggccccctccaactgttcctccgccccctagagtagtagacaaactcagcctttgcgtggcacctggaaaagcctgctcgccggctgcaagcgaaataacggggctgagcacagcagtgctcgcggctcatgggcgacaatgtttcgatgacaacctcgcaaatttactgctggctttcctacgcaggcagcctcagccatggtgccttgttgcccacaatggtgacaggtatgacttcccactattgcaggccgagttggcaatgttggggttaaccagtgcattagacggggctttctgcgtcgattcaattacagccctgaaggctttagaaagagccagctcacccagcgagcatggcccaagaaagtcgtacagcttgggaagtatctacactcgcctgtacggccagtcccctcccgacagccatacagctgaaggagacgtgctggcgctactctctatctgccaatggcggccacaagcgctcttgagatgggtggatgcacacgccaggcccttcggcaccatccgccctatgtatggtgtgacagctagcgcccggaccaaaccccgcccatcagcagtaactactacagcccacctggccacaacccgaaatacaagcccctctttaggcgagtcccgcggtaccaaagatctacccccggttaaggatcctggtgctttgtctcgcgaagggcttctagccccattaggactactggctatccttaccttggctgtggccaccctgtacgggctctctcttgcaactccaggagagtag

SEQ ID NO: 26632 - DNA, 915 bp, synthetic construct
  misc_feature 1..915: note = Description of Artificial Sequence: Synthetic coding sequence
  source 1..915: mol_type = other DNA
atgcagaccctgatcttcttcgacatggaggccaccggcctgcccttttcccagcccaaggtcactgagctttgtctcctggcagtgcacagatgcgccctcgagagcccaccaacaagtcaaggacccccacccaccgtcccaccccccccccgagtggtggacaaactctcattgtgtgtggctcccgggaaggcctgttctccagccgcttctgagattacaggactgtctacggcagttctagccgcccacggccgacaatgtttcgacgataatctggccaacctgttgctggcatttctcaggagacaaccgcagccatggtgcttggtcgctcataatggagataggtacgattttcccctgctccaagccgagctggcgatgctcggccttacttccgcccttgatggggcattctgtgtagatagtatcaccgccttaaaagcactggagcgagcctcatcaccttctgaacatggtcccagaaagtcttatagcttgggctccatttacactcggctttacggccagtcacctccagacagtcacactgccgaaggggatgttctggcattgcttagcatttgccagtggcgtccccaggccttgctccgttgggtagatgctcatgcccgccccttcggaacaattcgcccaatgtatggcgtgacggcttccgctcggacgaagcctcgaccttcagcagtcacgaccacggcgcacctggccacaacgcggaacacctctccaagcctgggtgagagtcgcgggacaaaggatctgccccccgttaaggatccaggagccttgagccgagaggggctgctggcacctcttggtttgctcgcaatcctgacgctagctgtggctacactgtatgggttaagcttagccacacccggggagtag

SEQ ID NO: 26633 - DNA, 528 bp, synthetic construct
  misc_feature 1..528: note = Description of Artificial Sequence: Synthetic coding sequence
  source 1..528: mol_type = other DNA
atgctgggcctgaccagcgccctggacggcgccttctgcgtggactccatcaccgctctgaaggccctcgagagagcaagctctccgagcgagcatggcccacgaaagagctactcccttggcagcatctacacgaggttatatggacagtctccgccagattctcacactgctgagggcgacgttctggccctgctatcaatttgccagtggagaccgcaagctcttctcaggtgggttgatgcgcacgcccgccccttcggcactatccggcctatgtacggggttacagcctctgcgagaacgaagccgagaccgtctgccgtgacaacaactgcacatctagccacaaccaggaatacgtcccccagtctgggagaaagccgcggaactaaggatctgcctcctgtaaaagaccctggagctctcagcagagaaggcctactggcacctctcggattgctagctatcctgaccctggccgtggcaactttgtacggcctgtccttggctacaccaggagaatag

SEQ ID NO: 26634 - DNA, 3513 bp, synthetic construct
  misc_feature 1..3513: note = Description of Artificial Sequence: Synthetic coding sequence
  source 1..3513: mol_type = other DNA
atgggcctggcctggggcctgggcgtgctgttcctgatgcacgtgtgtggaacaaatcggatccccgaatccggcggcgataactcggtgttcgatatcttcgaactgacaggagccgcgcgcaaggggtcgggcagaaggttagtcaaggggcccgacccatctagccccgcgtttcgtatcgaggacgcgaacttgatacctcccgtgcctgatgataaattccaggacctggtggatgcggtcagggcagagaagggcttcctgctattagcatctctgcgccagatgaagaagactcgggggaccttattggcactggaaaggaaggatcacagcgggcaagtgttctctgtggtaagtaacggtaaagctgggactctcgatctgtcactcaccgtccaggggaagcagcacgtcgtttcagtggaagaagcactcctggcaactgggcagtggaagtcaatcacactgttcgtgcaagaagaccgtgcacaattgtacatcgattgtgagaagatggaaaatgcagagctcgatgtgcccatccagtcggtttttactcgggacctggcatcaatcgcacggctccgcatcgccaagggtggagtgaacgataacttccagggggtccttcagaacgtgcggtttgtttttgggaccactcccgaggacatcctcaggaataagggctgctccagctctacctcagtcctgctgaccctggataacaatgttgtgaacggctcctctccagcaattcgtaccaactacatagggcataagaccaaagacctccaggccatatgtggaatttcctgcgacgaactgtctagtatggtgcttgaattgagaggcctcagaaccattgtaacaaccttacaggacagtattaggaaggtgaccgaggaaaacaaagagctagccaatgagctgcgtagaccccccctatgctaccataatggcgtgcagtatcggaacaacgaggaatggacagtggactcatgcacagagtgccattgtcaaaactccgtcaccatttgtaagaaagttagctgccccatcatgccctgctccaacgccacagttccagacggtgaatgctgtccccgatgctggcccagtgactcagcagatgatggatggtccccttggagcgagtggacaagttgctcaactagttgtgggaacgggatccaacagcgcggcaggagctgtgatagtcttaataacaggtgcgagggttcctcagtccagacgcgtacttgccatatacaggaatgcgataagaggttcaaacaagatggaggctggagtcattggtcgccatggtcaagttgcagcgtcacttgtggcgacggagtcatcaccagaatccgcctgtgcaattccccatccccacagatgaacggcaaaccttgcgagggcgaggcccgggagacaaaggcgtgtaagaaggacgcctgtccaatcaacggaggatgggggccctggagcccctgggatatctgttccgtgacatgcggcggaggcgtacaaaagagaagccgcttgtgtaataatcctaccccgcagttcggcggcaaagactgcgttggtgacgtgacagagaatcagatttgtaacaagcaggactgccccattgatggttgcctgtctaacccctgcttcgccggcgtgaaatgtactagttaccccgacggatcatggaaatgtggggcatgcccccccgggtactctggcaacggtatccagtgcactgacgttgacgagtgtaaagaggtcccggacgcctgtttcaaccacaacggggagcatagatgcgagaacacggatcccggctataactgcctgccatgcccaccaaggttcacaggctctcagccatttgggcagggagttgagcatgccacagccaacaaacaagtctgtaaacctagaaacccatgtactgatggaacccatgattgcaacaaaaacgcaaaatgtaactatttgggtcattatagtgatcctatgtaccggtgtgagtgtaaacccgggtatgcaggtaatggaattatttgtggcgaggacacagatctcgacggctggccgaatgagaacttggtttgcgtggccaatgctacgtaccactgtaaaaaagacaattgccccaacctccctaactccgggcaggaggattatgataaagatgggatcggcgacgcatgcgatgatgatgacgataacgacaagatccctgatgacagagataattgtccctttcattacaatccagctcagtacgattacgatcgcgatgatgtcggtgacaggtgtgacaattgtccttacaatcataatcccgatcaggccgacactgataacaatggggagggtgacgcctgcgcagcagatattgacggggacggtatactgaatgagcgcgataactgtcagtacgtctacaatgtggatcagagagacactgacatggacggcgtcggagaccagtgcgacaattgtcccctcgagcataatccagatcaactggacagcgactccgacagaattggggacacgtgtgataacaaccaagatatcgatgaggatgggcatcagaacaacctagacaattgcccttacgtaccaaatgctaaccaggctgaccatgataaagatggaaaaggcgacgcctgcgatcatgacgacgacaacgatggaatccccgacgacaaagataattgcaggctggttccaaacccagaccagaaggattcagacggcgacggcagaggagacgcgtgtaaggacgatttcgatcatgactccgttcctgacatcgacgatatctgtcccgaaaatgtggacatatctgaaacggacttccgccgcttccagatgatcccgctggacccaaaggggacctcccagaatgatcccaattgggtcgtcagacaccaaggtaaagaactggtccagacagtgaattgtgaccctggcctggccgtgggatacgacgagtttaacgctgtggactttagcggcacctttttcattaatacagaacgagatgatgactacgccggcttcgtttttggataccaaagcagtagccgcttttacgtggtgatgtggaagcaggtcacacagtcctactgggatactaacccaacacgggcccaaggatattccggtctgtccgtaaaagtggtgaattcgaccaccggaccaggcgagcacttgagaaatgccctctggcacaccggcaatactcccggtcaggtgcgcacgctgtggcacgatcctcggcacatagggtggaaggacttcacggcttaccggtggcggttatctcatcggcctaagacaggttttattagggttgtgatgtacgagggaaagaagattatggcagattcgggacctatctacgataagacctatgccggtgggcgactgggtctgtttgtcttcagtcaggaaatggtgttcttttcggatctcaaatacgagtgtcgcgacccctag

SEQ ID NO: 26635 - DNA, 285 bp, synthetic construct
  misc_feature 1..285: note = Description of Artificial Sequence: Synthetic coding sequence
  source 1..285: mol_type = other DNA
atgggcctggcctggggcctgggcgtgctgttcctgatgcacgtgtgtggtactaaccggatccctgagtccgggggcgacaattcggtgtttgacatctttgagctgacgggagcagcacgcaagggaagcgggcggagattggtcaaggggcccgacccatcttcccctgccttccggatcgaagacgccaatctaattcctccagtaccagacgacaaattccaggacttggtcgatgcagtgagggccgagaaaggtttccttctgttagcgagcctgtag

SEQ ID NO: 26636 - DNA, 501 bp, synthetic construct
  misc_feature 1..501: note = Description of Artificial Sequence: Synthetic coding sequence
  source 1..501: mol_type = other DNA
atggccgccggcaacgtggtgctggtgcccctggtgaccgtggagatggccagttctgcgcagatgctaatgtcggctaaaaagtgtttgatgcccgcaagcacaaccatggaaagtaccggagtcaggactcgcaccccagccactacagcatgtcctgccccccatgcaagtcctgcccacagtcccagcgcccgcgtgtcaaacatgccccgacctactaaccgctgtgcttctccaattccactctgtctctgtcaccgagccgggtgttactgtgaagcgatctccgagcaatggacgcaaaagcacttccaggcttgtcagcggagagaggactcactggagttggccaacaaaactacgttgacaagctccttcaggaatactgggagcagaggacagtccacaaaggggagggcccatacccgcgatgattgtatgaaaaagatttggagaaactgttatatgtttgggacaaaatcatttagtggagattag

SEQ ID NO: 26637 - DNA, 3519 bp, synthetic construct
  misc_feature 1..3519: note = Description of Artificial Sequence: Synthetic coding sequence
  source 1..3519: mol_type = other DNA
atggtgtggcggctggtgctgctggccctgtgggtgtggcccagcactcaggctggacatcaggacaaggatacaaccttcgaccttttttcgatttccaacatcaatagaaagactattggagctaagcagttccgcggcccggaccccggtgtgcccgcctatagattcgtgagattcgactacatacctcccgtcaatgcagacgacctctcaaaaatcacaaagataatgaggcagaaagagggattttttctgactgcacagctgaagcaggatggaaagagtcgtgggacactgctcgctctcgagggcccaggactctctcagcgacagttcgaaattgtatccaacggacctgccgatactttggaccttacatattggatcgacggaaccagacacgtcgtttcgttggaagacgtcggactggcagatagccaatggaaaaacgttaccgtgcaggtggctggagaaacatatagtctccatgtgggttgcgacctaattgatagtttcgccttggacgagcccttctatgagcacctgcaagctgagaaatccagaatgtatgtcgccaagggatcagccagagagtcgcatttccgggggttactccagaacgtccacctggtgttcgaaaactctgtggaagatatcctctcaaagaaggggtgccagcaggggcaaggggccgagatcaacgctatttccgaaaatactgagactctgcgcttaggcccgcatgtcacgactgaatatgtgggacccagtagcgagcggcggcccgaagtctgcgaacggagttgcgaagaactgggcaatatggttcaggaactctccggactacatgtccttgtgaatcagctgtctgagaacctaaagcgggtcagcaatgacaatcagtttctgtgggagctgatcggtgggcctcctaagacacgcaacatgagcgcttgttggcaagatggccgatttttcgccgaaaacgagacctgggtagtggattcctgtaccacatgcacgtgcaagaaatttaagactatttgccaccagatcacttgtcccccagcaacatgtgcctcaccctctttcgtggagggagagtgctgtcctagttgcctgcactccgtcgacggtgaagaaggatggagtccatgggccgagtggacacagtgctccgtaacctgcgggagcggaactcagcagcgcggacgatcgtgtgatgtcactagtaacacttgtctcggcccatctattcagactcgggcgtgctcattgagcaagtgcgacacaagaatacgtcaggatggaggatggtcgcattggtctccctggtctagctgcagtgttacatgcggcgtggggaatattacacggatcaggctctgtaacagccccgttccacagatgggggggaagaactgcaaaggcagcggcagagaaacgaaggcatgccagggagccccatgcccgattgacgggcgttggtctccctggagcccttggagtgcgtgtacggtcacctgtgctggggggattcgcgagagaaccagagtgtgcaacagcccagagccgcagtacgggggcaaagcctgcgttggtgatgtgcaggaaaggcagatgtgcaataaaaggtcttgtcctgtggacggctgcctgtcaaacccctgtttccccggagcccagtgcagcagttttcccgatggcagctggtcatgtggaagctgccccgtggggtttcttggcaatggcactcactgcgaggaccttgacgaatgtgccctagtgcctgacatatgcttctccacctctaaggttccacgctgcgtgaacacccagcccgggtttcattgcttgccctgcccaccacggtaccgaggtaatcaacccgttggggtaggcctggaagctgctaagacagaaaagcaagtttgtgagccggagaatccttgtaaagataagactcataattgtcacaagcacgccgaatgtatctacctgggccacttctccgatcctatgtacaagtgcgagtgccagactgggtacgcaggggatggtctgatttgcggagaggacagtgacttggatggatggcctaatttgaatctagtctgtgccacgaatgccacataccattgtattaaggataactgtccccacctgcccaacagcggacaagaagatttcgataaggacggaatcggagacgcctgcgacgatgatgatgataacgatggggttacagatgaaaaggataattgccagctcctgtttaatccaaggcaagcagactacgataaagacgaggtcggcgacaggtgtgataactgcccatatgttcacaacccagctcagatcgatactgataacaacggtgagggcgatgcctgctctgtggacatcgacggagacgatgtctttaatgaaagggataactgtccctatgtctataacacggatcaacgagacacggacggtgatggcgtgggcgatcactgcgacaattgccccttggtccataatcctgaccagaccgacgtggacaatgatctggtgggggaccaatgcgacaacaatgaagacattgacgatgacggacaccagaacaaccaggataactgtccatacatctccaacgcaaatcaggctgaccacgaccgggacggccaaggcgacgcctgcgatccggatgacgataacgacggtgtgcccgatgaccgggacaactgcaggctggtcttcaaccccgaccaggaggacctggatggcgacgggcgtggcgatatctgtaaagacgattttgacaacgataacattcctgatattgacgacgtgtgtccggagaacaacgccatctcggagaccgattttagaaactttcaaatggtcccgctcgacccaaaaggcacaacccagattgaccctaattgggtgattcggcaccagggtaaggagctggtgcagaccgccaattctgaccctggaatcgctgtaggattcgacgagttcggaagcgttgacttttctggaaccttctacgtgaacaccgatagagacgacgactacgccggctttgtttttgggtaccagagctcctcccgcttctacgtcgttatgtggaagcaggtgacccagacctactgggaggaccagcccacgcgggcgtacggttactctggggttagtttaaaagttgtgaattcaactacgggcacgggcgagcacctgaggaatgccttgtggcatacgggaaacacccctggccaagtgcgaaccctctggcacgatcctagaaatattggatggaaggactacaccgcctaccgatggcatctgactcacaggcctaagacgggttatatacgggtgctagtgcacgaagggaaacaagtcatggctgacagcgggcccatctacgaccagacgtatgctgggggcaggctgggtctgttcgtgttcagtcaagaaatggtgtactttagcgaccttaagtacgagtgcagagatatttag

SEQ ID NO: 26638 - DNA, 1293 bp, synthetic construct
  misc_feature 1..1293: note = Description of Artificial Sequence: Synthetic coding sequence
  source 1..1293: mol_type = other DNA
gacgacgacaacgacggcgtgaccgacgagaaggacaactgccagctgctcttcaacccccgccaagccgattatgataaggatgaggtgggagataggtgtgataattgcccttacgtgcacaatcccgcacagattgacactgataacaatggtgaaggcgacgcatgctcggtggacatcgacggtgatgacgtgtttaacgagagagacaattgtccatacgtttacaacactgatcagcgagacactgacggtgacggcgtcggcgatcattgcgataactgcccgttagtacacaatcctgatcagaccgatgttgataacgatcttgtaggagaccaatgcgacaataacgaggatatagatgacgatgggcatcagaacaaccaggataactgcccgtacatttcgaacgccaaccaggccgatcacgatcgggacgggcaaggggatgcctgtgatccagacgatgacaatgatggggtgcctgacgatcgcgacaattgcaggctggtgttcaatcctgaccaagaggaccttgacggggatgggcgcggagacatctgtaaagacgacttcgacaacgataatattccagatattgatgacgtgtgtcctgaaaataatgctatctcagagactgattttagaaacttccagatggtccctctagatcctaaagggaccacacagatcgatcctaattgggtaatccgtcaccaaggtaaagagctcgttcagacggccaacagcgacccagggatcgcagtgggcttcgacgagtttggctccgttgatttctctggcactttttacgtgaatacagatagggatgacgactacgccggatttgtgttcggctatcaatcttcaagccgattctacgttgtcatgtggaagcaagtgacccaaacctattgggaagatcagccaacaagagcttacggatatagtggcgtgtccctgaaagtggtaaattccactacgggcaccggagagcacctgcgcaatgccctgtggcacaccggcaatactccagggcaggttcgcaccctctggcacgaccctcgcaacattgggtggaaggattataccgcttaccgctggcatctcacccaccgccccaaaaccgggtatatccgcgtgctagtgcacgagggcaaacaggtgatggcagattctgggccgatatacgaccagacctatgcagggggtaggctgggcctcttcgtgttctcccaagagatggtctatttttccgatcttaagtatgaatgtcgagtgatctag

SEQ ID NO: 26639 - DNA, 252 bp, synthetic construct
  misc_feature 1..252: note = Description of Artificial Sequence: Synthetic coding sequence
  source 1..252: mol_type = other DNA
atggtgtggcggctggtgctgctggccctgtgggtgtggcccagcactcaagccggccaccaagacaaagacacgacctttgacctgttctctataagcaacatcaataggaaaactattggtgcaaaacagttcagagggccggacccaggggttccagcttatcgttttgtcaggtttgattatataccacctgtaaatgccgatgacctaagtaaaattaccaagattatgcgccagaaagagggttag

SEQ ID NO: 26640 - DNA, 1449 bp, synthetic construct
  misc_feature 1..1449: note = Description of Artificial Sequence: Synthetic coding sequence
  source 1..1449: mol_type = other DNA
atggccgccctgatgacccccggcaccggcgccccccccgcccccggcgactttagcggggagggttctcaggggcttccagacccgagtccagaacccaaacagctcccagagctcattcggatgaagagagacggcgggcggctgagtgaagctgatatccgcggattcgtggctgcagtggtgaacggaagtgcacagggggctcagatcggagctatgctgatggcgatcagacttcggggcatggaccttgaagaaactagcgtgctcacccaggcgcttgcccagagcggacagcagctggagtggcccgaagcttggcggcagcagctggtcgacaagcacagtacaggtggagtcggagacaaggtgtccctggtgctggctccggccctcgccgcttgcggctgcaaggttccaatgatcagcggccggggtttgggccacaccggaggaaccttggataaactagaatcgattccaggatttaatgtaatccagtctcccgagcagatgcaggtgttgctagaccaggccggttgttgtatagtcggccagagtgaacagctggtcccagccgacggaattctctatgccgctagagatgttactgccacagtggactccctgcccctcatcaccgcaagcatcctctccaaaaagctcgttgaggggttatccgctctcgtggtggatgtcaagttcggaggggcagctgtgttcccaaatcaggagcaggcccgagaacttgccaaaaccctggtgggtgtaggggcgagcttgggcttgagagttgcagcagcccttactgccatggataagcccctcggtcggtgtgtgggccatgccttggaggttgaggaggcccttttgtgtatggacggggccgggccccctgatcttagggacctggttacaacgctcggaggtgccttgctctggctctctggccatgccggaacgcaagctcagggtgccgccagagtcgcagccgcattggatgacgggagcgctctgggtcgctttgagagaatgctggctgcccagggcgtggatcctggactggctcgggcactgtgttccggttccccagccgaaagacggcagttgctccctcgcgcccgcgagcaggaggaacttctggctccagcggacggcacagtggaactggtacgcgctctacccctggccctggtactgcatgagctgggggcaggacggtctagagcaggggagcctttgcgtctgggagtcggtgctgaattgctcgtggacgtgggacaaaggctaagacgcggcacgccttggctacgggtccatagggacggtccagcgctgagcggcccccagagcagggccttacaggaagcgttggtgctgtcagatcgagctcccttcgccgccccctcaccatttgctgagctcgtcctgccaccgcagcagtag

SEQ ID NO: 26641 - DNA, 1449 bp, synthetic construct
  misc_feature 1..1449: note = Description of Artificial Sequence: Synthetic coding sequence
  source 1..1449: mol_type = other DNA
atggccgccctgatgacccccggcaccggcgccccccccgcccccggcgatttttccggcgaggggtcccagggactcccggaccccagtcccgagccaaagcaacttccggagctcattcggatgaaacgggacggcgggaggttgtctgaggccgacatccgcgggttcgttgcggccgtggtgaatggttcggcacaaggcgcccagattggagccatgctcatggccatacgtctgcgcggcatggatttagaagagacttcggtgcttacgcaagctctggctcagagtgggcagcagcttgagtggccagaggcctggcgacagcagctggtcgacaagcacagcacaggaggcgttggggataaggtgagtctggttctagcacctgctctagcagcatgcgggtgcaaggtgccgatgatctccggccgcggactcggacatacgggtggaacccttgacaagctcgaatccattcctggatttaatgtcatacagtctccagaacaaatgcaagtactcctggaccaggcaggatgctgtatcgtcggacagtctgagcaacttgtcccggccgacggcatattgtacgcagcgcgcgacgtcactgccactgtagactctctaccactgatcactgcatctatcctgagcaaaaagctagtcgaagggttaagtgccctggtcgtagacgttaaattcgggggcgccgcggtatttcctaaccaggagcaggcccgcgaactcgcaaagaccctcgtaggagttggcgcctctctaggtctaagggtggcggctgctctgactgccatggataagccgctggggaggtgcgttggccatgccctcgaggtggaggaggcgctgctttgtatggacggtgcagggccccccgatctgcgggatttggtcactacactaggaggcgccctcttgtggttgtccggtcatgcgggcactcaggcccagggtgcagctagggtagctgcagcactggatgacgggagcgcactggggcgcttcgagcggatgctggctgcccagggagtcgaccccggacttgcccgagcactctgttcagggagtcccgccgaaagaagacaactgctgcctcgggcacgtgagcaagaggaactgctggcacccgcagacgggacagtcgagcttgtaagagctttgccattggctctggtgctgcacgaactcggagctggcagatctagagccggagagcctctccgcttgggcgtgggggcagagctgctggtggacgtcgggcagcgcctcagacgcgggactccttggctgagggtgcaccgcgatgggcctgcattgtcagggccccagagtagagccctccaggaggctttggtactctccgacagagccccgtttgctgcgccgtccccattcgccgagctcgtgttgcctccccagcagtag

SEQ ID NO: 26642 - DNA, 1449 bp, synthetic construct
  misc_feature 1..1449: note = Description of Artificial Sequence: Synthetic coding sequence
  source 1..1449: mol_type = other DNA
atggccgccctgatgacccccggcaccggcgccccccccgcccccggtgattttagtggcgaaggcagccaaggcttgcccgaccctagccccgagccgaaacaactcccggagctgattcgcatgaaaagagatggaggcaggctatcagaagccgatatccggggtttcgtggccgccgtggtgaacggctctgcccagggcgcccaaatcggtgccatgttaatggcaattcgtctacgcgggatggaccttgaagagacttctgtgttaacccaagcactagcacaaagcggccagcagttggagtggcccgaggcctggagacagcaactggttgataaacattcaactggaggtgttggcgacaaggtgagccttgtcctggccccagcactggcggcttgcggttgtaaagtgcctatgatctctggacggggcttgggccacaccggcggtacgttggataaactggaatcaatacccgggttcaacgtcattcagtcaccagaacagatgcaagtattactcgaccaagcagggtgctgcattgtcggccagagcgagcagctagttccagccgatggaattctgtacgccgcaagggatgtgaccgctaccgtcgactccctgccactgattacagcatctatcctttcaaaaaagctcgtggagggactgtccgcactggttgtggatgttaaatttggcggagcagccgtgtttccaaatcaggaacaggcccgggaactcgcaaagaccttggtaggcgtcggggccagtcttggcctgcgcgtcgctgctgccctcaccgccatggacaaaccgctcggccggtgtgtgggtcacgccctcgaggtcgaggaggcattgctctgcatggatggcgctggaccgccggatctccgcgatctggtgaccaccttaggcggcgcattgctatggcttagcggacacgctggcacacaggcccaaggggcagccagagttgcggcggccctggacgatggttccgcattgggcagatttgagcgcatgctggcagcacagggcgtggacccagggttagcccgggcattgtgtagcgggagccccgccgaaagaagacagttgcttcccagggcgcgagagcaggaagagctcctggccccagccgacgggactgtcgaattggtgcgtgctcttcccctggctctcgtcttacacgaactcggggcaggccggagccgagccggagaaccactgagactcggcgtcggagctgaactactggtagatgtgggacaaaggttgaggagaggcacaccctggttgagggtacatcgggatggacccgccctttccggcccccagtcacgcgctttacaagaggccctggttctcagcgacagagcccctttcgccgccccctctcccttcgcggagctcgtcctgcccccccagcagtag

SEQ ID NO: 26643 - DNA, 1233 bp, synthetic construct
  misc_feature 1..1233: note = Description of Artificial Sequence: Synthetic coding sequence
  source 1..1233: mol_type = other DNA
atggaggccgagaacgccggcagctacagcctgcagcaggcccaggccttctatacgtttccctttcagcagcttatggccgaagcccccaatatggctgtagtgaacgaacagcagatgcctgaagaagttcccgcaccagcccctgcccaggaacctgtgcaggaggccccaaaagggaggaagcgtaagccccgcaccaccgaacctaagcagcctgtagagcctaaaaaacccgtcgagtccaaaaaaagtggaaagagtgccaagtccaaagaaaaacaggaaaagatcacggatacctttaaggtcaaacggaaagtggataggttcaacggcgtttcagaagccgagctcttgactaagacacttcccgacattctcacatttaatcttgacattgtcatcattggcatcaatcctggcctcatggcagcctataaggggcaccactatcccggtccaggaaaccacttttggaagtgcctattcatgtccggcttaagcgaggtgcagctgaatcacatggatgaccatacacttccaggtaaatacggcataggttttactaacatggtcgaaagaaccactcctggctccaaggatctcagctctaaagagttccgggaaggaggcagaattctggtgcagaaattgcagaaatatcagcctcgcatcgccgtgtttaatgggaagtgcatctacgaaatcttcagcaaggaggtctttggagtcaaggtgaagaacttggagtttgggttgcagccgcataagatccccgacaccgaaacgttgtgctatgttatgccgtccagtagcgcaagatgcgcacagttccctcgagcgcaagataaggttcactattatatcaagctgaaggatctccgagatcaactgaaggggatagagaggaatatggacgtacaagaagttcagtataccttcgaccttcagctcgctcaagaagatgcgaagaaaatggccgtgaaggaggaaaaatacgatcctgggtacgaagccgcatacggtggagcatatggcgaaaatccgtgcagtagcgagccctgtgggtttagcagcaacggtttaattgaatcagttgagttgaggggggagtcagccttttcaggcatcccaaacggtcagtggatgacccagtcctttaccgatcagatcccctctttcagtaaccattgtggaactcaagagcaggaggaagagtcccacgcctag

SEQ ID NO: 26644 - DNA, 621 bp, synthetic construct
  misc_feature 1..621: note = Description of Artificial Sequence: Synthetic coding sequence
  source 1..621: mol_type = other DNA
atgatcaccctgtaccagggcagcatggtgctggacctgcccacctggtggaaagggcctaggcctgccgcaaagatttccccaggcatttatgaaatcttttctaaggaggtcttcggtgtcaaagtgaagaacctggagttcgggttacagcctcacaagatccccgacacagagaccctatgctatgtgatgccctctagtagtgctaggtgtgcccaatttccccgcgcacaggataaggtacactactacattaaacttaaagatctgcgggatcagctaaagggaatagaacgtaatatggacgtgcaggaggtgcagtataccttcgatctccagctagcccaggaagacgccaagaagatggccgtcaaagaggagaagtatgatcctggctacgaagccgcttatgggggggcatacggcgagaacccctgctcgtccgagccttgtggtttcagctccaatggcctgatagagagcgtcgaactgcggggcgaatccgcttttagtggtattcccaacggccagtggatgactcaatccttcactgaccagattccctctttttcaaaccactgcggcactcaggagcaggaagaagagagtcatgcttag

SEQ ID NO: 26645 - DNA, 3294 bp, synthetic construct
  misc_feature 1..3294: note = Description of Artificial Sequence: Synthetic coding sequence
  source 1..3294: mol_type = other DNA
atgagcagctgccggagcctgtgctgcggcgacatcagccagagcgcagtgttgtttctgtgtcaggggactttggctatgctggactggcaaaacgggtctatgggaagaagcggtgaagcactcctgctcgacaccgcccacgtgctctttacactgtcttctcagattaaggagcccacccttgagatgttcctgtcaagaatcctggcgagctggacaaatagtgcgatccaggtactagagtcctcatccccctctttaacggatagtctgaatgggaactcctccatcgtcggaagattgctcgagtacgtgtatactcactgggagcaccccctggacgccctcagacatcagactaagatcatgtttaagaacctgcttcagatgcacaggcttacagtggagggggctgacttcgttcctgaccccttctttgtggaacttactgaatcccttctgaggctggaatggcatattaaaggtaaatacacttgcctcggctgcctcgtggaatgcataggagtcgagcacatcctcgctatagataaaaccatcccatcccagatcctggaagtgatgggtgatcaaagcctagtgccctacgcaagcgatctgctggagaccatgttcagaaaccataaatcacatctcaagtcccagactgcagaatcaagctggatagaccaatggcacgagacttgggtttcacctttgctgtttatcctgtgtgaagggaatctggaccaaaaaagttatgtgatcgattattatctgcctaaactgctgtcctattccccggaatctttgcagtacatggtcaagatcctccagacatctattgacgccaagaccggtcaggaacagagttttccttcactgggttcgtgtaactctcggggagcgctgggggccctcatggcctgtttgcggattgcacgtgcccatggccacctgcagagtgcaacagacacatgggagaacctggtctctgatgcaaggatcaagcaagggctgattcaccagcactgccaggtgcgcatcgacacactagggctgctgtgtgagtcaaatcgctcaaccgagatcgtgagtatggaggagatgcaatggattcagtttttcatcacatataatctcaactcacagtccccgggggtgagacagcaaatctgctcactcttgaaaaaactgttctgtcgcattcaagaatctagccaggtgttgtacaaactggagcagtctaaatctaagcgggagcctgaaaatgagttgacgaagcagcatccaagtgtctcgttgcaacagtataagaactttatgagctctatctgcaacagcctcttcgaggctctcttcccggggtcgagctatagcacaaggtttagcgctctcactatcctgggatctatcgcagaagtgtttcacgttccggagggccgcatttacaccgtgtatcaactcagtcatgatattgacgtggggaggttccagactctgatggagtgttttacatcaacctttgaggacgttaagatattggctttcgatctgctgatgaaactgagtaaaactgcagtgcacttccaggacagtggaaagttgcagggcctgtttcaagcagccctggaactgagtacaagcacaaagccctatgactgtgtgacagcgagctaccttctcaacttcttgatctggcaagatgcgctgccctcctccctctcggcatacttaacacagcaggtcgcgtgtgataatggagatcggccggccgctgtggtggagagaaatacactcatggtgataaaatgtctcatggagaatctagaggaggaggtttcacaggcagagaacagcttattgcaggccgcagcggcattcccaatgtacgggcgggtacactgcatcacgggcgccctccagaagttaagcctgaattcacttcagctggtgtctgaatggcgtcctgttgtggaaaagttgctgttgatgtcctatcgccttagcacagtggtgagtccagtcatccagtccagtagccctgaaggacttattccaatggacacagatagcgagtcagcctccagattgcagatgatcctgaatgaaatccagccaagggataccaatgactattttaaccaggcaaagattctcaaggaacatgattccttcgatatgaaggaccttaacgcaagtgttgtaaatatagacacctccactgagattaaaggaaaggaggtgaaaacttgcgacgtaaccgcccagatggtgctggtgtgctgttggcgaagtatgaaagaggttgcacttctcctgggaatgctatgccagcttctccccatgcagcccgttccggaaagcagcgatggcctgttgactgtcgagcaggtcaaagagatcggagattattttaaacagcacttattgcagagtcgccacagaggtgcgtttgagctcgcttatacagggtttgtgaagctgacagaggttctgaatagatgccctaacgtcagtctgcagaaactcccagagcaatggctgtggtccgtgctggaggagatcaaatgcagtgacccatctagcaagttgtgcgccacccggcgctctgccggcatcccgttctacattcaggccctccttgcgtcagagcctaagaaggggcgaatggatctgctgaagattaccatgaaggaactgatttctctggccgggccgacagatgacatccagagtacagtaccacaggttcacgccctgaatattctacgggccttgttccgagatacaaggcttggcgaaaatatcatcccttacgtggcagatggagccaaagcagctatattaggctttacaagccctgtgtgggccgtgcgcaacagcagtaccctcctcttcagtgcactaatcacacgtatttttggggttaagcgcgccaaggacgagcactcaaaaaccaaccgaatgactggacgcgaattcttctcaaggttccccgagttataccctttcctcttgaaacagctggaaaccgtcgctaatacagtggattctgatatgggggaacccaatcgccacccatcaatgttcttactcctcctggttcttgagcggctctacgcatccccaatggacggcacatcttctgcgctcagcatgggaccttttgtgccatttattatgcgcgtgctcctctgttgcccaggttggagcgctgtagcgcggagccagcttaccgcaacctctacctcatgggtgcaggccattctccttccccagccccccgagtag

SEQ ID NO: 26646 - DNA, 5643 bp, synthetic construct
  misc_feature 1..5643: note = Description of Artificial Sequence: Synthetic coding sequence
  source 1..5643: mol_type = other DNA
atgggcgtgaagaagaagaaggagatgcaggtggccgccctgaccatatgccaccaggacttggaaacactcaagagtttcgccgacgttgagggcaaaaaccttgcatcactcctccttcactgtgtccagctgacggacggcgtgtcccagattcattacattaagcaaattgtgccactgctcgaaaaggctgataagaatggaatgtgtgatcctacaattcagagctgtctggacattttagcgggtatctatctctctctgtcacttaagaatcccttgaaaaaggtcctagcttctagcctgaattccctgcccgactttttccttcctgaggctatgcaccgtttcacaagccggttgcaagaagagcttaatacaactgacctatactcttacaggaaggttacggacaatatctcatcatgcatggagaacttcaatctcggcagagccagcgtcaataacctcttgaagaacgtgctgcactttctgcagaagtcactcatagagatattagaggagaatagaaagtgtgctggcaaccatataattcaaactcaactaatgaatgatctcctggtaggcattagggtgagcatgatgctcgtccagaaagtgcaggacttccagggaaatctgtggaagacttccgactcccctatctggcaaaacatgtgcgggctgctctctattttcacgaaggtgctcagcgatgatgatttgctgcaaacggtgcagtcaacctccggtctagcgatcattctgtttattaagaccatgtttcatccatccgagaaaatccctcaccttattagttcagtgctactcaggagtgtggattgtacaagcgtgcctgagtggttcatgtccagctgcaggagtctctgctgtggggatatatcacagagtgccgtactttttctatgccaaggaacgctggccatgctggattggcagaacggatctatggggcgctctggagaggctttactactagacacagcacacgtattgttcaccctttccagccaaattaaggagcctactctggagatgtttctgagtcgaatcctcgcttcgtggactaattccgcgattcaggtgctcgagagtagctccccctctctgaccgatagtttgaacggcaacagcagtatcgtgggtcgtttgttggaatacgtatacacgcattgggaacaccccctagatgctttgcgccatcagaccaagatcatgtttaaaaacctcttgcaaatgcatcgccttacagttgagggtgccgactttgtccctgacccgttctttgtggaattaacggaatccctcctgcgtttagagtggcatattaaaggcaaatacacttgcttgggatgtctcgtagagtgcatcggcgtggaacacattcttgccatcgacaaaactatcccaagccaaatactcgaagtcatgggggatcagtcacttgtgccttacgcttcagacctccttgaaaccatgttcagaaaccacaagagtcatttgaagagtcagacagccgaaagctcttggattgatcaatggcacgaaacttgggtgtcaccgctcttgtttatcctatgcgagggtaacctggaccagaaaagctatgttattgattactacttgcctaagctcttatcctattctccagaaagcctgcagtatatggtaaagatcctgcagaccagcatcgacgcaaagaccggccaggaacaaagcttcccatccctgggctcctgcaacagcagaggggcactcggcgctctaatggcctgcctcagaattgctagagcacacggacacctgcagtcagcaaccgatacatgggagaacctagttagcgatgcccgtattaaacagggcttaattcatcagcactgccaagtgcggatcgatacactcggcctcctgtgcgaatctaatcgctccaccgagattgtgtccatggaggaaatgcagtggatccagttcttcattacatataacttaaactcccagagcccgggggtgcgtcagcagatctgcagcctgctaaagaagaaactcttctgtcggatacaagagtcatctcaggtgctgtacaagctggagcagagcaaaagcaaaagagagcccgagaatgagttgacaaagcagcatccatctgtgtctctacaacagtacaaaaattttatgtctagcatctgcaacagtttatttgaggccctgtttcctggcagctcctactccacccgctttagcgcgctcaccatcctggggtcaattgcggaagtgtttcatgtcccggagggacggatctatacggtttatcagctgtcccacgacattgacgtaggacggttccagaccttaatggagtgtttcaccagcaccttcgaggacgtgaagattctagcattcgatctgttgatgaagctttcgaaaacagctgtgcattttcaagactccggcaaactccagggtctgtttcaagcagcactggagctgtctacctcaacaaagccctacgattgcgtcacagcctcttacctcctcaacttcctcatctggcaggatgccctgccctcttccctgagtgcctatctcacacaacaggtcgcctgcgacaatggagatcgtccagcagccgtggtcgagagaaacaccttaatggttatcaagtgtttaatggagaacctggaagaggaggtgtctcaagcggaaaattccctgctccaagccgccgccgcatttccgatgtatggacgcgtgcactgcattacaggagctctgcagaaattgagcttgaatagtttgcagctagttagtgagtggaggcccgtggtcgagaagctgctgctcatgtcttatagattatctacagtggttagtcccgtaattcagagtagctcacctgaggggttaattcccatggatactgacagtgaaagcgcgtcccgtctgcagatgatactgaatgagattcagcctagagatactaatgattactttaatcaagccaagatcctcaaggaacacgacagctttgatatgaaggatttaaacgcctccgtcgtgaatatcgacacctctactgagattaaaggaaaagaagtaaagacttgtgacgtgactgcacagatggtccttgtgtgttgctggcgctctatgaaagaagtggccttacttctgggcatgctgtgccagctgctgccaatgcagcctgtgcccgagtcatctgatgggttactcacggtcgagcaggttaaggagataggagactactttaaacagcacctgctccagtctcgtcatagaggcgcgttcgaactggcttatacgggatttgtgaaacttactgaggtactgaatcggtgccctaatgtatctctgcagaagttgccagagcagtggctgtggtccgtgctcgaagaaattaagtgttccgacccttcctcaaagctatgtgccacccgaagatccgctgggatccccttttacatacaggctctgctcgctagcgaaccgaagaagggcaggatggacctcctcaaaattaccatgaaggaactcatctcgttggccgggcccaccgacgacatacagagtacagttccccaggtgcatgccttgaatatactgcgcgccctctttcgagatacccgccttggggagaacataataccttacgtggccgacggtgccaaagcggcgatcttaggattcacctcaccagtttgggccgtgagaaacagcagtaccttattgtttagcgctctaattaccaggatattcggagtgaaaagggccaaggacgaacactctaaaaccaacaggtgtggccactctcccgtttatcactcccgggagatggccgctagagcactggtaccatttgtgatgattgaccatattcccaatactattaggactctgctaagcactctgccttcatgcacagaccagtgttttcgtcagaaccatatacacggcacacttttacaggtctttcacctcctgcaggcgtacagcgactctaagcatggaacaaatagcgactttcagcacgaactgactgacatcacggtctgtactaaagcaaagctttggctggctaaaagacagaacccgtgtttggtgactcgcgccgtatatatcgatatcctgttcttgctgacatgctgtctcaatcggagcgccaaggacaaccagcctgtgttggagagtctgggattttgggaggaagtgcgcggtatcatatccgggagcgaactgattactggatttccctgggccttcaaggtccccggccttcctcagtatttgcagagccttactagacttgcaattgccgctgtatgggcagccgcagcaaagagcggcgagcgggagaccaatgtgccgatttcctttagccaactcctggaatctgcttttcccgaagtaagatcactgactctggaggcccttttggaaaagttccttgctgctgccagcgggctaggggagaagggagttcctcctctactttgtaacatgggtgagaaattcctcctgcttgctatgaaagagaatcaccccgagtgtttctgcaagattctcaaaatcctgcactgcatggacccaggcgagtggctgccccaaacagaacattgtgtgcacctaactccaaaggagtttttgatctggacaatggacattgcctcaaacgagcgctccgagattcaatccgttgctcttagactggcttccaaagtgatttctcaccatatgcagacatgtgttgagaaccgagagctcattgccgctgagcttaaacagtgggttcaattagtcatcctatcctgtgaggatcatctgccgactgaaagcagactcgcagtcgtggaagtgctgacatcaaccaccccactctttctcactaacccgcaccctatcctggagctgcaggatactctggccctttggaaatgtgtgcttaccttgctgcagagcgaagagcaagctgtgagagacgctgctacagagactgtgacaacggcaatgagccaggagaacacatgtcagtccactgagtttgccttctgtcaagtcgatgcctccatagctctggcgctcgcattggccgtcctgtgcgacttgttacaacagtgggaccagttagccccaggattgcccatcctactgggatggcttctgggagagtccgacgacttagttgcttgcgtggagtccatgcaccaggtcgaggaggactatttgtttgagaaggctgaggtcaatttctgggccgaaacattgatttttgttaagtatctatgtaaacacttgttctgtctgctgtcgaagtcaggctggcggcccccaagccctgagatgctctgccatctccagcgaatggtgtcagagcagtgtcatctgcttagccagtttttccgagaactaccaccagccgctgaattcgttaagaccgtcgagtttacacgtctacgaatccaggaagagagaaccttagcctgcttgaggctgcttgcattcctagagggaaaggaaggagaagatacgctcgtgctctccgtgtgggactcgtacgcagagtccagacagctcacgctgccacgcaccgaggccgcctgctag

SEQ ID NO: 26647 - DNA, 5862 bp, synthetic construct
  misc_feature 1..5862: note = Description of Artificial Sequence: Synthetic coding sequence
  source 1..5862: mol_type = other DNA
atgggcgtgaagaagaagaaggagatgcaggtggccgccctgaccatctgtcatcaggatctcgagacactcaaatctttcgccgacgtggaggggaaaaacctagctagtctgctgctgcactgcgtccagctgacggacggtgtgtcccagatccattacattaaacaaatcgttcccctgctggagaaagccgataaaaatggtatgtgtgatcctaccattcagtcttgcctggatatactcgcggggatctacctttccctgagcttaaaaaacccactgaaaaaggtgctggcgagctccttgaatagcctccccgactttttcctgccagaggcaatgcatagatttactagtcggcttcaagaagagctcaatactacagacctctacagttaccgaaaagtgaccgacaacatctcatcctgtatggaaaattttaacctcggaagggcaagtgttaataacctgctcaaaaacgtgttgcattttcttcagaagtccctgatagagatcctcgaggagaataggaagtgcgctgggaaccatataattcaaacgcagcttatgaatgaccttctcgttggcatacgcgtatccatgatgctggtccagaaggtccaggattttcagggaaatctgtggaaaacttctgactcacccatttggcagaatatgtgtggacttctgtccatttttactaaagtgctgagcgacgatgatctccttcagaccgtacagtccacatccggtctcgctatcatacttttcataaaaactatgttccatccctctgagaagatcccccacttaatctcaagtgttttgcttcgatctgtggattgcaccagcgtacctgagtggttcatgtcctcttgtaggagcttatgctgtggggacatctctcagtccgcggtgttgttcctttgccagggaactctggcaatgctggattggcaaaacggctcgatgggaaggagcggagaggcactgctgctggacacagcccatgtgctgttcactctaagttcacagataaaagaaccgacattggagatgtttctgagcagaatccttgctagctggacaaactctgccattcaggtgctggagtcctcctccccatcactgacggactccctgaacggcaactcttccatagttggaagactgctcgaatacgtttacacacattgggagcatccactcgacgctctgcgccaccagaccaaaatcatgtttaagaacttgttgcagatgcatcgccttaccgtagagggcgcggatttcgtaccagacccgttctttgtcgaattgaccgaaagccttctgcgtctggagtggcacataaaggggaagtacacttgtctcggctgtttagtggagtgcattggcgtggaacatattctggcaattgacaaaaccattcctagccagatcctagaggtcatgggcgaccaatctcttgttccttatgcgtccgatcttttggagaccatgtttcgaaaccacaagagccatctgaagtcgcagaccgccgagagttcatggattgatcaatggcacgaaacctgggtctctccactcctttttatattgtgtgagggcaacctcgaccaaaagtcctatgtcattgattactacctcccaaagcttctctcctacagccctgagtccctccagtatatggttaagattcttcagacctcaatcgacgccaagaccgggcaggagcagtcttttcctagccttggatcctgtaattcgcggggcgcgcttggagctctaatggcctgccttaggatcgccagagcgcacggacatctgcaaagcgctacagatacatgggaaaacttagtgtccgatgcccgcatcaaacaggggcttatccatcagcactgtcaagtgcgtatagataccctggggcttctctgtgagagcaatcggtccacagaaatcgtgagcatggaggaaatgcagtggatccagttttttattacatacaatttgaatagccagagtccaggagtgcgtcaacaaatatgcagcctactcaaaaaactgttttgcaggattcaggaaagcagccaagttttgtacaaactggaacaatctaagtccaagcgagagcctgagaacgaactcacgaagcagcaccctagcgtgagcctgcaacagtacaaaaactttatgtccagcatttgtaacagtctcttcgaagctctgtttccaggatcaagttacagcacacggttctccgccctcacgatcctgggatccatcgctgaggtctttcatgtgcccgaaggaaggatttatacggtataccaactgtctcatgacatcgacgttgggaggtttcaaactttaatggagtgcttcacatctacattcgaggatgtgaagatcttagcttttgacttgttgatgaagttgtctaagaccgctgttcacttccaggactccggtaagctccaggggctgttccaggccgctctcgagctctctacttcgacaaaaccatatgattgtgttaccgcatcctacctgttgaacttcctcatctggcaagatgcactgccctccagcctttcggcatacctgacacagcaagttgcttgcgataacggcgatcggcctgccgctgtggttgagcggaatactttgatggtgattaagtgtcttatggagaacttggaggaagaggtatcccaggccgagaattctctcctgcaggccgctgccgcttttcccatgtacggccgcgttcactgcataactggtgccttgcagaagctgtccctaaacagtctgcaactggtcagcgagtggcgccctgtcgtcgaaaaactgctcttaatgtcctatagactgtctactgtcgtgagcccagtgatacagtccagcagcccagaggggctcatcccaatggatacggactctgagtcagcaagccgcctgcagatgattcttaacgaaatccagcctagggatactaacgattatttcaaccaggcaaaaatcctgaaggaacacgactcgttcgatatgaaagatctcaacgcgagcgtagtgaatatcgacaccagcacggagatcaagggcaaggaggtcaaaacctgtgatgtgacagctcagatggtcttagtgtgctgctggcgctctatgaaggaagtggctctgttactgggcatgttatgtcagctgctcccaatgcagcctgtccccgagagttctgatgggttgctgacagttgaacaggtcaaggagatcggagattacttcaaacagcacctgctgcaatctaggcacagaggggctttcgagctcgcttacaccggctttgttaagttgactgaagtgctcaaccgatgccctaatgtttcactacagaaactgcccgaacagtggttatggagcgtcctagaagagattaagtgctccgatccatcctccaaactgtgcgctacaaggcgtagcgccgggattccattttatattcaagctctgttggcttcagagcctaagaagggtcggatggatctattgaagattacaatgaaagaactcatctcactcgcaggacctaccgatgatattcagtccaccgttccacaagtccatgccctaaatattctgagagcacttttcagagatacgaggcttggtgaaaatattataccatatgtggctgacggcgctaaggctgcgattttaggcttcacctcaccagtctgggcggtgcggaatagctcaactcttctcttctccgcactcatcacacgtatcttcggtgtgaagcgggctaaggatgagcattctaaaactaacagaatgacaggcagggagttctttagccggtttccagaactgtatccgtttctgctgaaacaattggagaccgtggccaacaccgtggattcagatatgggcgagcctaatagacatccctcaatgtttctgttattgctggtgttggagagactgtatgcctcccctatggatggcacctcttctgccttatccatgggaccctttgtgccattcattatgagatgtggccatagtcctgtctaccattcccgcgagatggccgcaagagcactggtacctttcgtcatgatcgaccacattcccaacactatacgcacattgctgtccaccttgccatcctgcacagaccagtgttttaggcaaaatcacatccacggaacactgttacaggtgttccatctgctgcaagcctacagcgattcgaaacatggaacgaattcggacttccaacacgaacttacggacattaccgtctgcactaaagccaagctctggttagccaagcggcagaacccatgtttggtgacccgggcggtgtacatcgacatacttttcctgcttacttgctgtcttaacaggtctgctaaagataaccagccagtcctggaatcgctgggattctgggaggaagtgcgaggaatcatctccggtagcgaactgatcaccgggttcccttgggctttcaaagtacccgggctgccccaatacctgcagtcattgacacggctagctattgcagccgtctgggcagccgcagctaagtcaggggaacgcgagacaaacgttccaatctccttttctcagctgttggagagtgcttttccagaggtgcggagtctcactctggaggctctgctggagaagtttctggccgcagcttccggacttggcgagaaaggggtgccccctctgctgtgtaatatgggggaaaagttcctcctcctggccatgaaagagaaccatccggagtgcttttgcaaaatcttgaagatactgcactgcatggatcccggcgagtggctgccacagaccgagcattgcgtgcacttgactccaaaagaattcttaatatggaccatggacattgccagtaatgagcgcagtgagatccagagcgtggccctcaggctggcctctaaagtgattagccatcatatgcagacctgcgtagaaaatagggaactgattgctgctgagctcaagcaatgggtccaacttgtgatcttgtcgtgcgaggaccacctgccaacagaaagtcggctcgcggtcgtagaggtgcttacttcaacaacccctctcttcctaacgaatcctcatcctatcctcgagctgcaggataccctggccctttggaaatgcgtcctaactctgctacagtcggaagagcaggcggtccgcgacgccgcgaccgagaccgtgacaacagcgatgtctcaggagaacacttgccaatcgacagagttcgcattctgccaagttgacgcctctattgcactcgccctggccttggccgtgctttgcgatctgctgcagcagtgggaccagctggcccctgggcttcctattctgctaggatggttgctgggagaaagtgacgatttggttgcttgtgtggaaagtatgcaccaggttgaggaggactacttgttcgaaaaggccgaggtcaacttttgggccgagactctgatcttcgtcaagtatctgtgcaagcatctgttttgtttgttgtcaaaatccggatggcggcccccatctccagagatgttatgccacctacagcggatggtgagtgagcagtgccacttgctgtcgcagtttttccgggagctgcctccagcagccgagtttgtgaagaccgtcgaatttactcgcctccgaattcaggaagaaagaaccctggcttgtctacggctcttggcatttctcgaagggaaagaaggcgaggacacactggtgctgagtgtctgggattcttatgccgaatctcggcaactgaccttgcctagaaccgaagcagcttgttag

SEQ ID NO: 26648 - DNA, 5862 bp, synthetic construct
  misc_feature 1..5862: note = Description of Artificial Sequence: Synthetic coding sequence
  source 1..5862: mol_type = other DNA
atgggcgtgaagaagaagaaggagatgcaggtggccgccctgaccatttgtcatcaagacctggagactttgaaatcatttgcagatgtcgaaggcaaaaacctcgccagcctgctgctccactgcgttcagctcactgacggagttagtcagatccactatatcaagcaaatcgtacccctactagaaaaggctgacaaaaatggaatgtgcgaccccacgatccaaagttgtctggatatccttgccggcatctacctgtctctcagtttgaaaaacccactcaaaaaagtgctcgcatcctctttaaatagcctacccgatttttttttgccggaggctatgcacaggttcacttcaagactgcaggaagagcttaatacaactgatctgtatagttatcgaaaggtgactgacaacatatcttcctgtatggagaatttcaatctggggagagcctcggtaaacaaccttctaaagaatgtgcttcactttctgcagaagtccttgatagaaattctggaagagaaccggaaatgcgccgggaatcatatcattcagacacagctgatgaacgaccttctggtaggcatcagagtctccatgatgctagtccagaaagtacaggatttccaggggaacctttggaagacatcggactccccgatatggcagaacatgtgcgggttactgagtatattcaccaaagtcctgtccgatgacgacctgctgcagactgtccagtcaacaagtggcctcgcgatcatacttttcattaaaacgatgttccaccccagcgaaaagattccccacctaatatcttctgtcctcctgagatctgtggattgcacatcagttcccgagtggttcatgagttcttgtcggagcctgtgttgcggtgacatttctcagtccgcagtgttgttcctgtgccagggcacactggccatgctggattggcagaacggcagcatgggtcggtccggagaagccctgctcctagatacagctcacgtgctctttacactatcctctcagatcaaggaacccactctagagatgttcctgtctaggatattggcctcttggaccaactctgcaattcaggtcttggagtcctcgtccccttctcttaccgattccctgaacggaaatagtagcattgtgggacggctcctcgagtatgtgtacacacactgggaacatcctcttgatgccctcaggcaccagaccaagattatgttcaagaatctgctgcagatgcataggctcacagtggagggagccgattttgtacccgatcctttcttcgtcgaacttacggaatccttattgcgtttggagtggcacattaaggggaaatatacctgcctaggctgcctggtggaatgcatcggtgtcgagcatatcctggcaatagataaaacgatcccgagccagattttggaagtaatgggagaccagtctttagtgccctacgcctcagatcttcttgagacaatgttccggaatcataagtcccacctcaaatcccaaaccgctgagagctcctggatcgaccagtggcacgaaacctgggtctctccactgcttttcattctctgtgaaggtaacctggatcagaagtcatacgtgattgattactacctgcccaagctgctcagttactccccagagtctttgcaatacatggtaaagatcctgcagacctctatcgacgcaaagactggtcaggaacagagcttcccgagcctgggctcatgtaatagtagaggagctctgggtgccctcatggcatgccttcgcatcgcgagagcccacgggcacttacagagtgcaacagatacatgggagaacttagtctccgacgcaagaatcaaacagggactcatccatcagcactgtcaggttcggatcgacactcttggtttactgtgcgagtccaatcggagcacagagattgtatctatggaggaaatgcagtggatccagttcttcatcacttacaacttgaactcccaatcccccggcgtcagacagcagatctgctcattacttaagaaactgttctgccggattcaggaatcatcacaagtgctgtacaagttagagcagtccaagtctaagagagagcctgaaaacgagctcactaaacagcacccttcagtgagcctacagcagtacaaaaactttatgtcatcaatctgtaatagcctttttgaagcgctgtttccaggatcctcttatagcacacgcttttccgctctgactatcttggggtccattgccgaagtgtttcacgtccctgagggtcggatatatacagtgtaccagctctcccatgatattgatgtggggcggttccagacactgatggaatgtttcacctcgacattcgaggacgtgaagattcttgctttcgatctgttaatgaagcttagcaagactgcagtccatttccaggactcaggaaaactgcaagggttgtttcaggctgccctcgaactgtcaacttctacgaagccttacgactgcgtcactgcttcttacttgctgaacttcttgatttggcaggacgccctgccgtcctctctctctgcgtatctcacccagcaagtggcttgtgacaacggggaccgcccagctgcagtggtggaaagaaacaccctcatggtgataaaatgtctgatggaaaatctcgaggaggaggtcagtcaggcagagaacagcttactgcaggccgcagcggccttcccaatgtacgggcgcgtgcattgcatcacaggagcactgcagaagttgagcttgaatagcttacaacttgtctctgagtggcgtcccgttgtagaaaaactactcctcatgtcatatcgactgtccaccgtcgtgtctcccgtgattcagagcagctcacccgagggactgataccgatggacaccgacagcgagagtgccagcagacttcagatgatcctgaatgaaattcagccacgagatacgaacgactacttcaatcaggctaagattctgaaggagcatgactcttttgatatgaaggatctgaatgcatcggtggtgaacatcgacacaagtaccgagatcaaaggaaaggaggtgaaaacctgtgacgtcacagcacaaatggtgctggtgtgctgttggagatccatgaaagaagttgcgctcttgcttggaatgctgtgccagctgctaccgatgcaaccagtgcctgaatctagtgatgggctgctaactgtcgaacaggtaaaggagattggcgattacttcaagcagcatctcttgcagtccagacaccgaggagccttcgaactggcttacacaggttttgtgaaactgacagaggtgctgaacaggtgtccgaatgtgagcttgcagaaattacctgaacagtggttgtggtccgtactggaggaaattaaatgttctgatccatctagcaagttgtgcgccactcgcagatctgctggaatccctttttatatccaggctctactagctagcgagcccaagaaaggtcgcatggatcttctcaaaattaccatgaaagaactcatatccctcgccggcccaacagacgatatccagtccactgtgccgcaggtacacgccttgaacatcctcagggcgctctttcgcgatactcgcttgggcgaaaatatcatcccttacgtggccgacggtgcaaaagctgccatactggggttcacaagcccggtgtgggctgttcgaaattcgtcaacgctactcttcagcgcactcatcacgagaattttcggggtgaagcgcgcaaaagacgagcactccaagaccaaccggatgacagggcgcgagttcttctctcggtttcctgagctgtatccatttctgctcaaacaattagagaccgttgctaacaccgtcgattcagacatgggagagccgaatcgccatccatctatgttcctccttttactcgtgctggagcggctttacgcttcccccatggacggcactagctcagccttgtctatgggccctttcgtaccgttcatcatgcgctgcgggcattcccccgtgtatcactctcgtgaaatggctgctagagctctggtgcccttcgtaatgatcgatcatatccccaacactatcaggacattgctgtcaacactccccagctgcacagatcagtgctttcgtcagaaccatatccacgggacactcctgcaggtgttccacctgctgcaggcttatagcgactctaaacatggcactaattctgacttccagcacgagctgacggatatcactgtgtgtacaaaggcaaaactatggctcgcaaaaaggcaaaatccatgtcttgtgaccagggccgtctacatcgatatcttatttctgctgacatgttgcctcaatagatctgcgaaagacaaccagccagtgctcgaaagcttgggcttctgggaggaagtcagggggataattagtggatccgagttaattacagggttcccttgggcatttaaggtgcccggtttgccacagtatttgcagagcctgacaaggttagccatagccgccgtgtgggccgccgccgctaaatcgggagagagggaaactaacgtacctatctccttttcacagctcctggagtctgcattccccgaggttaggtccttaacgctggaggcgctactggaaaagttcttggcagccgccagcggcctcggagagaaaggcgtgccacccctattgtgcaatatgggtgaaaaattccttcttctggctatgaaggagaatcaccccgaatgtttctgcaagattctcaagattctgcattgcatggaccccggagagtggctcccgcagactgagcactgtgtccatctgaccccaaaggaatttctgatctggacaatggacatcgcctccaacgaaagatcagaaatccagagtgtggccttacgcctcgcctccaaagtgatctctcatcatatgcaaacctgcgtggagaacagggaacttatcgctgctgaactcaagcagtgggttcagctggtgatcttgagttgtgaggaccacctgccgactgaatcaagactggctgtcgtagaggtgcttacctccacgaccccactgtttctcactaatcctcatcctatactggagctccaggatacccttgctctgtggaaatgtgtgctcacgctcttacagtcagaggaacaggccgttcgggatgcggcaaccgaaacagttaccactgccatgtcacaggagaatacatgccagagcacagaatttgcattctgtcaagtggacgcatccattgctctcgccctagccctggctgtgttgtgtgacttgctgcagcagtgggatcaattagcccccggcctgccaattctcctgggctggcttttgggcgagagtgacgatcttgtcgcctgcgtggagagcatgcaccaagtggaagaggactaccttttcgagaaggcagaggttaatttctgggctgaaacattaattttcgtgaagtatctgtgtaagcacctcttctgtttattgtcaaagtccggttggcgccctccgtcgccagagatgctgtgccacctccagcggatggtgagcgagcagtgtcacctactctcacaattttttcgcgagctgccccccgctgctgagttcgtaaagaccgttgagttcacccgactgaggatccaagaggagagaaccctggcatgtctgagacttctggcatttttggaaggtaaagagggcgaggataccttggtcctcagcgtgtgggattcatacgctgagtcccgtcaactcactttaccgaggaccgaggctgcttgttag

SEQ ID NO: 26649 - DNA, 4905 bp, synthetic construct
  misc_feature 1..4905: note = Description of Artificial Sequence: Synthetic coding sequence
  source 1..4905: mol_type = other DNA
atgagcagctgccggagcctgtgctgcggcgacatcagccagagcgcagtgctcttcctatgtcagggaaccttagctatgctcgactggcaaaacggttctatggggcgcagtggcgaagccctcttactcgacactgcccatgttctgtttacattgagttcccagattaaggagcctactctggaaatgttcctgtccagaatccttgcctcctggactaactcagctatccaggtacttgagtcctcctctccctctttgactgacagcttgaatggaaacagttcaatcgtcggccgcttattggagtatgtgtacacacactgggaacaccctcttgatgcccttaggcaccaaaccaagattatgttcaagaaccttctgcagatgcacaggctcaccgtcgagggcgcagactttgtccccgaccctttttttgtcgagctcacagagagccttcttagattggagtggcatatcaaaggcaaatacacatgcctgggctgtctggttgaatgcattggcgtggagcacattctcgccatcgataaaactatacctagccagatcctcgaggtcatgggcgatcagagcctcgtgccctatgctagcgacctcctggagaccatgtttcgcaaccacaaaagccacctcaagtctcagaccgctgaatccagctggattgaccagtggcacgagacgtgggtgagccctcttctgtttatcctgtgtgaagggaacctggaccagaaaagctatgtcatcgattactacctacctaagctcttgtcttactctccagagagtttacaatatatggtgaaaatcctgcagaccagcatcgatgcaaaaacaggccaggaacagagcttccccagtctcgggagttgcaattctaggggggctctcggcgccctgatggcctgtttgaggatagcgcgcgcccacggacaccttcaatccgccaccgacacatgggaaaacttggtttcagatgcccgaatcaagcagggtctcattcaccagcattgccaagtacgcatagacacattgggtctgttgtgcgagagcaacaggagtacggagattgtgagtatggaggagatgcaatggatccaatttttcatcacatacaatcttaatagtcaatcccctggggtgcggcaacagatttgctccctcctcaagaaattattctgccgtatccaggaatcctcacaagtgttgtacaagcttgaacagagcaaaagtaagagagaacctgaaaacgagttgacaaagcagcatccttccgttagtctgcagcaatataagaatttcatgagctcaatctgtaattccctgttcgaggccctctttcctggatccagttattcaacccgcttttccgctcttaccatattgggtagcattgctgaggtcttccacgtccccgagggacgtatatacaccgtttaccagttatctcatgacatcgacgtcggaaggttccagactctcatggaatgctttacttccacgttcgaagatgttaagatcctcgccttcgatctgctgatgaagctgtcaaagacggctgtccacttccaggactccgggaaactacagggcctgtttcaagccgcactggagctgtcaacctctaccaagccgtatgactgcgtgactgcctcctatctgctgaatttcctaatttggcaagatgccctgccctcttcactttccgcctacctgacacaacaggtggcgtgcgataacggcgacagacctgctgctgtggtggagaggaacacactgatggtgatcaaatgtctgatggaaaacctggaagaagaagtcagccaagctgagaactctctgctgcaggctgccgccgctttccccatgtatggccgagtacactgtattacaggggcccttcagaagctcagcctgaactctctacagctagtgtctgagtggagaccggtggtcgaaaaattgctgctcatgtcctacagactgtcgacagtggtgtcccccgtgatccagtccagtagccccgaggggctcatacccatggacactgattccgagtctgcttcaaggctccagatgattctcaacgagattcagccccgtgataccaatgactacttcaaccaggcaaagattctgaaagaacacgattccttcgatatgaaggatctgaacgcttcagtggtgaatattgacacgtcgaccgagattaaaggcaaggaggtgaaaacctgcgatgttacagcccaaatggttcttgtgtgctgctggcggtctatgaaagaggttgcccttctgttagggatgctatgccaactgctgccaatgcagcctgtgcccgagtcttccgatggtctgctaactgtagagcaggtcaaagagatcggcgactacttcaaacagcatctgctgcagtctcgccataggggagcattcgaactggcctacactgggttcgttaaacttactgaagtgcttaaccgttgcccaaatgtgtcgctacaaaaacttcctgagcaatggctgtggagcgtgctggaggagattaaatgcagcgaccccagttcgaagctgtgcgccacgagaagaagtgcaggcatcccattctatatccaggctctgctggcaagtgaacctaagaaaggacgcatggatctgctgaaaatcacgatgaaggaattgatttcactcgcaggccccactgacgatattcagtccaccgtgccacaggtacatgccttgaacatcctgcgggcactgtttcgggataccagacttggcgagaacatcattccgtacgtggcagacggggcaaaagcggccatactgggcttcacttcccccgtgtgggcttcacagatgacagggagagaattcttttctcgatttcccgaattgtatcctttcttactgaagcaattggagactgttgcgaacacggtggactccgacatgggcgaacctaatagacacccttctatgttcttgctgttactggtgctcgaaaggctgtatgcaagtcccatggacggtaccagttcagccttgtccatgggcccttttgtgccctttattatgcgttgcggacactcacctgtgtaccactctcgcgaaatggccgctcgcgcactggtaccttttgtgatgatagaccacattcccaacaccattagaaccttgctgtccactctgccatcgtgcaccgaccagtgttttcgccagaaccacattcatggaacactgctccaggtgttccacctactgcaagcatacagcgactccaaacacggcactaacagcgattttcagcatgagctgactgacattacagtttgcacaaaggccaagctgtggttggccaagcgccagaacccgtgtctggtgacccgggcggtgtacatagacatcttgtttctactcacatgttgtctgaataggtctgccaaggacaatcagcctgtgctggaatccctgggattttgggaagaagtgcgagggatcatttctggatccgagctgattacggggtttccttgggcattcaaagtgcctggcctcccccagtatttgcaatcccttactagacttgcgatcgccgccgtgtgggccgctgccgccaaaagcggtgagcgggagaccaatgtgccaatctccttttctcagttgctggagtctgcttttccagaggtcagatctttgactttggaagcactgttagaaaagtttctcgccgctgcctcgggtttgggggaaaaaggagtaccaccactcttatgcaatatgggcgaaaaatttctgctcttggctatgaaggagaatcatcccgagtgtttttgtaagattctgaaaatcctccactgcatggatcccggggagtggcttcctcagaccgagcactgtgtccaccttacacccaaagaattcttaatttggacaatggacatcgcctccaacgagcgcagcgagattcagagcgtggccctccgtctggcttccaaagtgatatcacaccacatgcagacctgcgttgagaaccgagaactcatagccgccgagctaaagcaatgggtccagctagtgattttatcgtgtgaggaccatctgccaactgagagccgcctggctgtggtggaggtcctcacgagcactaccccactgttcttaaccaatcctcatcccatccttgagctgcaagacaccctagctctgtggaaatgtgtgcttaccctgctgcagagtgaggagcaggcagtgagagacgcggccaccgagaccgtgacgacggccatgagccaggagaacacatgccagtcaaccgaatttgctttttgtcaagttgatgcaagtatcgcgctcgcactcgctttggctgtgttgtgcgacctgttgcagcaatgggaccagttagcccccggtctgccaatactcctgggatggctgttgggggagtcagatgacttggtggcgtgcgtcgaaagtatgcatcaggtggaagaagattacctctttgagaaagccgaggttaatttttgggccgagactctgatctttgtgaaatacctttgtaaacatctcttttgtctgcttagtaagtccggatggaggcctcctagcccagaaatgctgtgccatttacaacggatggtgtccgagcagtgccatctgctgagccagtttttccgagagctgccacctgcagcggagtttgtaaagacggtcgaatttacaaggctgaggatccaggaggagcgaactttggcctgtttgaggttactggcttttctggaagggaaagagggcgaggatacactggtgctgagcgtttgggatagctacgccgaatcacgccaactcacactgccgcgcactgaggccgcctgctag

SEQ ID NO: 26650 - DNA, 2685 bp, synthetic construct
  misc_feature 1..2685: note = Description of Artificial Sequence: Synthetic coding sequence
  source 1..2685: mol_type = other DNA
atgggcgtgaagaagaagaaggagatgcaggtggccgccctgaccatctgtcaccaagacctggaaacactcaaaagcttcgcagatgtagaagggaaaaatcttgccagcctcttactccattgtgttcaactaaccgacggcgtgagccagatccattatatcaaacagattgtgccgctactcgagaaggctgacaagaacggaatgtgcgatccgactatacagagctgcctggatattctggcagggatttacctcagcctatcccttaagaaccccttaaagaaagtgctggcaagtagcctgaacagcctgcccgactttttcctgcccgaggccatgcacagatttacatcaaggctgcaggaggaactgaatactaccgatctgtactcctatagaaaagtcaccgataacatcagcagttgtatggagaacttcaatttgggaagggcctccgtgaacaatctgctgaagaatgtactgcatttccttcaaaagagcttgatcgaaattctcgaggaaaaccgcaaatgtgctggtaaccacattatccaaacccaactgatgaacgacctcttggtgggcattagagtttctatgatgctggtgcagaaggtgcaggactttcagggcaatttgtggaagaccagcgactcacccatctggcagaacatgtgcggtttactctcaatctttaccaaagttctttcagacgatgatctactgcaaacagtccaatcaacaagtggcctggcaatcatcctgttcatcaagaccatgttccacccaagtgaaaagatccctcacttgatctcaagcgtcttgctgagatccgtagactgtacatctgtccccgaatggtttatgtctagctgccgctccctctgctgtggagatattagtcagagcgccgtcctgttcctctgtcagggcactctggcaatgctcgattggcagaacgggagcatgggaagatctggggaggctctgctgctggatactgcacatgtgctgtttaccttgagcagccaaatcaaggaacctacattagagatgttcctctctaggatactggcttcgtggaccaactctgctatccaggtcctcgagtcttctagcccctctctgacagactcccttaacggaaacagcagtatcgttggacggctgctggaatacgtctacacacactgggaacaccctctggacgccctaagacatcagactaaaatcatgtttaagaacctgctccaaatgcacagattaactgtggaaggtgccgacttcgtgcccgatcccttctttgtggaactgactgaaagcctgctgcgactggaatggcatattaagggcaagtatacctgcctagggtgcttggtcgagtgcatcggcgtggaacacattctggctatcgacaagacgataccttctcaaatcctcgaggtcatgggagaccagagcttggtgccttatgcgagtgaccttctggagacaatgttccgcaatcacaaaagtcacctcaagtcgcagaccgcagagtcaagctggatcgatcagtggcatgagacttgggtctctccactgctattcattctatgcgagggcaacctggatcaaaagtcctacgtgattgactactacctgccaaagctcctcagctatagccctgagtccctgcagtacatggtaaagattctgcagacatcaatcgacgcgaaaaccgggcaggaacagagcttcccttcattagggtcttgtaactcgaggggggccctgggcgccttgatggcatgtttgagaatcgctcgagcccatggacacctccagtccgccacagatacatgggagaacctggtgtctgatgccaggatcaaacaggggctcatccaccaacactgtcaggtgaggattgacaccttgggattgttgtgcgaatccaatagaagtaccgaaatcgtctctatggaagagatgcagtggatacagtttttcatcacttacaacctcaactcgcagagccctggggtccgacaacagatctgttcactgctgaaaaaactgttctgccgcattcaagagtccagtcaggttctttacaaattagaacagagtaaatcgaaacgtgagcccgaaaacgagctgacaaagcagcacccttccgtctccttgcaacaatacaagaattttatgtccagtatttgcaattctcttttcgaggcactgttcccaggatcgagctactctacaagattcagtgcccttacgatactggggtccatagcggaggtcttccacgtaccagagggcagaatttatacggtgtatcaactgagccacgatatcgacgttggcagattccagacactcatggaatgcttcacaagcaccttcgaggatgttaagatactggcctttgatctgctgatgaaactaagcaaaacagcagtccacttccaggattcaggcaagttacaaggcctgttccaggccgcactcgaactgtccactagtactaaaccctacgactgcgtgacggcctcttatttactgaattttcttatttggcaggatgcccttcctagtagcctgtcagcctacctgacgcagcaggtcgcctgtgacaacggagatcgaccggccgcagttgtggagcggaacacactcatggggctttattag

SEQ ID NO: 26651 - DNA, 2268 bp, synthetic construct
  misc_feature 1..2268: note = Description of Artificial Sequence: Synthetic coding sequence
  source 1..2268: mol_type = other DNA
atgagcggcaccaacctggacggcaacgacgagttcgacgagcagttgaggatgcaagaactttacggtgatggtaaagacggcgacacacagactgatgctggaggggagccagacagtttgggtcagcaacctacggacactccctacgagtgggatctggataaaaaagcgtggttcccgaagattactgaggatttcattgctacataccaagctaactacggcttctccaatgatggggcttcctcttcgacggctaacgtcgaggatgtacacgcgaggactgccgaggaaccacctcaagaaaaggctcctgagcccacagatgccaggaaaaagggagaaaagcggaaagccgagtccgggtggttccacgtggaagaagatcgcaatactaatgtgtacgtctctggtttacctcctgatatcaccgtggacgagtttatccaacttatgtctaaattcgggatcatcatgcgggatccacagactgaggaatttaaggtgaagctgtataaggacaatcagggaaacctgaaaggcgacggcctctgttgttacctgaagcgagagtcagtggaactggcactgaagttactagacgaagatgagatcagaggttacaagctgcacgtcgaagtagccaaattccaactgaagggggagtacgacgcatcgaaaaagaaaaagaaatgtaaggactacaagaagaaactctccatgcagcagaagcagctggattggcgccctgaaaggagagccggtcccagcaggatgcgacacgagcgcgtggtaattatcaagaacatgttccacccaatggacttcgaggacgatcccctggtgctaaatgagatcagggaggaccttcgtgtggagtgtagcaagttcggccagattcgtaaactcttattgtttgatagacacccagacggggtggcaagtgtctccttcagagaccctgaggaagctgattactgtattcagactctagatggccgctggttcgggggccgccaaatcactgcccaggcctgggacggcacaactgattaccaggtggaggagacttctcgagaacgcgaggagcgcctgagggggtgggaagcatttttgaacgctccagaggcaaaccgcggcctgcgcagatccgactcagtttctgcttctgagcgagccggtccttcccgagctagacatttttcggaacacccatctacaagtaaaatgaatgcccaggagacagccacggggatggcatttgaggagcctatcgacgaaaagaagttcgaaaagaccgaagacggcggagaattcgaggagggcgcaagcgagaataacgcgaaggagtcttccccagaaaaagaggccgaagagggatgccctgaaaaggagagtgaggagggctgccccaaacgcgggtttgaaggaagctgctcccaaaaggaaagcgaagaagggaaccccgtaagaggatcggaggaggatagccccaaaaaagaaagcaaaaagaaaacactgaagaatgattgtgaggagaacgggctggcaaaagagagcgaagatgacctgaacaaggagtccgaagaggaggtcggacctaccaaagaatcagaggaggatgatagtgaaaaagagtctgacgaggattgttctgagaaacagtctgaggacgggtctgaacgggagttcgaagagaacgggctcgagaaagacctcgacgaggaggggtcagagaaggagctgcacgaaaatgtgttggacaaggaactcgaggagaatgacagcgaaaattctgagttcgaggatgatgggagcgagaaagtgctggatgaagaaggctcagagcgggaattcgatgaggatagcgatgaaaaggaggaagaagaggatacatatgagaaggtattcgacgacgaatctgacgagaaagaagatgaggaatacgctgacgagaagggactggaggccgcggacaaaaaggccgaagagggtgatgccgatgaaaaactttttgaggaaagtgatgataaggaggatgaggacgcagacggaaaagaagtggaggatgccgatgaaaagctgtttgaagacgacgattcaaacgagaaactgttcgatgaggaggaagactcttcagaaaagctgttcgatgacagcgatgaaagaggaacactgggaggctttgggagtgtggaggaagggcccttatcaaccggatccagctttattctttcgtccgacgatgatgatgatgatatttag

SEQ ID NO: 26652 - DNA, 432 bp, synthetic construct
  misc_feature 1..432: note = Description of Artificial Sequence: Synthetic coding sequence
  source 1..432: mol_type = other DNA
atgaccaagatgtacaagggcttccaggccctgggcgacgccgccgacatcaggtttgtgtatacccctgcaatggaatcagtgtgcggctacttccaccgctctcacaaccgcagtgaggagtttctgatagcaggtaagctccaagacggactcctgcacattaccacatgttcatttgtggcaccatggaacagtttgagtcttgctcagcgccgcggatttaccaagacatatactgtcggctgtgaggaatgtaccgtgtttccttgtctgtctattccttgtaaactccagagcggaacccattgtctctggactgatcaactcctgcagggatcagaaaagggcttccagagccggcaccttgcgtgcctgccccgcgagccaggcctgtgtacttggcagagcctaaggtcccagatcgcttag

SEQ ID NO: 26653 - DNA, 786 bp, synthetic construct
  misc_feature 1..786: note = Description of Artificial Sequence: Synthetic coding sequence
  source 1..786: mol_type = other DNA
atgcccctgaccagcggcagcagcaccccccccccctggcgggtgagcgccgatacctccaccggaccaactacagctgctcggtcctttagccttctcgttaggcaccgaccacgcgcgctgtgtcacacgaaccagagcttagggcgtggcctcgctacaacacgagggagaggctccgacggaaacggccccactggcaatggcgatcacccgaatttttccctgtctgaaggccgggccttcggatctctggccgctcagcccattactagctgtttgagcgtccccgcgccacccttttcactgggtaagctccaagatggtctgctgcacataacaacctgtagcttcgtggccccgtggaattccttaagcctggctcagagaagaggatttactaagacatataccgtgggctgtgaggagtgtaccgtttcagcatggactctaacatccaacggccggtcttttcctggcccctttccaaagagctgggcctgctttctcctgcccctggcaatcctctgcccttgcggttgtagtccgactcttagagcagtgcctgatctgtcctgttacttccctaaacccgaaactgctccacttcagattctggctgccccattcccctgtgttcagtatcgggtgattacgtgcccaagcctcgtgcccctgatcctgccttgcgattattcagtgatccctttgccagtgcccgagccaccgggcctttttttgggatcacctgagtgtagtccccggacccagtccgctgtgccctag

SEQ ID NO: 26654 - DNA, 291 bp, synthetic construct
  misc_feature 1..291: note = Description of Artificial Sequence: Synthetic coding sequence
  source 1..291: mol_type = other DNA
atgcccgtgtacagcgcctggcccgccgagcccaccatggcccccttcgaacccttggctagtggcatcttactgttgctatggttgatagccccctcacgggcctgtacttgtgtcccaccccatcctcagaccgctttttgtaattccgacttagtgatcagggctaaattcgtgggcacccccgaggtgaatcagactaccctgtaccagcgatatgagatcaagatgaccaagatgtataaaggttttcaggctctcggtgacgcagcagatattagattcgtttag

SEQ ID NO: 26655 - DNA, 498 bp, synthetic construct
  misc_feature 1..498: note = Description of Artificial Sequence: Synthetic coding sequence
  source 1..498: mol_type = other DNA
tgaccccgggccctgtgccacaccaaccagagcctgggccggggcctggcgaccacacggggaaggggctccgacggcaatgggccaactgggaatggggaccatccaaattttagcctgagtgagggccgggcgttcggctcgcttgccgcgcagcccattacgtcctgtctgagtgtgcccgcccccccttttagcttaggcaaactccaggatggcttgcttcatattaccacctgtagtttcgtagccccttggaactccctctctttggcccagcgcagaggatttaccaaaacgtacaccgtgggatgcgaggagtgtacagtgttcccttgcttgagtattccttgtaagctgcagagcggaacgcactgtctgtggaccgatcagctcctgcaaggtagtgaaaaggggttccagtctcgtcacctcgcttgcctgccccgggagcccggtctctgtacctggcagagcctgaggagccaaatcgcttag

SEQ ID NO: 26656 - DNA, 411 bp, synthetic construct
  misc_feature 1..411: note = Description of Artificial Sequence: Synthetic coding sequence
  source 1..411: mol_type = other DNA
atggcccccttcgagcccctggccagcggcatcctgctgctgctgtggctcatcgctccctccagagcatgtacatgcgttccgcctcatccacagacagctttctgcaactctgacttggtgatcagggccaagttcgttggaacacctgaagtgaatcagacgaccctatatcagagatatgagatcaaaatgacaaagatgtacaaagggttccaggcccttggcgacgcagccgacataaggtttgtttacaccccagccatggagtctgtgtgtgggtactttcacagatcccataaccgctcagaagaattcctgatcgccggagaggccccatccccgcgcccggttccccatcagccggttcctggggctcgcccaagtaatcatgagggagcaagactgtag

SEQ ID NO: 26657 - DNA, 663 bp, synthetic construct
  misc_feature 1..663: note = Description of Artificial Sequence: Synthetic coding sequence
  source 1..663: mol_type = other DNA
atgggcgccgccgcccggaccctgcggctggccctgggcctgctgctgctcgccacactgttgcggcccgcagatgcctgttcctgcagtcccgtccaccctcagcaggctttttgtaatgctgatgttgtgataagggccaaagctgttagtgagaaagaggtagatagcgggaacgacatctatggcaatcctattaagcgcattcagtatgagataaagcagataaagatgttcaagggcccagaaaaggacatcgaatttatttacaccgccccttcgtctgccgtttgtggcgtgtcactggatgtgggggggaagaaagagtacctgattgccggcaaagcagagggtgatggaaagatgcacatcaccttgtgcgacttcattgtgccgtgggataccttgagcaccacacagaagaaatcccttaatcatcgctaccagatggggtgcgagtgcaagatcactagatgccctatgattccatgctatatatcatctcctgatgaatgtctgtggatggattgggtaacagagaagaacattaatggacaccaggctaagttcttcgcttgcattaagaggtcggatggttcctgtgcctggtataggggtgccgctccgcccaagcaggaatttctcgatatcgaagatccctag

SEQ ID NO: 26658 - DNA, 432 bp, synthetic construct
  misc_feature 1..432: note = Description of Artificial Sequence: Synthetic coding sequence
  source 1..432: mol_type = other DNA
atgttcaagggccccgagaaggacatcgagttcatctacaccgcccccagttcagcagtgtgcggtgtttctctggatgtaggaggtaagaaggagtacctgatcgctggcaaggctgagggcgacgggaagatgcacattaccctatgcgattttattgttccctgggatacccttagcactacacagaaaaagtctctgaaccacagataccagatgggctgcgagtgcaagattaccaggtgtcctatgataccttgttacatttctagcccagacgagtgtctttggatggactgggtaactgaaaagaatatcaatgggcaccaagccaagttcttcgcgtgcatcaagcggagtgatgggagctgcgcatggtacagaggtgcggctccccccaaacaggagttcttagacattgaggatccttag

SEQ ID NO: 26659 - DNA, 636 bp, synthetic construct
  misc_feature 1..636: note = Description of Artificial Sequence: Synthetic coding sequence
  source 1..636: mol_type = other DNA
atgaccccctggctgggcctgatcgtgctgctgggcagctggagcttaggggattggggcgccgaagcttgtacatgctcaccgtcacatccacaggatgctttttgtaatagtgatatagtaatcagggcgaaggttgttggcaagaagctcgtcaaggaaggcccattcggtacactggtgtacaccatcaaacaaatgaaaatgtacaggggctttactaaaatgccgcatgtgcagtatattcacactgaagcttcagagtcactttgcggactcaagctggaggttaacaaataccagtacctgctgaccgggagagtgtatgatgggaagatgtataccgggctgtgcaacttcgtggagagatgggaccaactgaccctgagccagagaaaagggctcaactacaggtaccacttgggttgcaattgtaagattaagtcctgttactacctgccttgctttgtaacaagcaagaatgagtgtctgtggaccgacatgctgtcgaatttcggctatcctgggtaccagtccaagcactacgcgtgcatccgtcagaagggcggctactgctcttggtacaggggatgggctccacccgataaatctataattaacgcaacagacccatag

SEQ ID NO: 26660 - DNA, 438 bp, synthetic construct
  misc_feature 1..438: note = Description of Artificial Sequence: Synthetic coding sequence
  source 1..438: mol_type = other DNA
atgaagatgtaccggggcttcaccaagatgccccacgtgcagtacatacacacggaagcttctgagtccctctgcggcctgaagctagaagtgaacaagtatcagtatctgctgacgggcagagtctacgatggcaagatgtatactggactgtgcaactttgtggagagatgggatcagttaacactcagtcaacggaaaggcctgaactataggtatcatctcggttgcaactgcaagatcaagtcatgctattacctaccttgttttgttacatctaagaacgaatgcctatggacggacatgctgagcaactttggctaccccgggtaccagtctaagcattatgcatgcatccgccagaaaggcggatattgctcttggtacaggggatgggccccacccgataagtcaatcatcaacgcaaccgacccatag

SEQ ID NO: 26661 - DNA, 675 bp, synthetic construct
  misc_feature 1..675: note = Description of Artificial Sequence: Synthetic coding sequence
  source 1..675: mol_type = other DNA
atgcccggcagcccccggcccgcccccagctgggtgctgctgctgagattgctggccctcctacgacctcctggacttggcgaggcttgtagctgtgccccagcacatcctcagcagcacatctgtcacagcgccctggtgatccgggccaaaatctcttctgagaaggtcgtgccagcttccgcggatccagccgatacggaaaaaatgttacggtacgagatcaaacagataaagatgtttaagggatttgagaaggtcaaggacgtccagtacatttacaccccttttgatagctctctttgcggagttaaactggaggcaaatagccagaaacagtacctacttacaggccaggtgctttcagacggaaaggtgtttatccatctctgcaactacatagagccttgggaggatttgagtctggtgcagcgggaatccctcaatcatcactaccacctgaactgtggatgccagattactacctgttacaccgtgccctgcacaattagcgctcctaacgaatgcctctggacagactggcttttagagagaaaactgtatggttaccaggcacagcactacgtctgcatgaagcacgtcgatgggacctgctcctggtatcggggccacctcccactccgcaaggagttcgtagatattgtacagccatag

SEQ ID NO: 26662 - DNA, 1164 bp, synthetic construct
  misc_feature 1..1164: note = Description of Artificial Sequence: Synthetic coding sequence
  source 1..1164: mol_type = other DNA
atggtgcactgcagctgcgtgctgttccggaagtacggcaacttcattgataaacttcgcctgtttactcgcggcggttcaggcggaatgggatatccacggctcggaggagaaggcggcaaggggggcgacgtttgggtagtcgcacagaaccgaatgacccttaagcagctgaaagatcggtaccctagaaagagatttgttgccggcgtgggtgccaactccaaaatctctgcccttaaaggttccaagggcaaggattgtgaaattcctgttcccgttggtataagcgtaactgacgagaacggtaagatcattggcgaattaaataaagaaaatgaccggattctggtcgcccaggggggattgggaggtaagctgcttaccaattttctccctctgaaaggacagaaacgtatcatacatctggatttgaagctgatcgccgacgttgggctggttggctttcctaacgcaggcaaatccagccttctttcctgtgttagccatgcaaagcccgccattgccgactatgctttcactaccctgaaacccgagctgggcaagatcatgtattccgatttcaagcagatttccgtggcagacttgccaggcctcattgaaggggcgcacatgaacaaagggatggggcataagttcctgaagcacattgagcgcactcggcaacttttatttgtggtggacatttcagggttccagctctcttcccacactcagtaccgaacggcttttgaaaccattattcttttgactaaggaactggagctatacaaggaagagctgcaaactaaacctgcgctgttagccgtgaataagatggacctcccagacgctcaggacaaattccatgagttaatgagccagctgcagaacccgaaagacttcttacacttattcgaaaagaacatgattccggagagaacagtggaattccagcacatcatcccaatttccgcagtgaccggagagggaatcgaagagctcaagaattgtatcaggaagtctctggacgaacaagcaaaccaggaaaacgacgcactgcacaagaagcagctcttaaatttgtggatttccgacaccatgtccagtaccgagccccccagcaaacatgccgtcaccaccagtaaaatggacatcatttag

SEQ ID NO: 26663 - DNA, 375 bp, synthetic construct
  misc_feature 1..375: note = Description of Artificial Sequence: Synthetic coding sequence
  source 1..375: mol_type = other DNA
atggaccccgcccggcccctgggcctgagcatcctgctgctgttccttacagaggccgccttgggtgatgccgcacaagagccaaccggtaacaacgccgagatctgcttgctgccattggactatggaccatgtagggcattgctactgcgctattattatgatcgttatacccagtcctgccgtcaattcttatatggtggctgcgagggtaatgctaacaacttctatacttgggaagcctgtgacgacgcttgctggcgcatcgaaaaggtccccaaactctcaagtatgacaagtctgaagaaaaagaagaagatgcctaagctgcgattcgcatctcgtatcaggaaaatacgcaagaagcagttttag

SEQ ID NO: 26664 - DNA, 1506 bp, synthetic construct
  misc_feature 1..1506: note = Description of Artificial Sequence: Synthetic coding sequence
  source 1..1506: mol_type = other DNA
atggccgccgccagcgtgaccccccccggcagcctggagctgctgcagcctggctttagcaaaaccctcctaggaacaaaactcgaggccaaatatctgtgttccgcgtgccgcaacgtgttgagacgcccttttcaggctcaatgtggccatagatattgttccttctgtcttgccagtatcctgtcctctggccctcaaaactgtgccgcttgtgttcacgaagggatctatgaagaagggatcagcatcctggagagcagttctgctttcccagataacgcagcccgaagggaggtggagtccctccccgccgtgtgtcccagcgacgggtgcacatggaagggcactctgaaggagtatgaaagctgccatgagggacgctgccccctgatgctcactgagtgtccagcttgtaaggggctagtccggttgggagagaaggaacgacatttggagcacgagtgcccagagcggtcgttgtcctgcagacactgccgagccccatgctgcggggccgacgtcaaggcccatcacgaggtttgccccaagtttccgttgacctgcgatggctgtggtaaaaaaaagatcccgcgggagaaattccaagaccacgtcaagacctgcggcaagtgtcgggtgccttgtaggtttcatgctatcggatgtcttgagacagtggaaggtgagaaacagcaagaacacgaggtgcagtggttgcgtgaacatctggcgatgctgctcagttctgtgctggaagccaaacctcttctgggcgaccagagccacgccggcagcgaacttctccagaggtgtgagagtctggaaaagaagacagctacgttcgaaaatattgtctgcgtcctaaaccgtgaggtcgaaagagttgcaatgactgctgaggcatgcagtagacagcatcgcctggaccaggataaaatcgaggccctctccagtaaggtgcagcaactcgaaagaagcatcggtctcaaagacctggccatggccgacctggaacagaaagtattggagatggaagccagcacctacgatggggtgttcatatggaagatttctgactttgcccgtaagcgtcaagaggccgtagcaggacgaattcctgccatcttctccccagcgttctacacatccaggtatggctacaaaatgtgtttgaggatttatctgaacggcgacggaacaggccggggtacccacctctctctgttcttcgtggtgatgaaaggtcctaacgacgcccttttacggtggcctttcaatcagaaagtgacattgatgctgctggaccagaataatcgcgaacacgtaattgacgcgtttagacccgacgttacttccagctcctttcagagacccgtaaacgatatgaacatcgcatctggctgccctcttttctgccctgtcagcaagatggaggccaaaaacagctacgtacgggacgacgcaatcttcatcaaagctattgtggacctgacaggcctctag

SEQ ID NO: 26665 - DNA, 1662 bp, synthetic construct
  misc_feature 1..1662: note = Description of Artificial Sequence: Synthetic coding sequence
  source 1..1662: mol_type = other DNA
atggccgccgccagcgtgaccccccccggcagcctggagctgctgcaacctggattctcaaagacacttctgggcaccaagctcgaggccaagtacttgtgctctgcttgccgaaacgtcctgcggcgaccgtttcaggcccaatgcgggcaccgctactgcagcttctgcctcgcatcgatcctgtctagcggacctcagaactgcgctgcttgcgtacacgaggggatctacgaagaggggatttctattctggagtcctcttctgcctttccagataacgcagctagaagggaggttgaaagcttgccagcagtttgccccagtgatgggtgcacctggaagggcactctgaaagaatatgaagtgaagatgcctgcttgtggaatggtcaccgaagcccctgcggtcgggtctcggccccgctcgcctagctcctacgatctggttctgcatgtgccgcttacgggcgccgaggcctgcctgatgtccgtggaggaagaaaccgagctgctgttacgctcctgccatgaaggcagatgccccctaatgctcactgagtgtccggcctgtaagggtttagtaaggctaggagagaaggaacgacatcttgaacatgaatgccctgaacgatcacttagttgtcgacattgccgggcaccctgctgtggcgcagacgttaaagcgcaccacgaggtttgtcccaagttccctctgacttgtgatggctgcggaaagaaaaagattcctcgagagaagtttcaagatcacgtgaagacctgcggcaagtgccgcgtcccttgcagattccacgctatcggatgtctggaaaccgtggaaggggaaaaacagcaggaacacgaggtgcagtggctacgggaacacctcgccatgttactgagctccgtgctggaagctaagcccctcttgggcgatcagtctcatgccggcagtgagctgttacagcgctgcgagtcattggagaaaaagaccgcaactttcgagaatattgtttgtgtgctcaacagggaggtcgaaagagtggcgatgaccgcggaggcatgttccagacagcacagactggatcaggacaaaatcgaggcactgtcttctaaggtccagcagctggaacgatcaataggactgaaagatttggcaatggcggatctcgagcagaaagtgctggagatggaagccagcacgtacgacggcgttttcatttggaagattagtgattttgcccggaagaggcaggaagccgtggcaggccgcattcccgcaattttttcacccgccttctatacgagcagatacgggtacaaaatgtgcttaagaatttacctcaacggcgacggtacggggagagggacccatttgagtttgttttttgtggtgatgaaaggccccaacgacgctctattgagatggccttttaatcagaaggtgacgctgatgctcctcgaccagaacaaccgggaacatgtaatcgacgcttttcggccggacgtgacgtctagcagttttcaacgaccggttaatgatatgaacatcgccagcggatgcccgctattttgccccgtgtccaaaatggaggcgaaaaattcctacgtccgcgacgacgcgatttttatcaaggccattgttgacctgactgggctgtag

SEQ ID NO: 26666 - DNA, 1269 bp, synthetic construct
  misc_feature 1..1269: note = Description of Artificial Sequence: Synthetic coding sequence
  source 1..1269: mol_type = other DNA
atggccgccgccagcgtgaccccccccggcagcctggagctgctgcagccaggcttctctaagactctgctcgggactaagttggaggcaaaatacctgtgtagcgcttgccgcaatgtcctgaggcgacctttccaggctcaatgtgggcacagatactgtagcttctgcctcgcaagtatcctttcttcgggacctcagaactgcgcagcctgtgtccacgagggaatttacgaggagggaatttccattttagaatcttccagcgcctttcccgataacgctgcccgtcgcgaagttgaatccctcccagcggtatgtcccagcgatggttgcacatggaagggaaccctgaaagaatatgaggtcaagatgccagcttgtgggatggtcactgaagccccagccgtgggctcaaggccacggagcccctcctcatatgatctggttctacatgtgcctctgacgggtgcagaggcttgtctgatgtcggtggaagaggagaccgagcttctgctcagaagttgccatgaaggacggtgtccccttatgcttacagaatgtcctgcctgcaagggcctcgtccgcctgggggaaaaagaacgtcacttggagcatgaatgtcctgaaagatcactctcttgtaggcactgcagggcgccatgttgcggcgcggatgtcaagcgtttggaccaggacaaaattgaggcactctcttccaaggtgcagcagctggagaggtctattggactgaaagatttggcgatggccgatctggaacaaaaggtacttgagatggaggcctcaacctatgatggagttttcatctggaaaatatcagatttcgcacgcaaacgccaggaagccgttgcaggacgaattcctgccatcttctctcctgctttctatacctctcgctacgggtataaaatgtgcttgcgcatctacctaaatggcgacggaactggcaggggaactcacttgagcctgttttttgttgtgatgaagggaccaaacgacgccttgctgcgttggcctttcaatcagaaagttaccctcatgttactcgaccaaaacaaccgggaacacgtgattgatgcgttccggccggatgttacttcttcatcatttcagagacccgtaaacgatatgaatatcgcttctggatgccccctattctgccccgtctccaagatggaagcaaaaaacagttacgtgagagatgacgcaatttttataaaggccatcgtggatctcactggtctgtag

SEQ ID NO: 26667 - DNA, 366 bp, synthetic construct
  misc_feature 1..366: note = Description of Artificial Sequence: Synthetic coding sequence
  source 1..366: mol_type = other DNA
atggccgccgccagcgtgaccccccccggcagcctggagctgctgcaaccgggtttcagcaagacactcttgggtaccaagctagaggccaagtatttgtgctctgcatgcagaaatgtcttgaggagaccttttcaagcccagtgcggacaccgttactgctccttctgtctggcctccattctctcctctggcccacagaactgcgcggcctgtgtgcacgaaggtatttacgaagaaggcatttccattttggagagttcttcagcgtttcctgacaacgccgccaggagggaagttgaatcgttaccagcagtatgcccctctgatgggtgtacctggaaaggcactctcaaagagtattag

SEQ ID NO: 26668 - DNA, 519 bp, synthetic construct
  misc_feature 1..519: note = Description of Artificial Sequence: Synthetic coding sequence
  source 1..519: mol_type = other DNA
atggccgccgccagcgtgaccccccccggcagcctggagctgctgcaacctggattcagtaaaaccctgcttgggacaaagttagaagctaagtacctgtgctcggcttgtcggaacgtgttgcggagaccatttcaggctcaatgcgggcaccgttactgttccttctgcctcgccagcatcctaagttccggcccacagaactgtgcagcatgtgtgcacgaggggatttacgaagagggtatcagtattctcgagtcaagctccgcttttccagataatgcagcccggcgagaagtggaaagccttccagctgtctgtccgagtgatggctgtacatggaagggtacattaaaggaatatgagtcttgccatgaaggtcgctgcccattgatgcttaccgagtgccctgcctgcaaggggctagtacgtctgggcgagaaggaaagacatttggagcacgaatgcccagaaagaagcctgtcgtgtcggcattgtagggctccttgctgcggctag

SEQ ID NO: 26669 - DNA, 582 bp, synthetic construct
  misc_feature 1..582: note = Description of Artificial Sequence: Synthetic coding sequence
  source 1..582: mol_type = other DNA
atggccgccgccagcgtgaccccccccggcagcctggagctgctgcaacccggctttagcaaaaccctacttgggacaaaactggaagcaaagtatctctgcagcgcgtgtcggaacgtcctgcgccgcccatttcaagcacagtgcgggcaccggtattgctccttttgtttggcttccatcctaagcagcgggccccagaactgcgctgcttgtgtccatgagggaatttatgaagagggcatcagcattctcgagtcatcttctgccttccccgacaacgctgcccgtcgcgaggtcgagtctctgccagctgtttgtcccagcgatggttgcacatggaaaggaaccttaaaggagtacgagtcatgccacgagggcaggtgtcctctgatgcttaccgagtgcccagcttgcaaaggcttggtcaggttaggcgagaaggagcggcatctagagcacgagtgtcccgagcggtcgctcagttgtagacactgccgcgctccttgctgtggggccgatgtgaaggcacatcatgaagtctgtccgaagtttcctttaacgtgtgacgggtgtgggtag

SEQ ID NO: 26670 - DNA, 1503 bp, synthetic construct
  misc_feature 1..1503: note = Description of Artificial Sequence: Synthetic coding sequence
  source 1..1503: mol_type = other DNA
gtggccggccgggccctgagcagcggccgggccgccaccgtgggcgcacttttcgcaggggtcacggccctcatggcagccgcatcagtgacaccccctggcagcctagagctgcttcagccaggcttttcaaagacacttctcggcactaagttagaggccaaatacctgtgttccgcctgtcggaacgtgctccgaagaccgttccaggcacagtgtgggcaccgttattgttctttctgcctggcgagcatcctaagtagtggcccccaaaattgcgccgcttgtgttcacgaaggcatatacgaagagggcatcagcatccttgagtcttcttccgccttcccagataacgctgcacggcgggaggtagagagcctgcctgcagtgtgtccttcagatggatgcacatggaagggaacactgaaagagtacgaaagttgccatgaggggcgctgcccactgatgctgaccgagtgtcctgcatgcaagggcctcgttagactcggggaaaaggagaggcatctagagcatgagtgcccggagagatcgctgagttgccggcactgccgggccccttgctgcggtgccgacgtcaaattccaagaccacgtgaagacatgtggcaaatgccgtgttccctgccgttttcatgctattggatgcttagagactgtggagggagagaagcaacaagagcatgaagtgcaatggctcagggaacacctggccatgctgctaagtagtgtcctggaggcaaagccgttactgggtgaccaatcacatgccggctccgaactgctgcagagatgcgagagcctggaaaaaaagaccgccacttttgaaaacatcgtatgtgttctgaaccgggaagtagagcgcgttgctatgacagccgaggcatgctctagacagcaccgcctggaccaagacaaaatagaagcgctctctagcaaagtccaacaactcgagagaagcattgggctgaaggatttggccatggccgaccttgaacaaaaggttttggaaatggaggccagcacttatgacggggtatttatatggaagatctccgatttcgccaggaagagacaggaggcagtggcaggcagaatcccggccattttctcccccgccttctacacctctaggtacggttacaagatgtgtcttcggatctatctgaatggcgacgggaccggccgtggcactcacctgagtctctttttcgtcgtaatgaagggacccaatgacgctttacttcggtggccctttaatcagaaggtcacgctgatgctgttggatcagaacaatcgggaacatgttatcgacgcttttcgaccggacgttacctcaagcagctttcagcgacctgtgaacgacatgaatatcgcttccgggtgtcccctgttctgccctgtgagtaaaatggaagccaagaatagttatgttagagacgacgcaatctttattaaggccatcgtggatctgactggattgtag

SEQ ID NO: 26671 - DNA, 1506 bp, synthetic construct
  misc_feature 1..1506: note = Description of Artificial Sequence: Synthetic coding sequence
  source 1..1506: mol_type = other DNA
atggccgccgccagcgtgaccccccccggcagcctggagctgctgcagcctgggtttagcaagacgctgcttggcactaagttagaagccaagtatctctgctccgcctgtcgtaacgtattaaggcgacctttccaggctcaatgtggccaccgatactgtagtttctgtctagccagtatcctgtcaagcgggccccagaactgcgcagcttgtgtccacgaaggcatatatgaggaaggcatctctatcctggaaagctcctccgcgttccccgataatgccgctcgaagggaggttgagtcattgccagcggtttgtccaagtgatggatgtacctggaaggggaccttgaaggaatatgaaagctgtcatgaaggtcgctgccccctgatgctcacagagtgcccggcctgtaaaggtctggtgcgcctgggcgaaaaagagagacatctggaacacgaatgccctgaacgatccctgtcatgccggcactgcagggctccctgttgcggggccgacgtgaaggctcatcatgaggtctgcccaaagttccccctgacgtgcgacggatgcggtaagaagaagataccaagggagaaattccaagaccatgtcaaaacatgcggaaaatgtcgcgttccctgtagattccatgcaattggatgcctggagacggtagagggcgagaagcagcaagaacatgaagtccagtggttacgggaacatctggcaatgctgctgagctcagtgcttgaagccaagccactattgggcgatcagtcccatgctgggtctgagcttctgcaaagatgtgaatccctggaaaaaaagacagctacttttgaaaatatagtatgcgtgttaaatcgcgaggtggaacgcgtggccatgaccgctgaggcgtgctcacgccagcatcgtctggatcaggacaagatcgaagcactcagttcaaaggttcaacagctcgaacgcagcatcggtctgaaggaccttgccatggcagatctggaacaaaaagtcctggagatggaggctagcacatacgatggggtgtttatatggaaaatatcagacttcgcacgcaaaagacaggaagccgtggctggccggattccagctatctttagtcctgcgttttacacaagccgttacgggtacaagatgtgtttgaggatctacctgaatggagatgggaccggccgcggcacacacctttctctgtttttcgtcgtgatgaagggtcccaacgacgccctgctccgctggcccttcaatcaaaaagtgacgctgatgctgctcgatcaaaacaacagggaacatgttattgacgcattccgccccgatgtaacttcctctagcttccagcgtcctgtgaacgacatgaacattgcttccggctgtcccctgttttgccctgtctccaagatggaggcaaagaattcatacgtgcgcgacgacgctatttttataaaagctatagttgatctgaccggattatag

SEQ ID NO: 26672 - DNA, 1632 bp, synthetic construct
  misc_feature 1..1632: note = Description of Artificial Sequence: Synthetic coding sequence
  source 1..1632: mol_type = other DNA
atggagagcagcaagaagatggacagccccggcgccctgcagaccaatcccccactcaagctccatacagatcgatccgccggcacccctgtgttcgtgccagaacaggggggttacaaggagaaattcgtcaagactgtggaggacaaatacaagtgcgagaagtgtcaccttgtgctgtgctcacccaaacaaacagaatgcggacatcgcttctgcgaaagttgcatggcagccctcttgtcgagctcaagtcccaaatgcaccgcttgccaggaaagtattgtgaaagacaaagtgtttaaagacaactgctgtaagcgggaaatcctcgccctgcagatttattgtcgcaatgagagtcgcggatgtgccgagcaactgatgctgggtcacctcctcgtgcatttaaagaatgactgccactttgaggaacttccgtgcgtgagacccgactgtaaggaaaaggtcctgaggaaagatttgcgcgaccatgttgagaaggcttgcaagtacagggaagccacctgctcacattgcaagtctcaggtacccatgatcgctctgcaaaagcatgaagataccgactgtccctgtgtggtcgtgagttgtccacacaagtgttctgtccagaccctcttacggagcgaagggaccaaccaacagatcaaagcccacgaggcttcttcagcagtgcaacacgtaaatctgttgaaagagtggtcaaattccctagagaaaaaggtttcactgcttcagaacgaaagcgtagagaagaataaatccattcagtccctgcataatcagatatgctcctttgaaattgagattgagcggcagaaggaaatgctgcggaataatgagtcaaagattctccacctccaacgtgtgatcgattcgcaggcagaaaagctcaaagagctggacaaagagatacgtccgttccgtcagaactgggaggaagctgactccatgaagtcctctgtggagtcactgcaaaatagagtgacagagcttgagagcgtggacaaatctgctggccaggtggcacgcaatacaggcctattagagtcacagctctctagacatgatcaaatgctgagcgtgcacgacatccgcctggctgacatggacctgcgttttcaggtactggagaccgcctcctacaacggggtgctcatatggaagattcgcgattacaagcgtaggaagcaagaggccgtgatgggtaagactttgtcgttgtactctcaacctttctatactggatacttcggatacaaaatgtgtgctagagtgtacttgaatggggatggaatgggtaaaggaacgcatctgtctttgttcttcgtcatcatgcgaggtgaatacgatgcactgctcccatggccattcaagcagaaggtgaccctaatgttgatggaccaaggcagttctcgaaggcacctgggagacgcgtttaagcctgatccgaactcaagttcctttaagaaacccaccggggaaatgaacattgcttccgggtgtccagtgttcgtggcccaaacggttctggaaaatggtacctacatcaaagacgataccatttttataaaagtgattgtcgacacaagcgatcttcccgacccgtag

SEQ ID NO: 26673 - DNA, 1632 bp, synthetic construct
  misc_feature 1..1632: note = Description of Artificial Sequence: Synthetic coding sequence
  source 1..1632: mol_type = other DNA
atggagagcagcaagaagatggacagccccggcgccctgcagaccaatcccccccttaaactgcacactgacagatctgctggcacaccagtgttcgtacctgagcagggtgggtacaaggagaagtttgttaagactgtagaggataagtataaatgcgaaaagtgccacctggtactgtgtagcccgaagcagaccgaatgtggacatagattctgtgagtcctgcatggcagccttgctcagttcaagttctccaaagtgcaccgcatgccaggagtctatagtgaaggacaaggtcttcaaggataattgttgcaagcgggaaatcctggccttgcaaatttactgcagaaacgaatcacgcggatgcgctgagcagctgatgctgggtcatttactggtgcacctgaagaacgattgccatttcgaagagctgccatgcgtgcggccagattgcaaggaaaaagttctgaggaaagacctccgggaccacgtggaaaaagcctgcaagtacagggaggctacctgttcacattgtaagagtcaggtccctatgatcgccctgcaaaaacacgaggacacagactgcccctgcgtcgtggtttcttgcccccacaaatgctcagtgcagactctcctgaggtccgagggaacgaaccagcagatcaaagcacatgaggcaagctccgctgtgcagcatgtgaacctcctgaaggagtggtctaactcgctcgagaagaaagtgtcacttctgcagaacgaaagcgtggaaaaaaataaatccatacagagtctacacaaccagatttgttcattcgagatagaaatcgaacgccagaaggagatgttgcggaataacgaatccaagattctccacctgcagagagtgatagattcccaggcagaaaaactaaaggagctagacaaggaaatcagaccttttagacaaaattgggaagaagctgatagtatgaagtccagcgtggaatctctgcagaatcgcgtgacggagctggaaagcgtcgacaagtctgctggacaggtcgctcgcaatacaggcctgctagagtcgcaactgtcgagacacgaccagatgttaagtgtgcatgacatcaggctggccgacatggatctgcggtttcaggtactggaaacagccagctataatggcgtactgatttggaaaataagggattacaaaagaagaaaacaggaagccgtcatgggcaagaccttgtcactgtactcacagcctttttatacaggctattttggttataagatgtgcgcccgcgtatacttgaatggcgacggcatgggtaaagggacccacctcagtttgttttttgtcattatgcggggcgagtatgatgcattgttgccctggcccttcaaacagaaggtgaccctgatgcttatggatcagggaagcagcaggagacatcttggagacgctttcaagccagatcctaatagcagctcattcaaaaaaccaactggggagatgaacattgctagtggctgccccgtgtttgtcgcacaaacagttctagaaaatggcacatacataaaggacgacaccatctttattaaggttatcgtggatacatctgatctgcccgacccgtag

SEQ ID NO: 26674 - DNA, 1707 bp, synthetic construct
  misc_feature 1..1707: note = Description of Artificial Sequence: Synthetic coding sequence
  source 1..1707: mol_type = other DNA
atggagagcagcaagaagatggacagccccggcgccctgcagaccaaccctcctctgaaactgcatactgatagatcagccggcacccctgtgttcgtacccgaacagggtggctataaggagaagttcgtaaaaactgtggaggataagtataaatgtgagaaatgtcaccttgtcctctgtagccctaagcaaaccgaatgtggccaccgcttctgcgaaagttgcatggctgctctcctatcttcctcaagccctaagtgcaccgcctgccaggagagtattgtcaaggacaaggtatttaaggacaactgctgcaaacgggagatcctcgcccttcagatttactgtcggaatgaatcccgtgggtgcgctgagcagctgatgttgggccacttgcttgtacacttaaaaaacgattgtcatttcgaagaactcccttgtgtgaggcctgactgcaaggagaaagttctgcggaaggacttgcgggaccacgtcgagaaggcatgcaaatatcgtgaagcaacgtgtagccactgtaagtcccaggtacctatgatcgccttgcagaagcacgaggatacagattgtccttgtgtggtagtttcttgtccacacaaatgctctgttcaaaccctcttgcgcagcgaattatctgcccatttgtctgagtgcgtcaatgccccaagtacctgtagttttaaacggtacggttgtgtgttccaaggcaccaaccagcagattaaggcccacgaggcaagttctgccgttcaacacgtgaatcttctcaaggagtggtcaaactccctcgaaaagaaggtaagtctcctgcaaaacgagtccgttgaaaagaacaagtctatccaatctctgcataaccagatctgctctttcgagattgagatcgagcgccaaaaagagatgttacggaacaatgaaagtaagatcttgcatcttcagcgggtgatcgactcacaggctgaaaagctgaaagagctcgacaaggaaatccgcccattcagacagaattgggaagaggcagacagcatgaaatcatcggttgagtccttacagaatcgcgtgactgagctcgaatctgtcgataaaagcgcggggcaggtcgcaaggaataccggccttttggaatctcagctcagccggcacgaccagatgttgtccgtgcatgatatacgcctcgcagatatggatcttaggttccaggtccttgagactgccagctacaatggagtcctcatctggaaaattcgagactacaagaggcgaaaacaggaagcagtcatgggcaagacactgtccctctacagtcagccattttacaccggctacttcggatacaaaatgtgcgcccgggtgtacctgaacggggacggcatggggaagggaactcatctcagcctattcttcgttatcatgaggggtgaatacgatgccctgctgccgtggcctttcaaacaaaaagtgaccctcatgttgatggatcagggatcctcccgcaggcacttgggagatgccttcaaacctgaccctaattcaagcagttttaaaaagcctaccggtgaaatgaatattgcctccggctgcccggtcttcgtggcgcagacagtgctggagaatggcacctacatcaaggatgatactatattcatcaaggtaattgttgacaccagtgacttacctgacccatag

SEQ ID NO: 26675 - DNA, 1458 bp, synthetic construct
  misc_feature 1..1458: note = Description of Artificial Sequence: Synthetic coding sequence
  source 1..1458: mol_type = other DNA
atggagagcagcaagaagatggacagccccggcgccctgcagaccaacccgcccctgaagttgcataccgaccgcagcgctgggactcccgtctttgttcctgagcaaggcggttacaaagagaagttcgtcaaaacagtggaggataaatataagtgcgaaaagtgtcacttagtgctatgttcccccaaacaaactgaatgcggccacagattctgtgagtcctgcatggccgccctattgagttctagctctccaaagtgcaccgcctgccaggaatcaatcgtgaaggacaaggtcttcaaagacaattgttgtaagagagaaatactagccctgcagatttactgccgaaatgagtcccgcggctgcgccgagcagctgatgctcggacatttactggtgcatttgaagaacgactgtcatttcgaagaactgccttgcgtgcgccccgattgtaaagaaaaggtgcttaggaaagatctgcgtgaccatgtggaaaaggcttgcaagtatcgggaagccacttgctctcactgtaaatcgcaggtccccatgatcgcgctgcaggtttcactgctgcagaatgaaagcgtagagaaaaataaaagcattcagtctctccataatcagatttgcagctttgagatcgagatagagagacaaaaggaaatgctgaggaataacgaatctaagatactgcatttgcagcgagtcattgatagtcaggctgagaaactgaaggaactggataaggaaattcggcctttccgccagaattgggaagaagccgattcaatgaaaagttccgttgagagccttcagaatcgcgtgacagagttagaatctgttgacaaatctgcagggcaggtggctcgtaacaccgggttactggaaagtcagctgtctagacacgatcagatgctctcagtgcacgacatccggctagcagacatggatctgcgttttcaggtgcttgagaccgcgtcgtataacggtgtgctgatctggaagatcagagactacaagcgccgaaaacaggaggccgttatgggaaaaacactgagcctatacagccagccattttacactgggtatttcggctacaaaatgtgcgctcgcgtatacctgaacggcgacggcatggggaagggcacacatctcagtttgttctttgtcatcatgcggggcgaatatgatgctcttctgccctggcccttcaaacagaaggtcacactaatgctgatggaccaaggtagtagtaggcggcacctgggcgacgccttcaaacccgacccaaattccagctcttttaagaaaccgaccggggaaatgaatatagcttccggttgccctgtgttcgtcgcccagaccgtattagagaatggtacctatattaaggacgatactatcttcattaaagttatcgtagatacttctgacctcccagacccctag

SEQ ID NO: 26676 - DNA, 1707 bp, synthetic construct
  misc_feature 1..1707: note = Description of Artificial Sequence: Synthetic coding sequence
  source 1..1707: mol_type = other DNA
atggagagcagcaagaagatggacagccccggcgccctgcagaccaatccccccctcaaattacatactgatcggtctgctgggacaccggtattcgttccagagcagggaggatataaagaaaaattcgtcaaaaccgtggaagataagtataaatgcgagaagtgtcatctggtgttgtgctctccaaagcagactgaatgcggccaccggttctgcgaatcatgcatggccgcattactcagctcctccagcccaaaatgcaccgcgtgccaggagtctattgtcaaggataaggtctttaaggacaactgttgtaagcgcgaaatactcgcgctccagatctactgtcgtaacgagtcccggggatgcgcagaacaactaatgcttggccatctgctagtgcacttgaagaatgattgccacttcgaggagttgccctgtgtacgtcccgattgcaaagaaaaagtactccgaaaggatttacgtgaccacgtagagaaggcttgcaaataccgagaagcaacatgcagccattgcaagtctcaggttcccatgattgccttgcaaaagcacgaggacacagactgtccttgtgtggtggtaagttgtccacacaaatgttcggtgcagaccctgcttcgttcagaactatctgctcaccttagcgaatgtgtaaacgcacctagcacatgctccttcaaacgctatggctgcgtcttccaaggaacaaatcagcagatcaaggcacacgaggcctcatctgccgtccaacacgtgaatctgctgaaggagtggagcaactcacttgagaaaaaggtatcactgctgcaaaatgaatcagttgaaaaaaacaagagtattcagtcccttcacaatcagatatgctcgtttgagattgagattgaaaggcagaaggaaatgctccgcaacaatgaatctaagattctacatttacagcgtgtaattgactctcaagctgagaagctcaaggaactggacaaggagatacgaccatttaggcaaaactgggaggaagcagattcgatgaagtcaagcgtcgagtcattgcagaatcgcgtgactgagctggagtctgtcgataaaagcgccggccaggtggctcggaatactggcctgctggaatctcagctgagccgccatgaccaaatgttgtctgttcacgacataaggctggccgatatggacttacgctttcaagtgctggaaacagcctcttacaacggagtgctcatttggaaaatccgcgactacaaacgtcgtaagcaggaagctgttatggggaagactctatctctgtactcccagcctttctatactggatattttggctacaagatgtgcgccagggtctacctcaacggagatggtatggggaagggtactcacctgtcattattttttgtgattatgcgcggcgagtatgacgccctcctgccctggccttttaaacagaaagttacactgatgttgatggatcaggggagttcacggcggcatctgggtgatgcgttcaagcccgacccgaattcaagcagctttaagaaaccgacaggcgagatgaacatcgcttcaggctgcccggtgtttgtcgctcaaaccgtgttggaaaacgggacctacataaaagatgacacaatcttcatcaaggtaatcgtagacacaagcgacctgccagacccttag

SEQ ID NO: 26677 - DNA, 285 bp, synthetic construct
  misc_feature 1..285: note = Description of Artificial Sequence: Synthetic coding sequence
  source 1..285: mol_type = other DNA
atggagagcagcaagaagatggacagccccggcgccctgcagaccaatcctccactgaagctacacacagaccgcagcgccggtacgccagttttcgtgcccgagcagggcggctacaaagaaaagtttgtgaaaaccgttgaggataagtataagtgcgaaaaatgtcaccttgttctgtgttctccaaagcagacagagtgcggtcacagattctgcgagtcttgtatggcagcattgctgtcttcctctagcccaaagtgcactgcatgccaggagtcatag

SEQ ID NO: 26678 - DNA, 939 bp, synthetic construct
  misc_feature 1..939: note = Description of Artificial Sequence: Synthetic coding sequence
  source 1..939: mol_type = other DNA
atggccgccggccagaacggccacgaggagtgggtgggcagcgcctatctcttcgttgaaagctcattggacaaagtcgtcctctctgatgcctatgctcatcctcagcaaaaggtggctgtgtaccgggcactacaggcggctctcgccgagagcgggggctccccagacgttctccagatgttgaagattcaccgtagcgatccccagctcattgtccaactgagattttgtggacgccagccctgtggccggtttttacgcgcttacagagagggcgctcttagagctgccctgcagagaagcctcgccgccgccctggcccaacactccgtgcctcttcagctagaactgcgagcaggagctgagaggctggatgcccttcttgcggacgaggagagatgcctgtcctgtatcctggcccaacagcccgacagactgcgagacgaggagctagccgaattagaggacgcgctcagaaacctgaagtgcggttcaggagctcgcgggggggacggcgaggtagcctctgcccctctgcaaccaccagtgcccagcctgagcgaggtcaagccccccccaccgcctccccccgcacagacattccttttccaaggccaacccgttgtgaataggccactgtctctgaaggaccagcagacattcgcacggtcagtgggactcaagtggagaaaggtcggccgctccctccagaggggatgtcgggcactgcgggaccccgccctggacagcttagcatacgagtatgaacgggaaggcctgtacgagcaggcgtttcagcttttgcggcggtttgtgcaagccgagggacggcgggctaccctgcagaggctggtggaggctctcgaggaaaacgagctgacaagcctagccgaggacctcctgggcctgaccgatccaaatggcggtttggcctag

SEQ ID NO: 26679 - DNA, 825 bp, synthetic construct
  misc_feature 1..825: note = Description of Artificial Sequence: Synthetic coding sequence
  source 1..825: mol_type = other DNA
atggccaccaccgtgagcacccagcggggccccgtgtacatcggcgagctgcctcaggactttctcaggattactccgactcaacagcagagacaggtgcagctggacgcccaggctgctcaacagctgcaatacggcggcgctgttgggaccgttgggcgcctcaatatcactgtcgttcaggctaagttggccaaaaactatggaatgactcgaatggatccatattgtaggctaaggcttggctatgctgtgtacgagaccccaactgctcacaacggcgccaaaaaccccagatggaataaggtgatccactgcaccgtcccccctggggtggacagcttctatctggagatctttgatgagagagccttctcaatggatgaccgaatcgcctggactcacattacgattcccgagagtctgagacaaggcaaagtggaggataagtggtattctctgagtgggcgtcagggcgacgacaaggaaggcatgatcaatctggtgatgtcgtacgctcttttgcctgcggccatggttatgcccccccagcccgttgttctgatgcccaccgtttatcaacagggggtcggctacgtgccaataaccggaatgcctgccgtgtgctccccgggaatggtacccgttgccctacccccagctgcagtgaacgcccagcccagatgcagcgaggaggatctcaaagccatccaagacatgttccccaacatggatcaggaggtcatccgctctgtgttggaagcccagcgcggaaacaaggatgcagccataaactctcttcttcagatgggtgaagagccttag

SEQ ID NO: 26680 - DNA, 1059 bp, synthetic construct
  misc_feature 1..1059: note = Description of Artificial Sequence: Synthetic coding sequence
  source 1..1059: mol_type = other DNA
cagctgagccccagccaggcccccgccggcgcccaggaggtggccagacgggttaccgtaggatctgcctcacacggcggaagacgttctactatggcaacgactgtgagcactcagagaggtccggtgtacatcggagaactcccacaggattttctccgaatcacgcccacacagcagcaacgacaggtgcaactggacgcccaggctgctcagcagttacagtacgggggcgccgtaggcacagtcggaaggctcaatataactgtcgttcaggcaaaattagccaagaattacggaatgacacggatggacccgtattgtcggctgcggttgggttatgccgtttacgaaactccaacagcacacaacggcgcgaaaaacccaagatggaacaaggtgattcattgcaccgtaccaccaggggtggacagcttctacttggaaatatttgacgagcgggcgttttctatggatgatcgcattgcttggacacacattacaatcccagagtcccttaggcagggcaaggtagaggacaagtggtactccctctccgggcgccagggggacgataaggagggtatgatcaacctcgtaatgagctacgctcttcttcccgccgcaatggtcatgccccctcagcctgtggtcctcatgcctaccgtctatcaacagggggtgggctacgtcccaattaccggaatgccggccgtgtgttccccagggatggtcccggttgccctgccacctgccgccgttaatgctcagcccaggtgctctgaagaagacctaaaagcgatccaggatatgttccctaatatggaccaggaggtaatccggtccgtcctcgaggcacagcgagggaacaaggacgcagcgatcccttcccacctggtcctgggtgggctttccgcacttagctgcccctgggatgtccggctgagtttcagttgcaggagcggaaaatgtagctgctgtagagaacagctccttcttccagggtgttggaggtggtggtcggcttttcgcttccactcctggcacttcgtgatgtag

SEQ ID NO: 26681 - DNA, 675 bp, synthetic construct
  misc_feature 1..675: note = Description of Artificial Sequence: Synthetic coding sequence
  source 1..675: mol_type = other DNA
atggccaccaccgtgagcacccagcggggccccgccaagctggccaagaattacgggatgacacgcatggacccttactgccgcctcagacttggctacgctgtatatgagacccctactgcacacaacggggctaaaaatcctagatggaacaaagtgatccactgtactgtacctccgggcgtcgacagtttctacttggagatcttcgacgaacgcgctttctcaatggatgacagaattgcctggacacacataacaattccagagagcctgaggcaaggcaaggtagaagacaagtggtacagtctgtcaggacggcagggggatgataaagagggaatgattaatcttgtgatgtcttatgccctgcttccagctgccatggtgatgccgccacagcctgtggtactgatgccaacagtctatcaacagggtgtgggctacgtgccaattacaggaatgcctgctgtttgcagtccaggcatggtgcccgtcgcactacctccggctgcagtgaacgcgcaacccagatgttccgaagaagacctgaaagctatccaagacatgttccctaacatggaccaagaagtgatcagaagcgttctggaggcgcagagaggcaacaaggatgccgccattaactcccttcttcagatgggtgaggagccgtag

SEQ ID NO: 26682 - DNA, 768 bp, synthetic construct
  misc_feature 1..768: note = Description of Artificial Sequence: Synthetic coding sequence
  source 1..768: mol_type = other DNA
atggccagcagcaccagcctgcccgcccccggcagccggcccaagaagcctcttggaaagatggccgactggtttcggcagaccctgctcaaaaaaccaaagaaacggccaaattcccctgaatccacctcatcagatgcttctcaaccaacatcgcaagactcaccgctgcccccttcgctgtctagcgtgacatctcccagtttaccgcccacgcatgccagtgactcgggctcttcacggtggagtaaagattatgacgtgtgtgtttgtcattctgaggaggatctcgttgcagctcaggatttagtctcatatctcgaggggtctactgcgtcactgagatgctttttgcaactgcgcgacgctacgcccggaggtgctatcgtgagtgaactttgccaagccttatcctcttcacattgcagagtcttacttataacccctggctttttacaggacccatggtgcaagtatcagatgctccaggctctaacggaggccccaggtgcagaggggtgtaccatccctcttctgagcggactgtcccgtgccgcctatcctcccgaattgaggttcatgtactacgtcgacggccgtggccctgatggtggctttagacaggtcaaagaagccgtaatgaggtccaaccaggtgctcaagcatctgctgtatcacggcacccccgaaattggagtcaagctggagaccgaaaatccctgtcgggcgagtgactcccataagtgtgacaaaaggtatcgagagtag

SEQ ID NO: 26683 - DNA, 708 bp, synthetic construct
  misc_feature 1..708: note = Description of Artificial Sequence: Synthetic coding sequence
  source 1..708: mol_type = other DNA
atggccagcagcaccagcctgcccgcccccggcagccggcccaagaaacctctggggaaaatggctgattggttccgtcaaaccctgctgaaaaaacctaagaaaaggccgaactcccctgagtccacctcctctgatgcttcgcagccgacaagtcaggatagcccactcccaccctccttatcatcagtcacttctcccagcctcccccccactcacgcaagtgattcgggatcctcccggtggagtaaggactatgatgtctgtgtgtgtcactctgaagaagacctagtggcagcccaggacctggtttcttatctcgagggcagcacagctagcttgcgctgctttctgcaactgcgagacgccactccgggtggcgctattgtctctgagctgtgccaggctctgtcatctagtcactgcagggttttgctaatcacgccagggtttctgcaggatccatggtgcaaatatcaaatgctgcaggcacttacagaagcccccggcgcagagggctgtaccatccccctcctgtcagggctgtctagagcagcctacccccccgaactgcgattcatgtattacgtggacggaagggggccagatgggggttttcgccaggtgaaggaggccgttatgcggtgtaagctgctccaggaaggagagggagagagagattccgcgaccgtgagcgacctactatag

SEQ ID NO: 26684 - DNA, 666 bp, synthetic construct
  misc_feature 1..666: note = Description of Artificial Sequence: Synthetic coding sequence
  source 1..666: mol_type = other DNA
atggccagcagcaccagcctgcccgcccccggcagccggcccaagaagcccttaggcaagatggcagactggttccgacaaacactcctgaagaagcccaaaaaaaggcctaattctcctgaaagcacgtccagcgacgcgtcacaaccaacctcacaagatagtcccctgcctccgtctttgagctcggtgactagtccttcgctgccacctacacatgctagtgacagcggcagctctagatggagtaaagattacgacgtgtgtgtctgccatagtgaggaggacctggtcgccgcccaggacctcgtctcctatctagagggatccaccgcttctcttaggtgcttcctgcaacttcgtgacgcaactccgggaggggcaatcgtgtccgaattgtgccaggcactttcctcatcacattgtcgagtgttgctgatcaccccaggcttcttgcaggatccatggtgcaaataccagatgctgcaggccctcacagaagctcccggagccgaggggtgcaccatcccccttctgagcggtctgtccagagccgcataccctcccgaactccgttttatgtattatgtcgacggtcgggggccagacggcggatttcgccaagttaaggaagcggtgatgcgatacttacagactctgtcctag

SEQ ID NO: 26685 - DNA, 666 bp, synthetic construct
  misc_feature 1..666: note = Description of Artificial Sequence: Synthetic coding sequence
  source 1..666: mol_type = other DNA
atggccagcagcaccagcctgcccgcccccggcagccggcccaagaagccactcgggaagatggcagattggtttaggcagactctacttaagaagcccaagaaacggcctaattctcccgagtccacttcctccgacgcttctcaaccaacatcccaggatagccccctgcccccatccctgtcgtctgttacaagcccaagtctgcctccaacccatgcgtcggatagtggatcctcacgctggagcaaagattatgatgtgtgtgtttgtcactctgaggaagatctcgtggccgcccaggacctggtctcttatctggagggctccactgcttccctaagatgcttcctacagttgcgcgatgccaccccaggcggggcaatcgtgtccgagctgtgccaagcactgtcctcttcacactgcagagtcctcctgataactcccggattccttcaggacccttggtgcaagtatcaaatgctgcaggcattgactgaagcaccaggcgcggagggttgcactattccactcctttctgggctgagcagggcagcttatccaccagagctcaggttcatgtactacgtcgatgggcgcgggcccgacggtggttttcgtcaagtcaaagaggcagtgatgcggtatctccaaactctgagctag

SEQ ID NO: 26686 - DNA, 666 bp, synthetic construct
  misc_feature 1..666: note = Description of Artificial Sequence: Synthetic coding sequence
  source 1..666: mol_type = other DNA
atggccagcagcaccagcctgcccgcccccggcagccggcccaagaagcccctggggaagatggccgattggtttcggcaaacactcctgaaaaaaccgaaaaagcggccgaactcccctgaaagcacttctagcgatgcaagtcaacctacatcacaagatagtcccctgccaccatccctgagctccgtgacaagtccatccctcccccccacccacgccagtgactccggctcctctaggtggtctaaagactacgacgtctgcgtctgtcattcagaggaggatctagtggccgctcaggatcttgtgagttacctagaggggtccacagctagcctgcgctgtttcttacagttaagggacgctacgcctgggggggcgattgtgtccgagctctgccaagctctcagtagctcccattgccgcgtgctattaataacgccagggtttctgcaggatccctggtgtaagtaccaaatgttacaagcattgactgaagcaccaggggcagagggctgcaccatcccgctgctatctggactgtccagagccgcctaccctccagagctgcgcttcatgtactacgttgacggtcgggggcctgacgggggttttcgacaagtcaaagaagcggtcatgagatacctgcagaccttaagctag

SEQ ID NO: 26687 - DNA, 2520 bp, synthetic construct
  misc_feature 1..2520: note = Description of Artificial Sequence: Synthetic coding sequence
  source 1..2520: mol_type = other DNA
atgatgagcgccagccggctggccggcaccctgatccccgccatggcattcctttcctgcgtgcgccccgagtcatgggaaccttgtgtggaggtcgtgccaaatatcacctatcagtgtatggaactgaacttttataaaattcccgataacctgcctttctcaactaaaaacttggacttgtcttttaatcctcttaggcatctaggctcgtactcctttttctctttccccgagctgcaagttctagatcttagccgatgcgagattcaaaccattgaagatggggcataccagtcactctcccacctgtctactctcatccttactgggaatccaatccaaagcctagctctgggggctttctccggtcttagttccctgcagaaattggtcgccgtggagacaaatttggcctccttggagaacttccccatcgggcacttgaagacattgaaggaactgaacgtcgcccacaatctaattcagtcctttaagctgcctgagtatttttcaaatcttactaatctcgagcacttggatttgagctccaacaagatccagtccatctattgtacggaccttagagtcctacatcaaatgccgctgctgaacctgtccctggacctctctcttaatcccatgaacttcatacaacctggggctttcaaagaaatccgactccacaaactgaccttgagaaataatttcgacagtctaaacgtgatgaagacctgcatccaagggctggctggccttgaggtccatagactggttcttggcgagtttcggaacgaaggcaatctggagaagttcgataagtccgcactagaggggctgtgtaatctaacaatcgaggagttcagacttgcataccttgattactacttagatgatattattgacctcttcaattgtttgactaatgtttcatcttttagcctggttagcgtgactattgaaagagtgaaggacttcagctataatttcggctggcaacaccttgagctggtcaattgtaagttcggacaattccctactttaaagctgaaaagcctgaagcgcctgacctttacttctaacaagggcgggaatgcattcagcgaagtcgatcttccgtcgctagaatttctcgacctttcccgtaatgggctgagttttaaagggtgttgttctcagtccgattttgggaccacgtcattgaagtatctggatttgagcttcaacggcgtgatcaccatgagtagtaattttctggggcttgagcagctcgaacacctcgatttccagcactctaacctaaagcagatgagtgagttttccgtattcctgagcctccggaatctgatttacctcgatatatcgcacactcatacccgagtggcctttaatggcatcttcaatggtctctcgtctttggaagtcctgaagatggccggaaacagctttcaggagaacttcctgcctgacatctttaccgagctaagaaacttaaccttcctagacttatcccagtgtcaactggagcagctgtcccccacagcttttaattcactgtcttctctccaagttcttaatatgagccataacaacttcttcagtctcgacacatttccatacaagtgcctaaactccctgcaggtccttgattacagcctgaatcacataatgacctccaagaagcaggaacttcaacactttcccagcagcctggcgtttcttaacctgacacaaaatgactttgcttgtacatgcgagcaccaatcgttcctccagtggataaaggaccagagacagctacttgttgaagtggaaaggatggagtgtgcaaccccaagtgacaaacaagggatgcccgtcctcagcttgaatattacttgccagatgaataaaaccatcattggagtaagtgtgcttagtgtgctggttgtaagcgtcgtggctgtgctggtctataaattttactttcatttgatgctgcttgcgggctgtatcaagtacgggcggggcgaaaacatctacgatgcctttgtgatttacagctctcaggacgaagattgggttaggaacgagctggtcaagaacttagaagaaggtgtgcctcctttccaactgtgcttacactatagggatttcatcccgggcgtggccattgcagcaaatattatccacgaaggcttccataaatcccgcaaggtgatcgtcgttgttagccaacactttatccagtcccgctggtgcatctttgaatatgaaatagctcagacgtggcaatttttgagttcacgagccgggatcatctttatcgtcttgcagaaggtcgaaaaaacactcttaaggcaacaggtggaactgtaccggctactgtcacggaatacgtacctagagtgggaggacagcgtgctgggtaggcatattttttggaggcgactgcgtaaagctttgctagacggtaaaagctggaatcccgaaggcaccgtcggcaccggatgcaattggcaggaggcaacaagcatctag

SEQ ID NO: 26688 - DNA, 2400 bp, synthetic construct
  misc_feature 1..2400: note = Description of Artificial Sequence: Synthetic coding sequence
  source 1..2400: mol_type = other DNA
atggagctgaacttctacaagatccccgacaacctgcccttcagcactaaaaatctcgacctatctttcaaccctctcaggcatctgggcagctattctttcttcagttttccagagttacaggtcctggaccttagtagatgcgagattcagacgatagaagatggtgcatatcagtctctgagccacctgtcaacactgatactcacaggcaatccaatccagtccttggccctgggagccttctccggtctatcctctctccaaaagctggtggcggtggagactaacctggcttcactggaaaacttcccaattggccatcttaaaacattaaaagaactgaatgtcgcacacaacctgatccaatccttcaagcttccagaatactttagtaacttgacgaatttagaacacctggacctgagctcgaacaaaatacagtcaatttactgcaccgacttaagggttctgcatcagatgcccctactaaatttgtccctggacctatctctcaatccaatgaatttcatccaacccggggccttcaaggaaatccgtttgcacaagttaacccttaggaacaactttgatagccttaatgtgatgaagacctgtattcaaggactagcgggattggaagtccaccgactggttcttggggagttccggaatgagggcaacctcgagaagtttgataagtccgctttagagggcctctgcaacttgaccattgaggaattccggctggcctacctcgattattacctggatgacattattgacctgtttaattgcttgaccaacgtttcgtcctttagcctcgtaagtgtcacaattgagagggtcaaagactttagctataactttggctggcagcatcttgaactggtgaattgcaaatttggacagttcccaacactgaaacttaaaagtcttaagagattgacctttacgtccaataaagggggaaacgccttctccgaggtggacctgcccagcctggagtttttggatttgtcaaggaacgggctgtcattcaaagggtgttgctctcagagtgatttcgggaccacgtccctgaaatacctcgatctgtccttcaacggggtcataacgatgtcgtcaaactttttgggtttagaacagttggagcatctggatttccagcacagtaatcttaagcaaatgagcgagttcagcgtgttcctttctcttcgcaacctcatctacctggacatcagtcatacccacactcgagtcgcatttaacgggatcttcaacggactttcatccttggaggtgctaaagatggcaggcaattcttttcaggagaatttcctgcctgacatcttcactgagctcagaaacttgacattcctggatttgtcgcagtgtcaactggaacagctgagccctaccgcatttaattccctgtcgtccttacaggtacttaacatgagtcacaacaactttttctctcttgatacatttccctacaaatgcctcaattccctgcaggtgctggattactcactcaaccacattatgacatctaaaaaacaagagctccagcacttcccttcctctctggccttcctgaatctcacacaaaacgacttcgcatgcacttgcgagcatcagagttttctccagtggattaaggaccaaagacagctgcttgttgaagtggagcgtatggagtgcgcgaccccatcagacaagcaaggcatgcccgttctcagtctaaacattacgtgtcagatgaacaagactattataggagtctctgtgctcagcgtgctagttgtgagtgtggtagccgtattagtgtacaaattttactttcacttgatgctactagccggctgcattaaatatggcaggggcgagaatatctacgatgcatttgttatctattcctcgcaagatgaggattgggttcggaacgagctggttaagaatctggaagagggagtccctccattccaattgtgcctccattatagggacttcataccaggggtggccattgcagctaacattatacatgagggctttcataagagtcgaaaagtcatcgtcgttgtttcccaacactttatccagtcgagatggtgtattttcgaatatgagattgcccaaacgtggcaattcctttcttcccgagccgggatcatttttattgtccttcagaaagtcgagaagactctcctcagacagcaagtcgaactttataggcttttgtcccggaatacatatttggagtgggaggactccgtactcggtagacacattttctggcggcggctccggaaggcactgttggatggaaagtcctggaacccggaagggactgtaggaaccgggtgtaactggcaagaggctaccagcatttag

SEQ ID NO: 26689 - DNA, 2577 bp, synthetic construct
  misc_feature 1..2577: note = Description of Artificial Sequence: Synthetic coding sequence
  source 1..2577: mol_type = other DNA
atgggcgaccacctggacctgctgctgggcgtggtgctgatggccggccccgtgttcggcattccttcgtgtagcttcgacggcaggattgcgttctacagattctgcaacctcactcaagtaccgcaggtcctgaatacaacggaacggctgctgttgtcttttaactacatccggacggtgacagcaagtagttttcctttcttggaacagctccagctgctagagcttggcagccaatacacaccactaacaatcgacaaagaagcttttcgcaatctgcctaacctgagaatcctcgatctgggctccagcaaaatttattttcttcatcctgacgccttccaggggttattccacctgtttgagctacgactgtatttctgtggactgtcagatgcggtgcttaaagacggctacttccgcaatttgaaagctctgactcggttggacctgtcaaagaaccagatcaggagcctatacctgcacccatcctttggaaagcttaattccttaaaatccatagacttttcctccaaccagattttcttggtctgtgagcacgagctggaacccctgcaggggaagaccctatcatttttcagtctggctgccaactcactatacagcagggtctccgtcgactggggcaaatgcatgaaccctttccgcaatatggtccttgaaattctcgatgtctctggcaacgggtggaccgtagacatcacgggcaacttcagcaacgccatttcaaagtctcaggctttcagcttgatcctggcacaccatattatgggggccggcttcggcttccataatatcaaggatccggatcagaacacattcgcaggcctggcacggtcaagtgtgcggcacttggatctgtcacacggctttgtattctctctcaactcaagggtatttgagaccctgaaagacctgaaggtcttaaatctagcatataataagattaataaaattgcggatgaggctttttatggcctggacaacctgcaagtccttaatcttagctacaatctgctgggagaactgtattcctcaaacttttacggtttgcccaaggtggcgtatatagatcttcagaaaaatcacattgccatcatacaggatcaaacttttaagttcctagagaaactgcagactttggacttacgcgataacgccctgactacaattcacttcatccccagcatccccgacatatttctgtcaggcaacaaactggtcactttgccgaagattaacctgactgcgaacttgattcacctgagtgagaacagactagagaacctggacatcctttactttttgctaagggtcccccacctgcagattttgattctgaatcagaatagatttagcagctgttccggtgatcagacgccttctgaaaatccttccctagagcagctttttttgggcgagaacatgctgcagctggcgtgggaaacagaactgtgctgggatgtatttgaagggctctcgcacctgcaggtcttgtacctgaaccataactatctgaatagtttgccaccaggagtgtttagtcaccttactgccctaagaggtctgtcactgaactctaataggctgactgtgttgtcccacaatgatctcccagctaatctcgagatcctcgacatatctagaaaccagttactggcccccaatcctgatgtcttcgtgagcctatccgtgctggacatcactcataataagtttatatgcgagtgcgaactgagcacattcattaattggttgaaccacactaacgtgaccattgccggcccgccagcagacatttactgcgtgtatccggatagcttcagcggagttagcttgttcagcttgagcacagaaggctgcgacgaggaagaggtactgaaatcccttaaattctccctattcatcgtatgcaccgtcaccctgacactgttccttatgaccattctgaccgtcacaaaattcagaggcttctgcttcatctgttacaaaactgcccagagactcgttttcaaggaccatccacagggaactgaacccgatatgtacaagtatgatgcatacctgtgtttctcctccaaggatttcacttgggtgcagaacgccttgctgaaacatctcgatactcagtactcagatcaaaatcgatttaatttatgtttcgaagagcgagactttgtgcctggcgaaaatcggattgcgaacatccaagacgccatctggaactcgcggaaaattgtttgtttagtgtcgcgtcacttcctccgagacggatggtgcttggaggcatttagctatgcccaaggacggtgccttagtgatctgaactcggccttaataatggtggtggtaggatcgctgagccagtaccaactgatgaagcaccagagcattcgaggattcgtgcagaagcagcagtacctgcgatggcccgaagacttccaagatgtgggatggtttctgcacaaacttagtcagcagatccttaagaaagaaaaggagaagaagaaagacaacaacattccgttacagaccgttgctacgatctcgtag

SEQ ID NO: 26690 - DNA, 2577 bp, synthetic construct
  misc_feature 1..2577: note = Description of Artificial Sequence: Synthetic coding sequence
  source 1..2577: mol_type = other DNA
atgggcgaccacctggacctgctgctgggcgtggtgctgatggccggacctgtttttggcatcccttcatgtagtttcgacggaaggatcgctttctataggttttgcaatctgactcaagttcctcaggttctgaacaccacagaaaggctcctgctgtcgttcaactacatcagaactgtaaccgcatccagcttcccctttctggagcaactacagttactcgaattgggctcccagtacacccccctcaccatcgacaaagaggcctttagaaacttgccgaatttgcgaattctggatcttggaagcagcaagatttacttcctgcacccggatgcctttcagggccttttccacctcttcgagctgcgtctgtacttttgcggactgtccgacgccgtcctgaaagatggatacttccggaatctgaaggctcttacgaggttggacttatctaaaaatcagattaggtccctgtatctgcacccaagttttggcaaactgaatagcctcaaatcaattgacttttctagcaatcaaatcttcttagtgtgtgagcatgaactcgaacctctccaaggcaagaccctgagcttctttagcctggctgctaattctctttactcaagggtcagcgtcgattgggggaaatgtatgaacccatttaggaatatggttttggaaatcctggacgtctctggcaacgggtggactgttgatattacagggaacttttcaaatgccatctcaaagtcacaagccttttcccttatcctcgctcaccatattatgggcgccgggttcggattccataatatcaaggacccggatcagaacacatttgccggcttggcccgtagcagcgttagacatctcgacttgagtcacggctttgttttctcacttaacagcagggtgttcgagaccctcaaagacctgaaagtgctgaacctcgcctacaataagatcaataagatagccgacgaagcattctatggtctggacaacttgcaggtcttgaatttatcatacaacctgctgggggaattgtactcctccaacttctacggactcccaaaagtggcttacatcgacttgcagaagaatcatattgcgattatccaggaccagacgttcaagtttttagagaaactacagaccctcgatctgcgcgataacgccttgaccacgatacattttattccttctatccccgatattttcctgtctggcaacaaactggtgacactgcctaagatcaacctgactgcaaacctgatccatctctctgagaatcgcctggagaatctggatattctctattttcttctgcgggtgcctcacctccaaatcttgatccttaatcagaaccggttctccagctgcagtggggaccagacccccagcgagaacccctctctcgagcagttgttccttggagaaaacatgttgcaattagcatgggagacagaattgtgctgggacgtattcgagggactttctcacctccaggtgctgtatctaaatcacaattatttgaacagccttcctcctggtgtgttctctcatttaacagcccttcgagggctttcccttaattctaatcggctcacggttttgtcacacaacgacctgccagctaatctcgagatcctggatattagtaggaatcaactgcttgcccctaatcctgatgttttcgtttccctctctgtgctcgatataacccacaacaagtttatctgcgaatgcgagctttctacttttataaattggctcaatcatactaatgtcaccattgctgggcctcccgccgacatctactgcgtttaccctgacagtttttcaggcgtctcacttttctctctgtctacggaaggatgtgatgaggaggaagttcttaagagtttgaaattcagtctattcatcgtgtgcacagtgacactgactctgtttctcatgactattttaaccgtcactaagttccgggggttttgtttcatttgctacaagactgcccagcgcctcgtctttaaggaccatccacagggtaccgagcccgatatgtacaaatacgacgcgtacctttgcttctcaagcaaagacttcacttgggttcaaaatgcactgctaaaacatctggacacacagtacagtgaccagaatcggttcaatttgtgcttcgaggaacgggatttcgtgccgggagaaaatagaatcgccaatattcaggacgccatttggaacagcaggaagattgtctgcctggtgagccgccacttcctgagagatggctggtgtctggaggcattctcctacgcccaggggaggtgcctgagcgacctgaacagcgcgttgatcatggtggtggtcggctctctcagtcagtatcaattgatgaagcaccagagtatcaggggcttcgtgcaaaagcagcagtacctcaggtggcccgaagactttcaggatgttggatggtttttgcataagctaagtcaacagatccttaaaaaagagaaagaaaaaaagaaggacaataacattccactgcagaccgttgcaaccattagctag

SEQ ID NO: 26691 - DNA, 66 bp, synthetic construct
  misc_feature 1..66: note = Description of Artificial Sequence: Synthetic coding sequence
  source 1..66: mol_type = other DNA
atgggcgaccacctggacctgctgctgggcgtggtgctgatggccggcccagtgtttgggatttag

SEQ ID NO: 26692 - DNA, 2577 bp, synthetic construct
  misc_feature 1..2577: note = Description of Artificial Sequence: Synthetic coding sequence
  source 1..2577: mol_type = other DNA
atgggcgaccacctggacctgctgctgggcgtggtgctgatggccggtcccgtgttcggcataccttcatgcagcttcgacggtcgaatcgccttttaccgattttgtaaccttactcaggtgccccaggtgctaaatacaacggagaggttgctgttgtccttcaactacattagaacagtgaccgccagcagcttcccatttctcgagcagctccagctgttggaactgggtagccaatatactcctctcaccattgacaaagaagccttccgcaatctaccaaatctgcggatcctcgacctcggcagctccaaaatttacttcctccacccagatgcatttcaggggctgtttcatctgtttgagcttcgcctctacttctgcggtctgagcgatgctgtacttaaagacgggtactttcggaatctaaaggctttgactagactcgatctctctaagaatcagatccgtagcctgtacttgcaccctagcttcggcaaactcaatagccttaaaagcatcgacttctccagcaatcagattttcctggtgtgtgagcacgagttggaacccctgcagggaaagacactgtcctttttttccttggcagctaacagtctgtatagtcgcgtctctgtggactggggcaaatgcatgaaccctttccgaaatatggttctggagatattggatgtgagcggcaatggctggaccgttgacatcaccggcaacttctccaacgctatttccaagagccaagcatttagcctgatactggctcaccacatcatgggcgcgggctttggctttcacaatattaaggacccagatcaaaacacttttgccgggttggcgaggagttccgtgaggcatcttgatctgtcacacggttttgtcttttccctgaactcaagagtctttgaaaccttaaaggacctcaaggtgctgaaccttgcttataacaagatcaataagatagccgacgaggccttctacggcttggacaatctccaagtcttaaacctctcctacaacctccttggagagctgtattcttcaaacttttacggactgcctaaagtcgcttatatcgatttgcaaaagaatcacatcgccatcatccaggatcaaaccttcaaatttctcgagaaactgcagacgttggacctgcgggacaacgccctgacgacaattcacttcatcccctccatccccgatatcttcttgtctggcaataagctggttaccctgccaaagatcaacctaacggcaaacctgatacacctcagtgagaaccggctggagaaccttgatattctttatttcctgctccgggtaccacacctgcaaatccttatcttaaatcagaatcggtttagcagttgtagcggggaccagaccccttcagagaatccatccctggagcagctgttcctgggcgaaaatatgctgcagcttgcatgggagacggaactctgctgggatgtgtttgagggcttaagtcaccttcaggtcttatatctcaatcataactatcttaatagcttgccccccggagtgtttagccacctcaccgcccttaggggcctttccctgaactctaaccgccttactgtcctgtcccacaatgatttacccgccaatctcgagatcttagatattagtcggaaccagctgttagcaccaaaccccgatgtctttgtttctttgagtgtcctggacatcacacataacaaatttatctgcgagtgcgagctttctacattcatcaattggcttaatcacactaacgtaactatcgctggaccaccggcagacatttattgtgtctaccctgactcctttagtggagtgagcctattcagtctgtcaaccgagggatgcgacgaggaagaggtacttaagtctctcaaattctccctgtttatcgtgtgtaccgtgaccctcactttgttcctgatgactatattgaccgtcaccaaattcagggggttctgtttcatctgttataagacagctcaaaggttggtgtttaaagaccacccacaaggtactgagccagatatgtataagtatgatgcttatttgtgcttctcctctaaagattttacctgggtccagaatgctctgttgaagcacctggatacccagtattcagaccagaatcgcttcaatctttgctttgaagaacgcgacttcgtgcccggggagaataggattgccaacattcaggatgctatatggaactctaggaagatcgtttgcctggtgtctcgccacttcctcagagatggatggtgtctggaagcgttctcctacgctcaaggtcggtgtttatcagacctcaattctgccctcatcatggttgtagtcggaagcttgtcacagtaccagctgatgaagcaccagagcattcgaggctttgtgcaaaagcaacagtacctgcgctggcccgaagatttccaggacgtggggtggttcctgcacaaactgtctcagcagatcctgaaaaaagagaaagaaaagaaaaaagataataacatccctctgcaaacagtggcgaccatctcctag

SEQ ID NO: 26693 - DNA, 4836 bp, synthetic construct
  misc_feature 1..4836: note = Description of Artificial Sequence: Synthetic coding sequence
  source 1..4836: mol_type = other DNA
caggtgagccccagccaccccgtgaacgagaacatgcaggtgaacaaaattaaaaaaaatgaggatgcaaagaagcgcttatcggtggagagaatctaccagaaaaagacacagctggagcatattcttcttcggcctgatacttacataggatcagttgagcttgtgacacagcagatgtgggtctacgacgaggacgtgggcatcaattatcgtgaggtgacctttgttcctggcctttataaaatttttgatgaaatcctggtgaacgctgctgacaacaagcaaagggatcccaaaatgtcctgtattcgagtcacgatagatccagagaataaccttattagcatctggaataacggaaagggaatccccgtagtggaacataaggttgagaaaatgtatgtaccagctcttatttttggccagctccttaccagcagcaattatgatgacgatgagaaaaaggtcacaggtggccgaaatggctatggggcgaaactgtgcaacatattttctaccaaatttaccgtggagaccgcctcccgagagtacaaaaaaatgtttaagcagacctggatggacaatatgggccgcgccggggaaatggagttgaagccattcaatggtgaggattatacgtgtatcacctttcaacccgatttgtctaagtttaagatgcaatcactggataaggatatagtggccttaatggtgaggcgagcttatgacatcgcaggctcaacaaaggacgtgaaagtctttctaaacgggaacaagttgcccgtgaaggggtttcggagttatgtagacatgtacctgaaggacaagctcgatgagaccggcaatagtcttaaggtcatccacgagcaagtcaaccacagatgggaggtctgcctgacgatgtcagagaaaggatttcagcaaatctcatttgtcaattctattgctacctccaagggcggcaggcacgtggactacgtcgcagatcagattgtgacaaaattggttgacgtggtgaagaaaaaaaataagggtggcgtggcagtgaaggctcaccagcgtctggaatgcagcggaaccattagcgctcattgtaaccttcgccttctcggattctctgactccctggcgtccgccagcagggttgcagagattacggacatgcatcatcatatccagctgatttttgtgttcctgattgagatgggcttttatcatgtcggccaagccgggctggaactcctggcctccctggatccacccagcagcgcctcctgtgtatcccattgcacccagcttttcgtgtccaacttcatctatctgtttctgatattcctgagaagatctttcacttttgtgacccaagcgggtgtgcagtgcactattagcccaacgtcctcttccgtactggctcagttcttcgagtccttcctcttcgtggctatcggctgtggaattgtggagagtattcttaattgggtaaagtttaaagcacaggtgcaacttaacaagaagtgcagtgctgtgaagcataaccggatcaagggcattccgaagttagacgatgccaacgatgctgggggcagaaatagcactgagtgtactctgatcctgacagagggcgacagtgccaagacccttgcagtgagcgggctgggcgtagtgggcagagataagtatggcgttttccctctgcgaggaaaaatcctgaatgtgcgcgaggcttcgcacaagcagattatggaaaacgcagagattaacaacatcatcaagatcgttggactgcagtataagaagaattatgaagacgaggattctctgaaaacactcagatatggcaaaattatgattatgacagatcaggatcaagatgggtcacatatcaagggccttctaatcaactttatccaccacaattggcctagcctgctccgacaccgctttctagaggagtttattacccctatcgtgaaggtttcaaagaataagcaggaaatggccttttatagcctgcctgagttcgaggaatggaagagctcaacgcctaaccacaaaaagtggaaggtgaagtattacaagggtctgggcacaagcacctccaaggaagccaaagaatatttcgcagatatgaaaagacaccgtatccagtttaagtacagtggtccagaagacgacgcagcaatctccctggcattttctaagaaacaaattgacgatagaaaggaatggttgacgaacttcatggaggaccgccgccagcgtaaactgctgggcttgcccgaagattatctatacggccagaccactacttacctgacctacaacgattttatcaataaggaactgattctattctcgaactcagacaatgagagatcaattccttctatggtagatggcctgaagcctggacagcgtaaagtgctgtttacatgttttaaacgaaacgacaaacgcgaagtcaaggttgctcagttagctggctccgtagctgagatgagcagctaccatcacggagagatgtccttgatgatgaccattatcaaccttgcgcagaattttgttggttctaacaatctgaatctactgcaaccgatcggacagttcggaaccagattacacggaggcaaagatagtgctagtccacgctatatcttcacaatgttgtcctctttagcccgcctgctattccccccgaaggacgatcacactctgaaattcctttatgacgataaccaacgggtcgaacctgaatggtatataccaataattccaatggtccttatcaatggcgccgaaggaattggaacgggctggtcctgcaagattccaaactttgatgttcgcgaaatagtcaataatattagaagactaatggacggtgaggagccacttccaatgctcccgagctacaagaattttaagggtaccattgaggagttagccccaaaccaatacgtcattagcggagaagtggccatacttaattcaacaactatcgagatctcggaactgcctgttcgcacttggactcagacctacaaggaacaggtcctggagcccatgcttaacggaaccgagaaaacccctcccctgatcacagactatcgcgagtatcataccgataccactgtgaagttcgttgtcaagatgactgaggagaaattagctgaggccgaacgcgtcggactccataaagtattcaaactgcagacatctctaacgtgtaactcgatggtgctctttgaccacgtgggctgcctcaagaagtacgacaccgtacttgacatcctgcgtgatttcttcgagttgaggctgaagtattacggtctgcggaaagaatggttgctgggaatgctgggtgctgaatccgcaaagttaaataaccaggcccgcttcatccttgaaaaaattgacggtaagatcatcatcgaaaacaaaccaaaaaaggaactcatcaaagtgcttatccaacggggctatgactccgatccggtgaaagcctggaaggaagctcagcagaaggtgccagacgaggaagagaacgaggagagtgacaacgaaaaggagacggaaaagagcgatagcgtaacagactctggccccaccttcaactatctgcttgacatgcccctctggtacctgactaaggaaaagaaagatgaactatgccgattgagaaatgagaaagagcaggaactcgatacactgaagcgcaagagtccatccgatctatggaaagaggatttagcaacgttcattgaggaactggaagctgtcgaggccaaggaaaaacaggacgaacaggtcggcctgccaggaaagggtggcaaggcaaagggcaaaaaaacgcagatggccgaggtgttgccatccccgcggggacaacgggtgatcccacggattaccattgaaatgaaagccgaggccgagaagaaaaataagaagaaaataaaaaacgagaataccgaagggtcccctcaagaggacggcgtcgagctggaaggcctgaagcagcgactcgaaaagaaacagaagcgcgagccaggtacaaaaacaaaaaagcaaacaactttggcttttaaacctattaaaaagggaaaaaagcgcaacccgtggtcagattccgagtctgaccgctcttccgatgaatctaattttgacgttccgccccgtgagacggagccaaggagagcagccactaagacaaaattcaccatggacctggactccgacgaggatttctccgacttcgacgaaaagacagatgatgaagactttgtgccaagcgacgcaagcccacctaagaccaaaacttctccaaagcttagcaacaaagagctgaagccgcaaaaatccgtggtgagtgatttggaggccgatgacgtcaaagggtcagttcccctgtctagttccccacccgctacccactttccagacgagaccgaaataaccaacccagtccctaaaaagaacgtgactgtcaagaagaccgcagccaaatctcagagttccacctcgaccacgggggcaaaaaaacgcgcggcgcctaagggcaccaaacgcgatcccgcccttaactctggtgtcagccagaaacccgatcccgctaagacgaaaaaccgccgcaagagaaagccctcaaccagcgatgacagcgattctaacttcgaaaagatagtcagcaaggccgtcaccagtaaaaagtctaagggggagagtgatgattttcatatggattttgacagtgccgtcgcccccagagcgaagagtgtacgggccaagaaacctataaaatacctcgaagagagtgatgaagatgacctattctag

SEQ ID NO: 26694 - DNA, 4665 bp, synthetic construct
  misc_feature 1..4665: note = Description of Artificial Sequence: Synthetic coding sequence
  source 1..4665: mol_type = other DNA
caggtgagccccagccaccccgtgaacgagaacatgcaggtgaacaagatcaagaaaaatgaagacgccaagaagagactttctgtggaacgcatctaccagaagaaaacgcaactggagcacatcctgctgcgtccggatacctacataggcagtgtggaattagtgacacagcagatgtgggtgtacgacgaggacgtgggtataaattatcgcgaggttacatttgtccccggcctgtataaaatttttgacgaaatactggtgaacgccgcggataataagcagagggacccaaagatgtcatgcattagagtcacaattgaccctgaaaataacttaatcagcatctggaacaatggtaagggaattccagtggtcgagcataaggtggaaaagatgtatgttccagcccttattttcgggcaactgctgacctcctcaaactacgatgatgacgaaaagaaagtaacaggcggcaggaacggatatggcgccaaactgtgcaacatttttagcacaaaatttaccgtggagacagcgagtcgcgagtataagaagatgttcaagcagacatggatggacaatatgggccgggccggggaaatggagttgaaacccttcaacggcgaggattacacttgcattacttttcagcctgatttatccaaattcaaaatgcagagtctcgacaaagacatcgtagctcttatggttcggagggcttacgatattgcgggctccaccaaagacgtgaaggtcttcctgaacggcaacaaactgccggtgaaggggttccgctcctatgtcgacatgtacctgaaggacaagctcgacgaaaccggcaattcacttaaagtaatccacgaacaggtaaaccatcgctgggaagtgtgcctgactatgtctgaaaagggctttcagcaaatctccttcgttaacagcatcgccacatccaaagggggccgccacgtagattacgtggctgaccagatcgtcacaaagcttgtagatgttgtaaagaaaaaaaataaggggggcgtcgcggtgaaagcccaccaagtgaagaatcatatgtggatctttgttaacgccctgatcgagaaccccacattcgactctcagacaaaggagaatatgacactgcagcctaaatcttttgggagtacttgtcagctgtccgagaagttcataaaagcggcccatttatactccagattccttattgatcctttcttcccaaacatgatccccaatatgaacttattccaggctatcggatgcggaatagtagagagtatcctgaattgggtaaaattcaaggctcaggtgcagctgaataaaaaatgcagcgccgtgaagcacaaccgcattaagggaattcctaaactagacgacgcaaacgacgctggaggtaggaatagcacagagtgtacactgatcttaaccgagggagactctgctaaaacgttggctgtttctgggctgggagtcgtgggacgtgacaagtacggcgtgttcccattacgggggaaaatcctgaatgtgagggaagcttcccacaaacagattatggagaacgccgagattaataacatcattaaaatagtcggcctgcagtacaaaaagaattacgaagacgaggactcactcaaaaccctgcggtacgggaaaattatgattatgacagatcaggaccaggatggatctcatatcaagggactgctaatcaattttatccatcacaactggccttctctacttagacaccgatttctcgaggagttcatcaccccaatagtgaaggtctctaagaataaacaggagatggctttctacagccttcccgagttcgaagagtggaaaagctcgacccctaatcataagaaatggaaggtgaaatactataagggcctcggaacttccacaagtaaagaagccaaggaatacttcgctgacatgaagcgacatcgcattcagtttaaatactcagggcccgaggacgacgcggccatatcactggcattctccaaaaaacaaattgacgaccgcaaagaatggctcactaacttcatggaggatcgcaggcagagaaaactgctcggactccccgaagattacctctatgggcaaacaacaacttacctgacatataacgactttatcaataaagaactcatcctgtttagcaactccgacaatgagcgtagcataccctctatggtagatggactgaaacccggacaacggaaagttctattcacgtgttttaagagaaacgataaacgggaggtgaaggtcgcccaactggcgggctccgttgccgaaatgagctcgtatcaccatggcgaaatgtctctaatgatgacaattattaatcttgctcaaaattttgtcggttccaacaaccttaatctgctccagcctatcggccagtttgggacccgcctgcatggcggcaaggactccgcaagccccagatacattttcaccatgctttcttcattggctaggctgctcttcccacccaaagacgaccacactctgaaattcctgtacgatgataaccagagggtcgaacccgagtggtatattcctattatccccatggtgctcattaacggcgcagaaggcatcggaaccggatggtcttgtaagatcccaaatttcgatgtacgcgagatcgttaacaatattcgaaggctgatggacggggaagagccgttgcccatgctcccatcttacaagaattttaaagggactatcgaggagctcgctccgaatcagtacgttatttctggcgaggttgccatcctcaatagcaccaccatcgaaatctcagagctacctgttcgaacctggacacagacctacaaggaacaggtgttagaaccgatgctgaatggtactgagaaaactcctcccctaataactgactatcgggagtatcacactgacactacagtcaagtttgtggtcaaaatgacagaagagaaactcgccgaggctgagagagtggggctacataaggtcttcaaactgcagacttctcttacatgtaactcaatggttttattcgaccacgtggggtgtctaaaaaaatatgacactgtgctcgacatcttgagggatttctttgagctgcgccttaagtattatggtcttcggaaggagtggttgcttgggatgctcggcgcggagtctgcaaagcttaataaccaagcccgcttcattttggagaagattgatgggaaaatcatcatagaaaacaagcccaagaaggagctgataaaggtgcttatccagcgcggctatgactccgatcccgtcaaagcctggaaggaagcccagcagaaagtgcctgacgaggaggaaaacgaggagagcgataacgagaaggaaactgagaaaagcgactccgtcactgactctggtcccacatttaactatttgttggacatgcctctctggtatctgacgaaagagaagaaagacgagctgtgccggcttcgcaacgaaaaggagcaagagcttgatacgctgaagcgaaagagcccctccgacctgtggaaggaggatctggctacttttatcgaagagttggaagctgtcgaagcaaaggaaaagcaggatgagcaggtcgggctgcctggtaaagggggcaaagcgaaaggcaagaagacccaaatggccgaagtcttgccctcccccagaggacagagagtcatcccgagaattactatcgaaatgaaggccgaggctgaaaagaaaaacaagaaaaagattaaaaacgaaaacacagaaggcagcccacaggaggacggcgtggagttagaagggctcaagcaaaggcttgagaagaaacaaaaaagggaacccggcaccaagacaaagaagcagactaccttagcctttaagcccattaaaaaaggcaagaaacgcaatccatggagcgacagcgaatcggatcgttcaagtgatgaaagcaatttcgacgtgcctcctcgagagaccgagcctaggagagccgcaaccaaaaccaagttcacaatggaccttgatagtgacgaagacttttctgactttgacgagaagactgatgacgaagactttgtaccttccgacgcctccccccccaagacaaagacctccccgaaactgagtaacaaggagcttaaaccccagaaatccgtcgtgtcagacctcgaggccgacgacgtcaagggtagtgtgcccctgtcctcgagtccccccgccacacacttcccagacgaaaccgaaattacaaaccctgtacctaagaaaaacgtgacagtgaagaagacagccgcaaaatctcagagctccacgagcactaccggcgccaagaaacgcgccgctcctaagggaaccaagcgtgatcccgcactgaactccggcgtgagtcagaaaccagacccagccaaaaccaaaaatagacgaaagcgcaagccctctactagcgatgatagtgattccaattttgagaagatcgtctctaaagcggttacctccaaaaaaagcaagggagaatccgacgactttcacatggattttgacagtgccgtggccccgcgtgccaaatcagtgagggccaaaaagccaattaagtacctggaagaatccgatgaggacgacctcttctag

SEQ ID NO: 26695 - DNA, 4707 bp, synthetic construct
  misc_feature 1..4707: note = Description of Artificial Sequence: Synthetic coding sequence
  source 1..4707: mol_type = other DNA
atggaggtgagccccctgcagcccgtgaacgagaacatgcaggtgaacaagataaagaagaatgaggatgccaaaaagaggctaagcgtggagagaatttaccagaagaaaacccagctggaacatattcttctacgcccggatacatatattgggagcgtagagcttgtaacccaacaaatgtgggtatacgacgaggatgtggggatcaactatcgtgaggttaccttcgtgcccggattgtataaaatctttgacgagatcctcgtgaacgccgcagataacaagcagcgggacccaaagatgtcatgtatccgcgtcaccatcgacccagagaacaacctaatttccatttggaacaatgggaaggggattccagttgtggagcacaaagtggagaagatgtacgtgcccgctttaattttcggccagctgctgaccagctcaaactacgacgatgacgagaagaaagtaacaggaggccgtaacggctatggggcgaaactgtgcaatatcttttcgaccaagttcaccgtagagaccgctagcagggagtataaaaaaatgtttaagcaggctatcacctggatggacaatatgggcagggctggagaaatggagctcaaaccattcaatggggaggattatacctgtataacctttcagcccgatctgtctaaatttaagatgcagtctctggacaaagacatcgtggctcttatggtaagaagggcttacgatatcgcgggatctacaaaagacgtaaaagtctttttgaatgggaacaagctcccagtgaaggggtttcgtagttatgtcgacatgtatttaaaagacaagctcgacgaaacaggtaactcactcaaggtcatccacgagcaggttaaccaccgatgggaggtctgtctgactatgagcgagaagggatttcaacaaatctcatttgttaattccatcgctacctctaaagtgatcctgtttttgaattacatgatctatttgtatatttacgtttttctgctgtttttgatctacaaagtggacctgaacatagggttggcctattttacgggcgggcgccacgttgactacgtggccgatcaaattgtgacgaagctagtggatgtcgttaaaaagaaaaataagggaggtgtcgctgtcaaagcccaccaggttaagaaccatatgtggatcttcgtcaatgcgttgattgagaatcctacttttgatagtcagaccaaggaaaacatgaccctacagcctaaatccttcggaagcacttgtcagctgagcgaaaaatttatcaaagcggccatcggatgcggcatcgtagaatccatcctgaactgggtgaaattcaaagctcaggttcagttgaacaagaagtgcagtgcagtcaaacacaacaggattaaaggcatccctaagctggatgacgccaatgacgctggaggacggaattccactgagtgcactctcatcctgacggagggggactccgcgaagacccttgccgtgtctggcttaggtgttgtagggagggataaatatggcgtgttcccccttcgaggcaaaatacttaatgttagagaggcatcgcacaagcagatcatggagaatgctgagatcaataacattatcaaaattgttggactgcagtataaaaagaactatgaggatgaggattccctgaagaccctccgttatggcaagattatgatcatgaccgaccaggaccaggatgggagccacataaagggcctgctgatcaactttattcatcacaactggccgtcactactccgtcatagattcttagaggagtttataacaccaatcgttaaagtgtcaaagaataagcaggagatggctttttattcactgccagaattcgaagaatggaagtctagcaccccaaaccacaagaaatggaaggtaaagtactacaaagggctcggaacttccacctccaaggaagcaaaagaatattttgcagatatgaagcgacaccgtatccagttcaaatattccggacccgaggacgatgccgccatttctctggctttttccaaaaagcagattgatgatcggaaggaatggttgacaaatttcatggaggaccgacgccagaggaaacttctgggactgcctgaagactacttatacggtcagacaacaacttacctgacctataatgactttattaacaaagagctgatactgttttccaatagcgacaatgagaggtcaattccgtctatggttgatggtctgaaacctggccagcgcaaagtactgttcacgtgtttcaaacgcaacgataagcgagaggtcaaggtggcacagctcgcaggcagcgtggcagagatgagcagttatcatcatggtgagatgtcattgatgatgactattatcaaccttgcccaaaatttcgtcggatcaaataacttgaaccttttgcagccgattggccaattcggtacccggttacacgggggcaaggatagtgccagtcctaggtacatcttcacgatgctgtcaagcttggcccggcttctgttcccccctaaggatgatcacaccttgaagtttttgtacgacgataaccagcgggtggaacccgaatggtatatcccgattattccgatggtgctaattaacggggcggagggcataggcaccggatggagttgtaagatccccaacttcgatgtgcgagagatcgtcaataatattcggagactcatggacggagaggaaccactgcccatgttgcctagttacaaaaatttcaagggaactatagaggaattggcgcctaaccagtatgttatatctggcgaggtggcaatactgaactctacaaccatcgaaatctccgagctgccggtgcgtacctggacacagacctacaaggagcaagtacttgaaccaatgttgaacggcactgagaaaacacccccccttataacagattaccgtgagtaccacactgacacaacggtcaagtttgtcgttaagatgaccgaagagaagttagctgaagccgaacgcgtgggactccacaaggtttttaagttgcagacatcactgacctgtaatagcatggttctctttgatcatgtcggatgcctgaaaaaatacgatacagtgctggacattctgcgggactttttcgagctgcggctaaaatactacggtctgcgtaaagaatggctcttgggtatgttaggtgctgagtccgccaagttaaataatcaggcccgtttcattctcgagaaaatcgatggcaaaattataattgagaataaaccaaaaaaagaacttattaaggtcctgatccagcgaggctacgattcagatccggtgaaggcctggaaagaggcacagcagaaggttccagacgaggaggagaatgaggaatccgacaacgaaaaagagactgagaagagcgattcggtgactgactcgggacccacattcaattatctcctggacatgccattatggtatctgaccaaagagaagaaggacgagctgtgcaggctgagaaacgaaaaagagcaggagctggacacactgaagaggaaatcgccatccgatctatggaaggaagacctagccactttcattgaggaactggaagctgtggaagccaaggaaaagcaagacgagcaggtgggcctcccaggtaagggtgggaaagcaaagggtaagaagacccagatggcagaggtcctcccctccccaagaggacagagggttattccccgaatcacaattgagatgaaagccgaagctgagaagaagaataagaagaaaatcaagaacgagaatacagagggatctccacaagaggatggagtagagctcgaaggactaaagcagcgcctagagaaaaagcaaaaaagggagcctgggacaaagactaagaagcagacaacactcgcttttaaacccatcaaaaaaggcaaaaaacggaacccctggtcagatagcgaaagtgacaggtcatccgatgagagcaattttgatgtgccacctcgagagaccgaaccccgccgagccgccactaaaaccaagtttactatggacctggactctgatgaggatttctcagacttcgatgagaagacagacgacgaggattttgttcctagcgacgcttccccccctaaaaccaaaacatccccaaagcagaactgtaataaggagttaaaacctcagaagtccgtcgtctctgacctcgaggctgacgacgtaaaggggtcagtcccccttagcagcagccctccggcaacacatttccccgacgagacagagatcactaatcccgtgcctaagaagaacgtcaccgttaaaaaaacggctgccaaaagccagagtagcacaagcaccaccggcgctaagaagcgcgccgcccctaagggaactaaaagagaccctgctctcaatagcggggtctctcagaaacctgacccagctaaaactaagaaccgaagaaaacgcaaaccatctacctcagacgactctgactccaattttgaaaaaattgtcagcaaggcagtgacctccaagaagagtaaaggggaatcagatgattttcatatggatttcgactctgcagtggcccccagagcaaaaagtgtgcgcgctaaaaaaccaatcaaatacctggaagaatcagatgaggacgatctcttctag

SEQ ID NO: 26696 - DNA, 4596 bp, synthetic construct
  misc_feature 1..4596: note = Description of Artificial Sequence: Synthetic coding sequence
  source 1..4596: mol_type = other DNA
atggaggtgagccccctgcagcccgtgaacgagaacatgcaggtgaacaagatcaagaagaatgaagacgcaaagaaacggctgtcagtagaaaggatttaccaaaagaaaactcagctggagcacattttgctgaggcctgatacatacattgggtcagtagagctggttacccaacagatgtgggtttacgacgaggatgtgggaataaactatcgggaggtcacattcgtgccgggtctgtacaagatctttgatgagattctggttaatgccgcagataataaacagagagacccaaagatgtcatgtattcgggttactatcgacccagaaaacaacctcatttctatttggaacaatggtaaggggattccagtggtggagcataaggtggagaagatgtatgtgcccgccttgatatttggtcaattactgacatcctcaaactatgacgacgacgagaagaaggtgaccggcggccgcaatggatatggagccaaattgtgtaacatttttagcaccaagtttactgtggagaccgcctccagagagtacaagaagatgtttaagcaaacatggatggacaacatgggaagagcgggtgagatggaattgaagccattcaacggggaggattacacctgtattacttttcagccggatctgtcaaagtttaaaatgcagagtctcgacaaggacatcgtggctctcatggtacgcagggcctatgacatcgcagggtctactaaagatgtcaaagtgtttctcaatggcaataagcttcctgtgaagggttttaggtcttacgttgacatgtacctcaaagacaagcttgacgagactggaaattctctcaaggtgatccacgaacaagtcaaccaccgctgggaggtctgcctaactatgtcagaaaagggtttccagcagatctcttttgtgaatagtatcgcgacgagtaagggaggccggcacgtggactatgttgctgatcaaatcgttaccaagctggtggatgtagtcaaaaagaaaaacaaggggggcgtggccgttaaggcacaccaggtgaagaatcatatgtggatcttcgttaacgcattgattgagaatcccacgtttgactctcagacgaaagagaacatgacactccagcctaagtcttttggttcaacctgccaactcagcgagaaattcataaaggcggcaattgggtgcggtatcgttgagagtatacttaattgggtgaagttcaaggctcaggtacaacttaacaagaaatgtagtgccgtgaagcataataggatcaagggaattcccaaactggacgatgccaacgacgctggcggacgcaacagtacagagtgcaccttgatactcacggagggggacagtgctaagacactcgctgtgtcaggattaggagtggtcgggcgggacaagtatggtgtttttcctttacgtggcaagattttgaatgtcagggaagcctctcataagcagatcatggaaaatgcggaaatcaacaacattattaaaatcgtggggctccagtataagaagaactacgaagacgaggactctttgaaaaccttgcgctatggaaagattatgattatgacggatcaagatcaggacgggtcccacatcaaggggctgttgattaattttatccaccacaattggcccagtctgcttcggcacagattcctcgaggaattcattacacctatagtgaaggtgtcaaagaataagcaagaaatggcattttacagcctgccagagttcgaggagtggaaaagtagtacccccaatcataaaaagtggaaagtgaagtattataagggcctgggtaccagtacttccaaagaggccaaggaatactttgccgatatgaaacggcacaggatacagtttaaatacagtgggccagaagatgatgcagctataagcctagccttctcaaagaaacagatcgacgatcgtaaagaatggctgacaaatttcatggaggaccgtaggcagaggaaactactggggcttcctgaggattatctctacggccagaccacaacttatctgacatacaacgactttatcaacaaggaactaatcctgttcagtaattcagacaacgagaggtctatcccttcaatggttgatggtctcaaacctggacaacgcaaagtcttgttcacctgcttcaagagaaatgacaaacgcgaagtaaaggtggcccagctggccggcagcgttgccgagatgtcttcctaccaccatggagaaatgagtctgatgatgacaattatcaatctcgcgcagaatttcgtggggtccaacaacctcaatctgctgcagccaattggacagtttggcacccgtctccacggagggaaggactctgctagcccccgatatatcttcaccatgctgagttctctggccagactactcttccctccgaaagacgaccataccttgaaatttctgtatgatgataaccaacgagtggagccggaatggtacattccgattatcccaatggtgctgatcaatggagcagagggtataggcactggatggtcttgcaagattcccaacttcgatgtcagggagatcgttaataacattcgcagactcatggacggggaggaaccactccctatgcttcctagttataaaaacttcaagggcaccatagaggaactagcaccgaatcagtatgtcatctcaggagaggtcgcgattctgaacagcacaactatcgagattagcgaattacccgtacgcacttggactcagacctacaaggaacaggtgttggagccgatgctgaatgggaccgagaagacacccccattgatcaccgactatagagagtatcacaccgacactaccgtgaagttcgtggtgaaaatgaccgaggaaaagctggcagaagcagagagggttggactgcataaggtgttcaaactccaaacttcgctcacctgcaacagcatggtgctgtttgatcacgttggttgtcttaagaaatatgacaccgtgctcgatattctgcgcgacttctttgaactgcggctcaagtattatggtctcagaaaagagtggttgcttggtatgttaggcgccgaatctgctaaacttaacaaccaggcacgttttatcttggaaaagatcgacggcaagattattatcgaaaacaaaccgaagaaggagctaattaaggtccttatacagcggggatatgacagcgatccagtgaaggcctggaaagaggctcagcagaaggttccagatgaggaggaaaacgaggagtctgacaacgaaaaagaaactgaaaaaagtgacagcgtgactgacagtggacccaccttcaattacttgttagacatgccgctgtggtacctgacaaaggagaaaaaggacgaactatgtagacttcgaaacgagaaagagcaagagctggacaccctcaagcgcaaatccccttccgacttgtggaaggaagacttagctactttcattgaggagcttgaggccgttgaggccaaagaaaaacaggatgaacaagttggactgccgggaaagggtggcaaggctaaaggaaaaaagactcagatggccgaggtgctgccatccccgcgtgggcagcgggtcattcctagaatcacgatcgaaatgaaagcagaggcagaaaagaagaacaaaaaaaaaattaaaaacgagaacaccgaaggtagtccgcaggaagacggcgtggaactggagggtctcaaacagcgactagagaagaagcagaaaagagagcccgggaccaagaccaagaagcagaccacattggctttcaaaccgattaaaaaagggaagaagcgcaatccctggagcgacagcgagtccgacagatcttccgatgaaagcaactttgacgtgccaccccgggaaactgagccgcggcgggcggcaactaagacaaaattcactatggatttggactcggatgaggatttctccgatttcgatgagaagacagatgatgaggactttgtcccctctgatgctagtccgccaaaaactaaaaccagccccaaacttagcaataaggaactcaagccccagaaatcagttgtatccgacctcgaagccgatgacgtcaaggggagcgtgccactgagtagtagtccccccgccactcacttcccggatgaaacagagataaccaacccagtgcctaaaaaaaacgtcacagtgaaaaagaccgccgcaaaaagccagagttccacaagtactaccggagctaaaaagagagccgcccccaagggtaccaagagagaccctgctttgaacagcggcgtgtctcagaagccagatccggccaaaacaaagaacagacggaagaggaagccaagcacatctgatgattctgatagcaatttcgagaagatcgtatctaaggctgtaaccagcaagaaaagcaaaggtgaatccgacgattttcacatggattttgactctgctgtggcccccagggcgaagagtgttcgggccaagaaacccatcaaatatctggaagaaagcgacgaggacgacctcttctag

SEQ ID NO: 26697 - DNA, 4881 bp, synthetic construct
  misc_feature 1..4881: note = Description of Artificial Sequence: Synthetic coding sequence
  source 1..4881: mol_type = other DNA
atggccaagagcggcggctgcggcgccggcgccggcgtgggcggcgggaatggagcactgacttgggttaccctcttcgaccagaataacgcagctaaaaaagaggagagcgagaccgccaacaaaaatgattccagcaaaaagttgtctgtggaacgtgtataccaaaagaaaacacagctcgaacatatcttgctcagacccgacacctacattggaagcgtagagccattgacccagttcatgtgggtgtacgacgaagatgtcggtatgaattgtcgagaggtcacctttgtgccaggcctgtataagatctttgacgagattctagttaatgccgctgacaacaagcaacgtgacaagaatatgacctgtattaaggtgtccatcgacccggagtcaaacatcatcagtatatggaataatggtaagggtattcctgtggttgaacacaaggtggaaaaggtttacgtccctgccctgatttttgggcagttacttacatcaagcaattatgatgacgacgaaaagaaggttacaggcgggcggaatggctacggagccaagctctgcaatattttttcaaccaagttcacagttgaaaccgcatgtaaagagtacaaacatagttttaaacagacctggatgaacaacatgatgaaaacatctgaagccaaaattaaacacttcgacggcgaggattatacctgtattaccttccagcctgacctgtctaagttcaagatggagaagctcgacaaggatatcgttgccctgatgacacgtcgtgcctatgatctggccggatcctgtagaggcgttaaggtgatgttcaacggtaaaaagctgccggtgaatggattcagatcctacgttgacctctacgttaaggacaagttggatgaaactggagtcgcattgaaggtgatacacgaactagcaaacgagcgatgggatgtttgtctcacgctgtcagagaagggttttcagcaaatatcctttgttaactccatcgccaccacaaagggaggcaggcacgtggattacgtggtggatcaggttgtcggtaaacttattgaggtcgtcaaaaagaagaataaagctggggtgtctgtgaaaccctttcaggtcaagaaccacatctgggtgttcatcaattgcctgattgagaacccaaccttcgacagtcagaccaaagagaatatgaccctgcagccaaagagctttggctctaagtgccaactgtctgagaagtttttcaaagccgcaagtaactgtggaattgtggaaagcattctgaattgggtgaaattcaaggcgcaaactcagctcaacaagaagtgtagttccgtcaagtattcaaaaataaagggaattcccaagcttgacgatgccaacgatgcagggggaaagcatagcctcgagtgtacgttgatcctcaccgagggagacagcgccaagtcactggctgttagcggcctgggcgttattggaagggatagatatggcgtgttcccacttcgagggaaaatcttgaacgtgagagaggctagccataagcagataatggagaacgcggagattaacaatatcatcaaaatcgtggggctgcagtacaagaaatcctatgacgacgccgaaagtctgaagactctccgttacggtaagattatgattatgactgatcaggaccaggatggatcccatatcaagggcctgctcatcaactttattcaccacaattggccatcactcctcaagcacgggtttcttgaggagtttatcactccaatcgttaaagcatcaaaaaataagcaggagctgagcttctactctatccctgagtttgacgaatggaagaagcacattgagaatcagaaggcctggaagattaaatactacaaaggactcggaaccagcacagctaaagaggccaaggagtatttcgccgacatggaaaggcatcgcattctcttccggtatgctggccctgaggacgatgcggctattacactggctttcagtaagaagaagattgatgataggaaggagtggctgaccaactttatggaggatagacgtcagcgtcgcctgcatggtctccctgaacagtttctctacggcacggccactaagcatctgacatacaatgacttcattaacaaggagcttatcctattttccaacagtgacaacgagagaagtattccttctcttgtggatggattcaaaccaggccaacggaaggttctgttcacctgcttcaagcggaacgataaaagggaggtcaaggtggcccaactcgcaggctcggtggctgaaatgagtgcgtaccaccatggcgaacaggccttgatgatgacgatagttaaccttgcccagaacttcgtcggctccaataatattaacctactccaacccataggtcagttcggtacgcggctccatggtggcaaagacgccgccagtccgcgatatatttttaccatgctctcgaccctggctcgtctgctgtttcctgctgttgatgacaacctgctgaagtttttgtatgacgacaatcagcgggttgaacctgagtggtacatcccaatcatccctatggtgctgatcaacggcgccgaaggcatcgggaccggctgggcctgcaaacttccaaactacgacgctagggaaatcgtcaataatgttcgtcggatgctggatggattggatccgcatcccatgctgcctaactataaaaattttaagggcaccattcaggaacttgggcagaaccagtatgccgtgtccggcgagatttttgtagtcgaccgcaatacagttgagatcacagaactaccggttcgcacttggacccaagtctataaagagcaggttttagagcccatgctgaacggaacagacaagacccctgcactgatctccgattataaagagtaccacactgacaccactgtgaaatttgtggtgaagatgactgaggaaaaattagcgcaggctgaagctgcgggacttcacaaggtctttaaactgcagacgactctgacatgcaattctatggtcctcttcgatcatatgggttgtcttaaaaagtatgagacggtgcaggacatccttaaagagttcttcgacttgcggttaagctactacggtttacgcaaggaatggctcgtgggaatgctgggcgccgagtctacaaaattaaacaatcaggctcgattcatcctggaaaaaattcagggcaaaatcaccattgaaaaccggtcaaagaaggacctgattcaaatgctggtgcagcgcggttatgagtccgatcccgtcaaagcatggaaggaggcacaggagaaagccgccgaggaggatgagacacagaatcagcatgatgattcttcttcagattcagggacccccagcggccctgactttaactatattctaaatatgagcctgtggtcgctaactaaggagaaagtcgaggaactcattaagcagcgcgacgccaagggtcgcgaagtcaatgacctaaaacgtaagtctccttctgacctctggaaggaggatctcgctgcgttcgtggaagagttggacaaggtcgaaagccaggaaagagaagacgtgctggcgggcatgagtggaaaagccataaaaggaaaggtaggaaaacctaaagtcaaaaagttacagcttgaggaaaccatgccaagtccatatggtaggcggattattcctgaaatcactgcaatgaaagctgacgcgagtaagaagctgcttaaaaaaaaaaagggtgatctcgacaccgctgcagtgaaagtggaattcgatgaggagttcagtggagctcctgtggagggggccggggaggaggctctcacacccagcgttccaataaacaaaggtccaaagccaaaaagagagaagaaagagcctgggacgagggttagaaaaacaccaaccagcagcggcaagccctcagccaagaaagtaaagaaaagaaatccctggtcagatgacgagtcgaagtccgaaagtgatctggaagaaaccgaacctgtcgtgatcccccgagactctttgttgcgcagggctgctgctgaaagacccaaatacactttcgacttcagcgaggaagaggacgatgatgcagatgatgacgacgatgataacaatgacttggaagagctgaaggtgaaagctagtcccattactaacgacggtgaggacgagtttgtaccctccgatggactcgataaggacgagtataccttctcccctgggaaatctaaagcgacccccgagaaaagcctgcatgataagaagagtcaggatttcggaaacttgttttcctttccgtcctactcacaaaaatctgaagatgatagtgcgaagtttgatagcaatgaggaggacagcgccagcgtgttcagtccgtcctttggattaaagcaaacagacaaggtgccatcaaaaacagtcgccgctaaaaaaggcaagccttcctcagatacagtgcctaaacctaagagagcacctaagcagaaaaaggtcgttgaagcagttaatagcgacagcgatagtgaattcgggatccccaaaaaaaccacgacccctaagggcaagggtcgaggggccaagaaaagaaaggcatcaggcagtgaaaacgaaggcgattacaaccccgggagaaaaacatccaagacgacatctaagaagcccaagaaaacttctttcgatcaggactcagacgtggatattttcccctctgactttcctactgaacccccgtctctcccaagaacaggccgggctcgtaaagaagttaaatatttcgctgagtccgatgaggaggaagacgacgtagacttcgctatgtttaactag

SEQ ID NO: 26698 - DNA, 3453 bp, synthetic construct
  misc_feature 1..3453: note = Description of Artificial Sequence: Synthetic coding sequence
  source 1..3453: mol_type = other DNA
atggccaagagcggcggctgcggcgccggcgccggcgtgggcggcggtaacggcgctctgacctgggtgaacaatgcggcgaagaaagaggaaagtgaaactgctaacaaaaacgacagtagtaagaagctgagtgtggaaagagtatatcagaagaagacacaactagaacatatcttacttcggcctgatacatatattggttctgtggagcctcttactcagtttatgtgggtttatgacgaggatgtggggatgaattgtagggaagtgacctttgtgcctggcctatacaagattttcgacgaaatcctcgtgaacgctgccgacaacaaacagagagacaaaaacatgacttgtataaaagtgtcaatcgatccagagtcgaatatcatttccatctggaataatggaaaagggatccctgtggtggaacataaagtggagaaagtttacgtcccggccctgatattcggccagctccttacaagcagtaattacgatgacgatgaaaagaaagtgactggcggcagaaacggatatggggctaagttgtgtaacatattcagcaccaagttcacagtggagacagcctgcaaggagtacaaacattcatttaaacagacatggatgaacaacatgatgaagacttccgaagccaaaattaagcactttgatggcgaagattacacatgtataacctttcagcccgacctatccaaatttaagatggaaaaactggataaagacattgtggcattgatgacacggagagcatatgacctcgccggcagctgccgtggtgtgaaggtgatgtttaacgggaagaaactccctgtaaacggcttcaggtcgtatgtcgatctctatgttaaagataagctagacgaaacaggcgtggccttgaaagtgatacacgagttagccaacgaacgatgggacgtctgcttaaccctcagcgaaaagggattccagcagatctcatttgtgaacagcatcgccactactaaaggcggcagacacgtcgattacgtggtggaccaggtggtgggaaagctgatcgaggtcgtcaaaaagaagaataaagctggagtctctgtgaagccattccaggtgaagaatcacatctgggttttcataaattgtctgatagagaatccaacgttcgactctcagacaaaagaaaacatgacgttacaacccaaaagctttggctccaaatgccagctgtcggaaaaatttttcaaggctgcctctaactgtggaatcgtggaaagtatattaaattgggtgaaattcaaagcacaaacgcagttgaacaaaaagtgttccagtgtgaagtattccaagatcaaaggaatccctaagctagatgatgccaatgatgctggcggcaaacacagcctggagtgtaccctgattttgactgaaggggatagcgccaagtccctcgctgtgtctgggctgggagtgatcggtcgcgaccggtatggcgtctttccactaaggggaaagatactcaatgtgcgggaggccagccataagcagattatggaaaacgcagaaatcaacaatatcatcaaaatcgtgggccttcagtataagaaatcttatgatgacgcagagtccctcaaaacactgcggtacggcaagattatgatcatgactgatcaggatcaggatgggtctcacatcaaggggcttctcattaattttattcaccataattggccatccctcctcaagcatggcttcctagaagagtttatcacacctattgtgaaggcaagcaagaataaacaagagctctccttttattcaatcccagagtttgatgagtggaaaaaacacattgagaatcagaaagcatggaagatcaagtactataaggggctcggcacgagtacagcaaaggaggctaaggaatacttcgctgacatggaaagacacaggatcctgttcagatacgctggccccgaagacgatgctgcaataactttggcttttagcaagaagaagattgacgatcgaaaggaatggctgacaaatttcatggaagataggcgccagcggcgtttacacggactgcctgaacagtttctatatggcacagccactaaacacctcacatacaacgacttcatcaataaggaactaattctctttagcaattcagataatgaacgtagcatccccagcctggttgatgggtttaaacctggccaaagaaaggtcctgtttacctgtttcaaaaggaacgacaaaagagaagtcaaagttgcccaattggcggggagtgttgctgagatgtccgcctaccaccatggggagcaagccttgatgatgacaatagtgaacctagcccagaactttgttggctctaataatatcaatttgctgcaaccaattggacagtttggcacccgactccatgggggaaaagacgccgccagccctcggtacatctttacaatgctgagcacactggcaagattgttgttccctgccgtcgacgacaacctgctcaagttcctttatgacgataatcaaagggtggagcccgaatggtacatccccataataccaatggtgctgattaacggtgctgaagggatagggaccggatgggcttgtaagcttccgaactacgatgcccgcgagattgtgaacaacgtgcgccgcatgttagatggtttggatccccaccctatgcttccaaattataagaattttaaggggaccatccaggaactcggacagaaccagtatgctgtgtcaggcgaaatcttcgttgtggatcggaatacagtggaaataaccgagcttcccgttagaacatggacccaggtttacaaagaacaggtgcttgagcctatgctgaacggaaccgacaagactcccgctcttatctccgactataaagagtatcacaccgatactaccgtgaagtttgttgtgaagatgactgaggaaaagctcgctcaagccgaggcggctggccttcataaggtgttcaaactgcagactaccctgacttgtaatagcatggtgctcttcgaccacatgggttgtctgaagaaatacgaaactgtgcaggacattttaaaagaattttttgatctgagactgtcatactacggtctgcgtaaggaatggctagtgggcatgctcggggccgaaagtactaagctgaataatcaggcaagatttattctggaaaaaattcagggaaagataaccatagaaaaccgtagcaagaaggacctgatccaaatgttggtgcagcgaggctacgaatcagacccggtcaaagcatggaaagaagctcaggagaaggctgccgaggaggatgagactcagaaccagcacgacgattcatcttcagactcgggaacaccatcgggtccggacttcaactatatcctgaatatgagtctgtggtccttaacgtag

SEQ ID NO: 26699 - DNA, 4866 bp, synthetic construct
  misc_feature 1..4866: note = Description of Artificial Sequence: Synthetic coding sequence
  source 1..4866: mol_type = other DNA
atggccaagagcggcggctgcggcgccggcgccggcgtgggcggcggaaatggggcactaacctgggtgaataatgccgccaagaaagaggaaagcgagactgcaaataaaaatgactctagcaagaagttgagtgtggagagagtgtatcagaagaagacgcagcttgagcacatactgctgcgacccgatacctatataggctcagtggaaccacttacgcaatttatgtgggtgtatgacgaggacgtcggcatgaactgcagggaggtgacctttgttccaggactgtataaaatctttgatgaaatcttggtgaacgcagcagacaataagcaacgggacaagaatatgacctgcatcaaagtttcgatcgatcctgaatccaacatcattagcatttggaataacggtaagggtatacctgtggttgagcacaaagtcgagaaagtgtacgtacccgctctcatttttggtcagcttctaacctcttctaactatgacgatgatgagaaaaaagtcacggggggtcgcaatgggtatggagctaaactgtgtaacatctttagcactaaattcacggtggaaactgcctgcaaggagtacaagcactcctttaagcagacttggatgaacaatatgatgaaaacttcagaggccaagatcaaacattttgatggggaggattacacatgcataacttttcagccagatttatctaagtttaagatggaaaagctagataaagatattgtggctctaatgacccggcgcgcctatgatctggccggttcgtgccgcggggtgaaggtgatgtttaatgggaaaaagctgcccgtcaacgggtttagatcttatgtggatctgtacgtgaaggacaagctcgacgaaactggcgtggccctgaaggtcattcatgagctcgcaaatgagaggtgggacgtatgcctgaccctttccgagaagggatttcagcaaatcagctttgttaacagtatcgccaccacaaaaggcggtagacatgtggactacgtggtggaccaggttgtgggtaagctgatagaggtggtgaagaagaagaacaaagctggggtgagcgtgaagccatttcaggtgaaaaatcacatctgggtttttattaattgtctgatcgaaaaccccacattcgatagccagaccaaagaaaacatgactctacagcccaaatcctttggctccaaatgccagctctccgaaaaattctttaaggccgctagcaactgtgggattgttgaaagcatactgaattgggtgaaattcaaggcacagactcagctgaacaaaaaatgcagctccgtcaagtactccaaaatcaaaggcatcccaaagctggacgacgccaatgatgctgggggaaaacactctctcgaatgcaccttgatcctgactgagggcgacagtgcaaagtcattagcagtgagcggcctgggagtgattggtcgagatcgttacggtgtgttccctcttcgcggcaagattctcaatgtccgagaagcttcccataaacagatcatggagaatgccgagataaataacatcataaagatcgtcgggctacagtataaaaaaagttacgacgatgctgaaagtctgaagacgcttagatacggcaaaatcatgattatgacagaccaagaccaggacggctcccacatcaagggactgctgataaatttcattcaccacaactggccttccctgctgaaacacgggttcctcgaagaatttatcacccctatcgtcaaagcttcaaagaacaaacaggagctctcattctattccatccccgagtttgatgaatggaaaaaacacatcgaaaaccagaaggcctggaaaatcaagtactataaaggcctgggtactagcacagccaaggaggcgaaggagtactttgccgacatggaaagacatcgtatcctgttccggtatgcaggtcccgaggacgatgctgcaataacactggccttttccaagaagaagatcgatgaccgcaaggagtggctcaccaacttcatggaggatcgccgtcagagacggttacatgggcttccagagcaatttctctacggtaccgcgaccaagcaccttacctataatgacttcatcaataaggagctgatcctcttcagtaacagcgacaatgaacgctccattcctagcctggtggacggcttcaaacccggacagcgtaaagtcctcttcacatgctttaaacggaacgacaaacgcgaagttaaagtggcacaacttgcaggctctgtcgctgagatgtccgcataccaccatggcgaacaggccctgatgatgaccattgtcaacctagcacagaattttgtcggatcgaataacatcaatctgctgcagcctattgggcaattcggaaccagacttcacggaggcaaggatgccgcttctccaagatacatctttactatgctgagcaccctggctcgcctgctattcccagcagtggacgacaacctcctcaaattcctttacgacgataaccagcgcgtagaacctgaatggtatattcctatcattccaatggtcctgatcaatggggcagagggcataggaaccggatgggcctgtaagcttcccaactacgacgcgcgagagatcgtgaacaacgtgcgacgtatgttggacggactggaccctcaccctatgctgcctaactataaaaacttcaagggcacaatacaagaactcggtcagaaccagtacgcggtctcaggagaaatctttgtggttgatcgcaataccgtggagattaccgagttgcctgtgaggacctggacacaggtgtacaaggaacaggtgttggagccaatgttaaacggaacagataaaacacccgccttgattagcgattataaggagtatcacactgacaccaccgtgaaattcgtggtgaagatgacggaagaaaagcttgcacaagccgaggctgccggcctccacaaggtgttcaaactgcaaaccactctgacctgtaattcaatggttctgtttgaccacatgggctgcctgaaaaaatacgaaaccgttcaagacattctgaaggaattcttcgacttacgacttagttactatggactgaggaaagaatggttggttggaatgcttggagccgagtcaactaaactcaataaccaggcccgcttcattctcgagaagattcaggggaaaatcaccatcgaaaacagaagtaaaaaggaccttatacagatgctggtgcagagagggtacgaatccgacccggtgaaagcctggaaagaggctcaagagaaggccgctgaggaggacgagacgcaaaaccagcacgacgactcctcttctgactctggcaccccttcggggccggatttcaattacatcctcaacatgagcctgtggtccctcaccaaggaaaaagtggaggagctcatcaaacagcgggatgcaaaaggaagagaggtaaatgacttaaaaaggaaatctcctagcgacttgtggaaggaggatctcgcagcctttgtggaagagctggataaggtggaaagtcaagaaagggaggacgtcttggctggcatgtccggcaaggccatcaaaggcaaggttggtaaaccaaaggttaagaagctgcagctggaggagactatgccatcaccgtacggtcgtcgcatcatcccagaaattaccgcaatgaaggcggacgcaagtaagaagctgcttaaaaagaaaaaaggagatctcgacactgccgcagtcaaggtagagtttgacgaagagttttcaggtgcacccgtggagggcgccggagaggaggctctgaccccttctgtcccaattaacaaaggacccaagccaaagagggaaaagaaagaaccaggcacccgggtccgcaaaacccccacctcctctgggaaacccagtgcgaagaaggtaaaaaagaggaatccatggagcgacgatgaatcaaaaagcgagagcgatcttgaggagaccgagccagtagtaatacccagagactcacttctgcgtcgggccgccgcagaacgtcctaaatacacctttgacttcagcgaagaagaggatgacgacgcggatgatgatgatgatgacaacaacgacttggaggagttgaaggtgaaagcttcccccattacaaacgatggagaagatgagtttgtaccttccgatgggctggataaggatgagtatactttttctcccggtaaatcaaaagccacacccgagaaaagtctgcatgacaagaaatcccaggatttcggtaacctgttctctttcccaagctactcccagaagagcgaggatgatagcgccaagtttgactctaacgaggaggattcggccagcgtctttagccctagtttcgggctgaagcagaccgataaggtgccaagcaaaaccgtggccgcgaaaaagggaaagccaagcagcgacacagtgccaaagccaaaacgggcacccaaacagaaaaaggtcgtagaggcagtcaactcggactctgacagcgagtttgggatacccaagaagactactactcctaaagggaaaggacggggggctaaaaaaagaaaggccagcggctccgaaaacgagggagactacaatccagggcggaagacgtctaaaaccacctctaagaagcccaagaagacatctttcgatcaagattccgacgtcgacatcttccctagcgacttccccaccgagcccccctccctgcctcgcactgggagagcaaggaaagaggttaagtacttcgctgagagtgatgaagaagaggatgacgtcgattttgccatgtttaattag

SEQ ID NO: 26700 - DNA, 174 bp, synthetic construct
  misc_feature 1..174: note = Description of Artificial Sequence: Synthetic coding sequence
  source 1..174: mol_type = other DNA
accctgttcgaccagaacaacgccgccaagaaggaggagagcgagacggcaaacaaaaacgattcctcaaagaagttgagtgtggaacgggtctatcagaaaaaaacacaactggagcatattctgctgagacccgacacctatatcggcagcgtggagccactcacgcagtag

SEQ ID NO: 26701 - DNA, 1437 bp, synthetic construct
  misc_feature 1..1437: note = Description of Artificial Sequence: Synthetic coding sequence
  source 1..1437: mol_type = other DNA
atgagcctgtggagcctgaccaaggagaaggtggaggagctgatcaaacagcgtgatgccaaaggccgggaggtgaacgatctcaaacgcaaatcaccttcagacttgtggaaagaagacctagcggccttcgtcgaggagctggataaggtggaatctcaagaacgcgaagatgtgcttgctgggatgtcagggaaggcgattaagggcaaagtcgggaaacccaaagtcaaaaaactccagctggaagagacaatgccgagcccctatggacggcggataattcctgagataaccgccatgaaagcggacgcttcaaaaaaactgctcaaaaaaaaaaagggagatcttgacactgctgccgtcaaggttgaattcgacgaggagtttagtggggctcccgtagagggcgctggagaagaggccttgaccccaagcgtccccattaacaaaggccctaagccaaagcgggagaagaaagagcctggcacccgcgtcagaaagacccctacatcatctggcaaaccatcagctaagaaagtaaagaaaagaaacccctggagtgatgacgagagcaaaagcgagtcggacctggaggagacagaacctgtcgtgatccccagggactcattattgaggagggccgccgcagaacgccccaaatatacttttgatttttcagaggaggaggacgacgatgctgatgacgatgacgacgataacaatgacctggaagaactgaaagtgaaggcctcccccattacaaatgacggcgaggatgagtttgtcccatctgacggcttggacaaagatgagtacactttctcacccggtaagagtaaagccacaccagaaaaatcgcttcacgacaaaaagtctcaagactttggcaatctcttctcctttccaagctacagccagaagagcgaggacgacagcgccaaatttgacagtaatgaggaagactccgctagcgtctttagcccctcttttggcctgaaacagaccgataaagtgcccagcaagacagtggcggccaagaaaggcaagcccagctccgatacggtgcctaagcctaaacgcgctcctaaacagaaaaaggtcgtggaggctgtcaactcggattccgattctgagtttgggatccccaagaaaaccacaacccctaagggcaaaggaagaggcgccaagaagaggaaggccagtggttccgagaacgaaggggattataaccccggcaggaagaccagcaaaaccacgagcaagaaacctaagaagacctcattcgaccaggatagcgacgtcgatatttttccctccgactttcccacagagcctccatctctccctagaaccggccgggcaagaaaagaagtcaagtactttgccgaaagcgatgaagaggaggatgacgtggatttcgctatgttcaattag

SEQ ID NO: 26702 - DNA, 1437 bp, synthetic construct
  misc_feature 1..1437: note = Description of Artificial Sequence: Synthetic coding sequence
  source 1..1437: mol_type = other DNA
atgagcctgtggagcctgaccaaggagaaggtggaggagctgatcaagcagcgggacgccaaaggccgcgaggtcaatgatcttaagcggaaatccccatcagacttgtggaaagaagacctcgccgcctttgtggaagagttagacaaggtagagtctcaagagagagaagatgtacttgcaggaatgtcaggaaaggccattaaaggcaaggtgggtaaacctaaggtcaagaaactgcagctggaagaaaccatgcccagcccttatggcagacggataatccccgaaatcaccgccatgaaagctgacgcgagtaagaaattactcaagaagaaaaaaggcgatctggataccgcggcagttaaggttgaatttgacgaggagttttcaggtgcacccgtggaaggggccggcgaggaagccttgacaccttctgttccgatcaacaaaggtcctaagccaaagagagaaaaaaaggagcccggaacaagagtgcgtaagacccctaccagcagtggcaaaccgtccgccaagaaagtgaaaaaacgcaacccttggagcgacgacgaaagtaaatcagagtctgaccttgaggagacggagcctgtggtgatcccacgggatagccttctccgtagggccgccgcggagaggcccaagtatacgttcgatttctccgaggaggaggacgatgatgccgacgatgatgacgatgataataatgatttagaagagcttaaagtcaaggcatctcctatcactaatgacggagaggacgaatttgtaccaagtgacgggctggacaaggacgaatatacatttagccctggcaagtcaaaggcaacccctgaaaagtctctccacgacaaaaaaagccaggatttcggcaaccttttttcttttccatcgtatagccaaaagtcagaggacgactctgctaaattcgatagcaacgaggaggacagcgcctcagtgttcagcccttcctttggcctcaagcagacggataaggtcccgtcgaagaccgtggccgccaagaaaggtaaacctagttccgacacagtgccaaaacccaaacgggccccaaagcaaaagaaggtcgtcgaggccgtgaattccgacagcgatagcgagttcggcatcccaaaaaaaaccacaactccaaagggaaaaggccgaggcgcgaagaagaggaaggcctcaggaagcgagaatgagggtgattataacccgggacggaagacttccaaaacgaccagtaaaaaacccaagaaaacctctttcgaccaggactccgatgtagacatttttccgagcgattttccaactgagccaccaagtttgccccgtactgggcgcgccagaaaagaagtcaagtatttcgccgaatcagacgaggaagaggacgatgtggattttgccatgtttaactag

SEQ ID NO: 26703 - DNA, 3006 bp, synthetic construct
  misc_feature 1..3006: note = Description of Artificial Sequence: Synthetic coding sequence
  source 1..3006: mol_type = other DNA
atgatcttccccgtggcccggtacgccctgcggtggctgcggcggccagaagatcgcgcattctcgagagcagccatggagatggcactcaggggtgtgaggaaggtgctttgtgtggccgagaaaaacgatgcagctaagggtatcgccgatctactttccaacggaaggatgcggcgcagggaagggctcagtaaattcaacaaaatttacgagttcgattaccacctatatggtcaaaacgtgactatggtcatgacaagcgtctcagggcatctcctggcgcacgatttccagatgcaattcaggaagtggcaaagttgtaatcctctggtgttgttcgaagcagagatcgaaaaatactgcccggagaacttcgttgatatcaagaaaactctggaacgggaaacaagacaatgccaggccttggtgatttggaccgactgcgatagggaaggagaaaatattgggtttgagattatacatgtgtgtaaggcagttaagccaaacctccaggtactgagagccagattctcagagattacaccccacgctgtccgaacagcctgcgaaaacttgaccgagcctgaccagagagtaagtgacgctgtagatgtaaggcaggagctggatctgcgtatcggagcagccttcactcgcttccagaccctgaggctgcagaggatttttcccgaggttttggccgaacagctcatctcttatggcagttgccagttccctaccctggggtttgtggtcgaacggttcaaagcgatacaggcctttgtccctgaaatattccatcggatcaaagtgactcatgaccataaggacggcatcgtggaattcaactggaagaggcatcgcctgttcaaccacaccgcctgtctcgtgttgtaccagctctgtgtggaagaccctatggccacagtggttgaggtgagaagcaagcctaaatccaagtggagaccccaagcgctggacacagtcgagttggagaaactggcttctcgtaaactgcgtatcaatgctaaggagaccatgcggatcgcagagaagttgtatacccagggatatatatcctacccccgcacagagacaaatatctttccccgagatctgaacctgaccgtgttggtggagcagcagacaccagatccaaggtggggcgccttcgcccaatcaattttagagcgcggcggacctacacccagaaacggtaataaatcagatcaggcgcaccccccaattcatccgacgaagtataccaacaacctgcagggggacgaacaacgactgtacgagttcatcgtgagacacttcttggcttgctgtagtcaggatgcccagggccaggagactactgttgaaattgacattgctcaggagcgatttgtggcccatgggttgatgatcctggcaagaaactatctcgacgtgtacccttacgaccactggagtgacaagatcctgcccgtgtacgaacagggtagtcattttcagcccagtaccgtcgagatggtcgatggggagacatccccccctaagctgctgacggaagctgatctcattgccctgatggaaaaacacgggataggtacagacgccacacatgccgagcacattgagactataaaagcccgcatgtacgtaggcttaactcctgataaacgcttcctgcctggccacctcggcatgggtctggtggagggctatgatagcatgggatacgagatgagcaagcctgatttgagggccgagctcgaagccgatctcaagctcatttgcgatgggaaaaaggacaaatttgtagtgctgagacagcaagtgcagaaatacaaacaggtattcatcgaggcagtggcgaaggcaaaaaagctagacgaggcacttgcacagtactttggcaacggcacagagcttgctcagcaggaagacatctacccagccatgcctgagcccattcggaaatgccctcagtgcaacaaagatatggtcctgaagacaaagaagaacggcggcttctatctgagttgcatggggtttcccgagtgtaggtcagctgtctggctccccgattccgtcttggaagctagccgggattctagtgtgtgccctgtatgtcaaccccacccggtttacaggctgaagctgaagttcaaacgcggatcccttcctccaaccatgcccttggagttcgtatgttgtattgggggctgcgatgacactcttcgagagatcctggacctgcgattttccgggggcccacctcgggcatctcagccttctgggcggctgcaagccaaccagagccttaaccgcatggataacagccagcacccgcagcccgcagattcgagacagaccgggtcttctaaagccctcgcccagactctgccgcctccaactgccgctggcgaatctaactctgtcacgtgtaactgcggccaggaggcagtgctgctgacagtgaggaaggaagggcctaatcggggacgacagttttttaaatgcaacggtggaagttgtaacttttttctctgggcggactctcccaaccctggagcgggggggcctccagccctggcctacagacccttaggagcaagccttggttgccctccaggaccgggtatacatcttggcggatttggcaacccgggagacggctcaggtagcggaaccagctgcctgtgtagtcagccatccgtgaccagaactgtgcagaaggacgggcctaataagggcaggcagttccatacttgcgctaagccccgggagcagcagtgcggattcttccagtgggtagacgaaaatacagcacccggcacttcaggcgcccccagctggacgggcgacagaggtcggaccctggagagtgaagccagaagtaaaagacctcgagcctcttcctctgatatgggctccacagccaagaagcccagaaagtgttccctctgccaccagcccgggcacacccgacccttctgtcctcagaatagatag

SEQ ID NO: 26704 - DNA, 1170 bp, synthetic construct
  misc_feature 1..1170: note = Description of Artificial Sequence: Synthetic coding sequence
  source 1..1170: mol_type = other DNA
tgaagccgggccgccatggagatggccctgcggggcgtgcggaaggtactgtgcgtggctgagaaaaatgacgcagccaagggcattgcggatttactgtccaacggacgtatgagaaggcgggagggattatcgaaattcaacaagatctacgagtttgattatcacctgtacgggcaaaacgtgaccatggttatgacttctgtaagcggtcatctgttggcacacgacttccagatgcagttcagaaaatggcagtcatgcaaccccctcgtgctcttcgaagccgagatcgagaagtattgtcctgagaactttgtggacataaagaaaacgctggagagggaaacccggcagtgccaggccttagtgatttggacagattgcgatagagagggtgagaatatcgggtttgagataattcatgtttgcaaggcggtcaagcccaatctgcaggtgcttagagctcgcttcagtgagatcacaccccatgcagtgcggactgcctgtgagaatcttacagaacctgaccaacgagtctctgatgcggtggatgtccgccaggagctcgaccttagaattggcgccgcctttacgcgatttcagaccttgagactgcagaggatatttccggaggtgttagccgagcagttaatcagctatggctcttgccagttcccgactctcggatttgtagtagagagattcaaggcaatccaagctttcgtgcctgagatcttccatcggattaaggttactcacgatcataaagacggaattgtggagttcaactggaagcgacacaggctattcaatcacactgcctgccttgtactctatcaactctgtgtggaagaccctatggctacagtggtcgaggtacggagcaagccaaagtctaaatggcgtccccaagctctggatacggtggaactggagaaactcgcttctcgcaagttgcgcattaatgcaaaggagactatgcgcattgctgaaaagctatatacgcaggggtacattagttaccctaggaccgagaccaatatcttccctcgggacctgaacctgacggtgctggtggagcagcaaacaccagaccccagatggggggcatttgcccagagtatcctggagcggggaggaccaactccacgaaatggtaacaagtag

SEQ ID NO: 26705 - DNA, 1596 bp, synthetic construct
  misc_feature 1..1596: note = Description of Artificial Sequence: Synthetic coding sequence
  source 1..1596: mol_type = other DNA
atgatcctggcccggaactacctggacgtgtacccctacgaccactggtcagacaagatcctgccagtgtatgagcagggatctcacttccagccaagtacggtggaaatggtcgatggggaaacctctcccccgaagctgctaactgaggccgacttaattgctttaatggaaaagcacggcattggtactgacgcaacccacgctgaacatatcgagacaatcaaagcgaggatgtatgtcgggctaacacccgacaagaggtttttgccaggtcacctgggtatgggcctcgtagagggctacgatagtatgggatacgagatgagcaaaccagatttgcgcgccgagttagaagctgaccttaagttaatctgtgacggcaagaaagataagtttgttgtgttgagacagcaagttcagaaatacaagcaggtgtttatcgaggctgtcgcaaaggccaagaagctggacgaggctcttgctcagtatttcggaaacgggaccgaacttgcccaacaggaggatatctatccagcaatgcccgaaccaatccgcaaatgcccccagtgcaacaaggatatggtcctgaagacaaaaaagaatgggggcttttatctgagctgcatggggttccccgagtgccgctccgcagtgtggctgcctgattctgtcctggaggcctcacgggattcctcagtatgtcccgtttgtcagccccatcctgtgtatcggctgaagttgaagtttaaacgtggatctctcccccctacgatgcctctcgagttcgtgtgctgtatcggcggctgcgatgatactttgcgagaaattctggacttacgtttctctggtggaccgccacgggcctcccagccatcaggtagattgcaggctaatcagagtttgaatcgaatggacaattcacagcaccctcagccagccgactcgaggcaaaccggctcttccaaagccttggcgcagacgctccctccccctactgctgctggggagtctaactcggtgacgtgtaattgcggacaggaggctgtcctgttgactgttcggaaggagggcccgaacaggggcaggcagtttttcaagtgtaacggcgggagctgtaattttttcctgtgggccgatagtcctaaccctggggccgggggaccccccgctctggcctaccggcccctgggggcttccctggggtgtccgcctggacccggcattcatctaggaggattcggcaaccccggagatggcagcgggagcggaacctcatgtttgtgctctcagccctcagtgaccaggaccgtccagaaggatggtccgaataagggcaggcagttccatacctgcgcaaagcctcgcgaacagcagtgtgggttcttccagtgggtggacgaaaacacagctccaggaacttcaggtgcgccttcctggaccggagatcggggcaggacacttgagtcggaagccagatccaaaaggcctagagcctcctcctccgacatgggctcaaccgcaaaaaaacccagaaaatgcagcctttgccaccagccaggccacacaagacccttctgcccacagaacaggtag

SEQ ID NO: 26706 - DNA, 2721 bp, synthetic construct
  misc_feature 1..2721: note = Description of Artificial Sequence: Synthetic coding sequence
  source 1..2721: mol_type = other DNA
atgaacctgatcatcatctgcatggcccggcagagctgcaaccccctcgtactgttcgaggccgagattgagaagtactgcccggagaattttgtagacattaagaagactttggagcgtgaaactcgtcaatgccaggcattagtgatctggacggattgcgatcgagaaggtgagaatatcggtttcgagattatacacgtttgtaaggccgtcaagcccaaccttcaggtccttcgcgccaggttctccgaaatcaccccacacgccgtgcgcaccgcctgtgagaatcttacggagccagatcagagagtgtccgatgctgtcgacgtgcgacaggagttagacctgcgcatcggagcggcttttacgaggtttcagactctgcgcttacaacgtatctttccggaggttctggcagagcagttaatctcttatgggagctgtcagttcccaaccctaggatttgtagtggaaaggtttaaagccatccaagcgtttgtgccggagatctttcatcggattaaagtcacgcacgatcataaagacgggatagtggagttcaactggaagcggcaccgcctgttcaaccacactgcatgcctcgtcctgtaccaactgtgtgtggaagaccctatggctactgtagtcgaagtaagatcaaagcccaaatcaaaatggagaccacaggctctggacacagtcgagcttgaaaaattggcttctaggaaactgaggatcaacgcaaaagagactatgagaattgccgaaaagctgtacactcagggctatatcagctaccctcggaccgagacaaatatctttccacgggatctgaatctgactgttctggttgaacaacagacgccggacccccggtggggtgcgtttgcccagtccatcctggagagaggtggtcccactccaaggaacggcaacaagtccgatcaggcccacccccccattcatcctactaagtataccaacaacctccagggcgacgagcagagactgtatgaatttatagtgcggcactttttagcatgttgtagccaggacgcccaagggcaggaaacgactgtcgagatcgacattgctcaagaaagatttgtggcccatggtctcatgatactggctaggaattacctggacgtgtacccatacgatcactggagtgacaagatcctgccagtttatgagcagggcagtcatttccagccatcaactgtagaaatggttgacggggaaaccagccctcctaaactgctgactgaagcagacctgattgcgctgatggagaagcatggaattggcacagacgccacccacgcagagcacatagagaccatcaaggcgcgaatgtatgttgggctgactccagataaacgtttcctgccagggcatcttgggatggggcttgttgagggttatgacagcatggggtacgagatgtccaagccagatctgcgcgccgagctggaggccgacttaaagctgatctgtgatggaaaaaaggacaagttcgttgttctgcggcaacaagtacaaaagtacaagcaggtattcattgaggcagtggccaaagcaaaaaagctggatgaggctctggcacagtatttcggaaacggaaccgagctcgcccagcaggaagatatctatcccgctatgcctgagcccattaggaagtgtccgcagtgtaataaagatatggtcttgaagaccaagaaaaatggaggcttttacctgtcatgcatgggcttccccgaatgcagaagcgctgtgtggctgcccgacagcgtgctggaagccagccgtgatagttcggtttgtccagtgtgccagcctcacccagtataccggctaaagctcaaattcaagcgcggctcgttaccccctaccatgcctttagaatttgtgtgctgcataggcggctgcgacgacacccttagggagattctggacttgagattctccggcggccccccaagggcgtctcagccttccggcagactgcaggccaaccagtcgctcaaccgtatggacaactcacagcacccgcagccagcggattcccgccagaccggatccagtaaggccctggcccagacactgccaccacctacggcggccggggaatcaaactcagtgacgtgcaattgcgggcaggaggccgtgctcctcacagtgcgtaaagaaggacctaacagaggccgccagttctttaagtgcaacggcggaagctgcaacttcttcctgtgggccgatagccccaatcccggagcaggagggccgcccgctttggcgtatcggcccctcggcgcctcactgggctgccctcccggcccaggaatccaccttggtggctttggaaatcccggtgatggctcgggaagtgggacctcatgtttgtgcagtcagccgagcgttacccgaaccgtccagaaggacggccctaataaaggaagacaatttcatacctgcgcgaagcccagggaacagcaatgtggtttctttcagtgggtagatgagaataccgctcccgggacgtccggagcacccagttggactggcgaccgcggtaggaccctagaaagtgaggctagatctaaaagaccccgagctagttctagcgacatgggatcaaccgccaagaaacccaggaagtgctccttatgccaccaacccggtcacactagaccgttttgcccacagaaccgctag

SEQ ID NO: 26707 - DNA, 2589 bp, synthetic construct
  misc_feature 1..2589: note = Description of Artificial Sequence: Synthetic coding sequence
  source 1..2589: mol_type = other DNA
atgaagaccgtgctgatggtggccgagaagcccagcctggcccagtcaatcgcaaagatactgagccgcgggtctctgtccagtcacaagggcttgaacggcgcttgctccgttcatgaatatacggggacattcgcggggcaacctgtgcgattcaaaatgactagtgtgtgcggccatgtgatgacactggattttctcggtaaatacaataagtgggataaggttgaccctgcagaattatttagtcaggcccccaccgaaaagaaagaggccaacccgaagctgaatatggtgaagtttctgcaggtggagggtcgcggatgtgactatatcgtgctgtggctggactgcgataaggaaggcgagaatatctgctttgaggtattagatgccgttctgcctgttatgaacaaagcccacgggggagagaagactgtcttccgcgcccgtttctcttctatcactgataccgacatttgtaacgccatggcttgccttggtgaaccagatcacaatgaggcgctgtctgtcgatgcaaggcaggaactagatctgagaatcggatgcgcctttactagatttcaaacaaaatacttccagggtaagtacggggatctcgattcttctctgatctcctttggaccctgccagacacccaccctgggcttttgcgtcgagagacacgacaaaatacagtcattcaaacccgaaacctattgggtgctgcaggcgaaggtaaacacagataaggaccgtagcctcctcctagattgggaccgcgtgcgtgtgttcgatagagagattgcacaaatgtttctgaacatgactaagcttgagaaagaagcccaggtcgaggccacaagccgaaaggagaaagccaagcagagacctctggccctcaatacagtggaaatgttgcgtgtagcctcttcttctctggggatgggaccccagcatgcaatgcaaacagccgaaagactttacactcagggctatattagctaccccaggactgagacaactcattacccggaaaacttcgacttaaaggggtcactgcggcagcaggccaaccacccgtactgggccgatacggtgaaaaggctcttagcggaggggatcaatcgcccgcgtaaagggcacgatgcaggcgaccatccaccaattacaccaatgaagagcgccaccgaagcagaattgggtggagacgcttggcgcctctacgaatacattaccagacatttcattgccacagtctcccacgattgtaaatacctgcagtctacaataagttttaggattggacctgagctctttacatgttcgggcaaaaccgtcttatctccgggatttaccgaggtgatgccctggcaaagtgtgccacttgaagagagccttcctacctgccaacgaggcgatgcctttcccgttggcgaggtcaagatgctcgagaaacagactaatcccccagattacctgacagaagcagaacttatcaccctaatggagaaacatggaatagggactgatgcgtctatccctgttcatataaataatatctgccagcgcaactacgtgaccgtggagtcaggcaggaggctgaagccaacaaacctcggaatagttctcgtgcatgggtattataagattgacgcggagttagtcctgcctaccatccgctcggctgtggagaagcagctcaacctcatagcccaggggaaagccgactaccgtcaggtcctgggacacacattggatgtgtttaagcgcaagtttcattatttcgtagactctattgccggcatggacgagctgatggaagtgtctttcagccctttagccgctacgggcaagcctttgtctagatgtggcaaatgtcaccgctttatgaagtatatccaggcgaagcccagtagattgcactgctcccattgtgatgagacttataccttgccacagaacggaacgatcaaactatacaaggagttgaggtgccccctggatgatttcgaattagtcttgtggagcagcggcagccgtggcaaatcgtacccactgtgcccatattgttataaccaccccccttttagagatatgaaaaaggggatgggctgcaacgagtgcacacacccgtcgtgccaacacagtctaagcatgctgggaatcggtcagtgcgttgaatgcgagtctggcgtcttagttcttgacccaacgtccggtcccaagtggaaggttgcttgcaacaagtgcaacgttgtggcccactgctttgaaaacgctcatagggtaagagtgagtgctgatacctgtagcgtgtgcgaggccgcactgctggacgtggactttaataaggctaagagtcctttgcctggtgacgagactcagcacatgggctgcgttttttgtgatcccgtctttcaggagcttgtagaactcaagcacgccgcctcctgtcaccccatgcaccgtggcggaccaggccgccgtcaaggcaggggtcgcggcagggcccggcgtcccccaggaaaaccgaaccctaggcggcctaaagataagatgtccgcgctggcagcctactttgtgtag

SEQ ID NO: 26708 - DNA, 2589 bp, synthetic construct
  misc_feature 1..2589: note = Description of Artificial Sequence: Synthetic coding sequence
  source 1..2589: mol_type = other DNA
atgaagaccgtgctgatggtggccgagaagcccagcctggcccagtctatcgcaaaaatcctatcccggggttcccttagttcgcataaaggactgaacggcgcctgcagtgtgcacgagtatacgggaacatttgcaggtcagccagtgcgctttaagatgacctccgtctgcgggcatgtcatgaccttggacttcctgggcaagtataacaagtgggataaagtcgatccggctgagttgttttcacaggccccgaccgagaagaaagaggcaaatcctaagctgaacatggttaagtttctccaagtcgaagggaggggctgtgattacattgtgttatggctggactgcgacaaggagggggagaacatctgctttgaagtactggatgccgtgctgcccgttatgaataaggcccacggaggagagaaaacagttttcagagccaggttctccagcatcactgacacagatatttgtaacgcaatggcttgtctcggggagcctgatcataacgaggctctctctgtggacgcacgacaggaactagatctgcgaattgggtgcgccttcactcggttccagaccaagtatttccaagggaagtatggagatttggactcctccttgattagcttcggaccatgtcaaacacctaccctgggcttttgcgtggaaaggcatgataaaatccagagtttcaaacctgaaacatactgggtgctccaggcaaaagtcaacaccgataaagatcggtctttactgctagattgggatcgtgtgagggtattcgatagggagatcgcacaaatgtttctcaatatgaccaagctcgaaaaggaagcacaggtggaagctacctcacggaaggagaaggctaaacagcgccctcttgctctgaatactgttgaaatgctacgcgtggcgtcttccagcttaggcatgggtccgcaacatgcaatgcagaccgcagagagactttacacacagggctacatttcttatccaaggactgaaacaacacactaccctgaaaacttcgaccttaaagggagcttgagacaacaagcgaatcacccatactgggctgacacagtcaagcgattgctggcagaagggattaatcgcccacgaaaaggacacgacgccggagatcaccctcctatcactcctatgaagtccgccacagaagccgagctgggaggagatgcctggagactttacgaatatattacccgacatttcattgccaccgtgtcccacgattgtaaatatctacagagcacaatctcctttcgtatcggtccagaactatttacttgctctggcaagaccgtcttatccccaggctttacagaagtgatgccgtggcagtccgttccgctggaagagagcctgcctacatgtcagagaggagatgcattcccggtgggcgaagttaagatgctagagaaacagaccaacccgccggattatctcacagaggccgaactgattaccttgatggaaaaacatggtatcggtacagatgcgtccattcctgttcacattaataacatttgtcaacgcaactacgtgacagtggagtctggtcggcgcttaaagcccactaatctcggaatagtactcgtgcacggctactacaaaatagacgccgaacttgtgctcccaacgatcaggtcggccgtggaaaagcagttgaatttgattgcacagggtaaggctgattacaggcaggtgcttgggcacacgctggacgtgtttaagcgaaagttccactactttgtcgattccatcgccggaatggacgagttgatggaggtttcttttagtcctttagccgctacaggcaaacctctgtcgagatgcggaaaatgtcaccgtttcatgaagtatatccaagcgaaaccttctcggctgcactgctcccattgtgacgagacatatactctgccccagaatggaaccatcaagctgtacaaggagttgcggtgccccctggacgattttgagctggtcctgtggagctctggatcccgcgggaaaagctacccgctgtgcccctactgctataaccatcctccttttcgtgacatgaaaaagggaatgggctgcaatgaatgtacccatccttcctgtcagcacagtcttagtatgctggggatcggacagtgtgtggaatgcgaatctggagtcctcgtgctcgaccctacctccggaccaaaatggaaggttgcatgcaataaatgtaatgtggtggcacactgctttgagaatgcccatcgggtgcgtgtatcagctgacacttgtagcgtttgcgaggcagccctgctagacgtcgacttcaataaagccaagtctccgctgcccggagacgagacccagcacatggggtgcgtgttttgtgaccctgtcttccaggaactggtcgaactgaagcatgccgcatcttgtcatcccatgcaccgcggaggtcctgggcgaagacaggggagggggcgaggacgcgctagaaggcctcctggcaaacctaacccccggcgccccaaggacaagatgtccgccctcgccgcttacttcgtctag

SEQ ID NO: 26709 - DNA, 849 bp, synthetic construct
  misc_feature 1..849: note = Description of Artificial Sequence: Synthetic coding sequence
  source 1..849: mol_type = other DNA
atgttcctgaacatgaccaagctggagaaggaggcccaggtggaggctacctctcggaaggaaaaggccaaacagaggccccttgctttgaacacagtggaaatgttacgcgtggcaagttctagcctcgggatgggtcctcagcacgctatgcaaaccgcagagcgtctgtacacccagggctatatctcctacccgcggaccgagacaacccactaccccgagaacttcgatcttaaaggatctctgcgccagcaggccaaccacccgtactgggcggataccgttaagaggttactagccgagggcatcaatagaccacgtaaaggtcatgatgccggggaccatcctccgatcactccgatgaagtcagcaaccgaggcagagctcggaggagatgcctggcggctgtatgagtacattacaagacacttcattgcgacagtatcacacgactgcaagtacttacagagtaccatcagcttccgcattgggccagagttgttcacctgtagtgggaaaaccgtcttatcacctggctttaccgaggtgatgccctggcagagtgtgcccctggaagaatctcttccaacatgccagaggggggatgctttcccagtgggtgaagtgaagatgctcgagaagcagacaaatccaccagactatcttactgaggcagagcttatcacactgatggaaaagcacggaattggaggctgcgcctgcccgggaccaagggccggaagtgttagttccactcaggcaagttccctacttacaaagctgcccaggcagccatgtgttcccagcccggcgcctctccacgggctcgtgtccggtaattggtag

SEQ ID NO: 26710 - DNA, 741 bp, synthetic construct
  misc_feature 1..741: note = Description of Artificial Sequence: Synthetic coding sequence
  source 1..741: mol_type = other DNA
atgaagaccgtgctgatggtggccgagaagcccagcctggcccagagtattgctaagatacttagcagaggaagtctgtcctcacacaagggacttaacggggcctgtagcgtgcatgagtatacaggcacctttgctggccagccggtacggtttaagatgacaagcgtatgtggccatgttatgaccctagatttcctgggaaagtacaacaagtgggataaagtagatcccgcagaattgtttagccaggctccaacagaaaaaaaagaagcaaatccaaaacttaatatggtcaagtttttacaggttgagggcagaggatgcgactatatagtactgtggctcgactgcgacaaggaaggggagaacatctgttttgaggttctggatgcggttctccctgtcatgaacaaagcgcatggtggggagaagactgtgtttagagcccgtttttccagcataaccgacaccgatatatgcaatgcaatggcatgcctgggtgagcctgaccacaacgaggccttatccgtagacgcccgccaggagcttgacctgaggattgggtgtgcatttactcgcttccaaacaaagtacttccaagggaagtatggcgatctggattccagtttaatcagtttcggcccttgtcagacgccaacactgggattttgcgtggagagacacgacaaaattcagagttttaaacctgaaacttactgggtgttacaggccaagtag

SEQ ID NO: 26711 - DNA, 366 bp, synthetic construct
  misc_feature 1..366: note = Description of Artificial Sequence: Synthetic coding sequence
  source 1..366: mol_type = other DNA
atgaagaccgtgctgatggtggccgagaagcccagcctggcccagagtatcgctaagattctcagtcgcggatcactgtcctcccacaagggcctgaatggtgcctgtagtgtccatgagtacacaggaacttttgccggacaacctgtgcgcttcaaaatgacttcagtgtgcgggcacgtcatgaccttagacttcctcggaaaatacaacaagtgggataaggtggacccagctgagcttttcagccaggcgcccaccgagaaaaaagaagcaaacccaaaactgaacatggtcaagtttcttcaagttgagggacggggttgcgactatatagtgctatggctcgattgcgacaaggagtag

SEQ ID NO: 26712 - DNA, 66 bp, synthetic construct
  misc_feature 1..66: note = Description of Artificial Sequence: Synthetic coding sequence
  source 1..66: mol_type = other DNA
atgaagaccgtgctgatggtggccgagaagcccagcctggcccagagcatcgctaagatcctctag

SEQ ID NO: 26713 - DNA, 129 bp, synthetic construct
  misc_feature 1..129: note = Description of Artificial Sequence: Synthetic coding sequence
  source 1..129: mol_type = other DNA
atgaagaccgtgctgatggtggccgagaagcccagcctggcccagagtattgctaaaatcctgtcgaggggcagtctcagtagccataaaggccttaacggggcctgtagcgtacatgaatacacctag

SEQ ID NO: 26714 - DNA, 369 bp, synthetic construct
  misc_feature 1..369: note = Description of Artificial Sequence: Synthetic coding sequence
  source 1..369: mol_type = other DNA
atgaagaccgtgctgatggtggccgagaagcccagcctggcccagtcaatcgcaaaaatcctctctcgaggttccctctctagccacaaagggctgaacggggcctgctctgtacacgagtatacaggaacatttgcgggacagcctgttcgttttaagatgacgtccgtgtgtggtcatgtgatgacacttgatttcctgggcaagtacaataagtgggataaggtggacccagctgagcttttttctcaggcccctacagagaaaaaggaggcaaaccccaagttaaacatggtcaaattcttacaggtcgaaggtcgggggtgtgactatatagttctgtggctggattgcgacaaggagggctag

SEQ ID NO: 26715 - DNA, 144 bp, synthetic construct
  misc_feature 1..144: note = Description of Artificial Sequence: Synthetic coding sequence
  source 1..144: mol_type = other DNA
atgaagaccgtgctgatggtggccgagaagcccagcctggcccagtcaatcgctaagatcttatctagggggtcactctcgtctcacaagggactaaatggcgcctgcagcgtgcacgagtacacagggacgttcgcagggtag

SEQ ID NO: 26716 - DNA, 399 bp, synthetic construct
  misc_feature 1..399: note = Description of Artificial Sequence: Synthetic coding sequence
  source 1..399: mol_type = other DNA
atgaagaccgtgctgatggtggccgagaagcccagcctggcccagtccattgccaaaatcctgtcccgtggaagcttgagttctcataagggacttaatggtgcgtgtagcgtccacgagtacacagggactttcgccggacagcccgttcggttcaaaatgacctccgtctgcggccacgtgatgactttggactttctcggaaagtacaacaaatgggacaaagtggaccctgccgaactcttttcccaggcccccaccgagaaaaaagaagcgaatccaaagttgccacaggcctctgtgtgtactcaggctgctccaggagtgcgcccacatccctgtcctcccgctgcagcgcgcgtggccgatagagtggtcccttgtggacccgttacctag

SEQ ID NO: 26717 - DNA, 183 bp, synthetic construct
  misc_feature 1..183: note = Description of Artificial Sequence: Synthetic coding sequence
  source 1..183: mol_type = other DNA
atgaagaccgtgctgatggtggccgagaagcccagcctggcccagagtattgctaagatattgtccaggggttcgctgagcagtcataaaggtttgaacggcgcctgttcagtgcacgagtatactggcactttcgctgggcagcccgtacggttcaagatgacatccgtgtgtggccattag

SEQ ID NO: 26718 - DNA, 186 bp, synthetic construct
  misc_feature 1..186: note = Description of Artificial Sequence: Synthetic coding sequence
  source 1..186: mol_type = other DNA
atgaagaccgtgctgatggtggccgagaagcccagcctggcccagagcatcgcaaagattctttctcggggatcactcagctctcataagggtctgaatggcgcgtgttctgtgcacgaatataccggcacctttgctggtcagcccgtcagatttaagatgacgtccgtttgcggacacgtgtag

SEQ ID NO: 26719 - DNA, 1578 bp, synthetic construct
  misc_feature 1..1578: note = Description of Artificial Sequence: Synthetic coding sequence
  source 1..1578: mol_type = other DNA
tgactggacagcagcctgatcagcttcggcccctgccagacccccaccctaggtttctgcgtggagagacatgacaagatccagagcttcaaaccagaaacctattgggtgttgcaggccaaagtgaatacggataaagacaggagtctactgctggattgggacagggtgagggtgttcgacagagaaatcgcccaaatgttccttaacatgaccaaattagaaaaggaggctcaggtggaagccacgtcgcgaaaggagaaggccaagcagagaccgttggctctgaatactgtcgaaatgctgcgggtggcttcttcgagcctgggcatgggcccacagcatgccatgcagacagccgaacggttgtacactcagggatacatctcctatccaagaacagagactactcactatcctgagaatttcgatttaaaagggagcttacgacagcaggccaatcacccctactgggccgatacggtgaaacgcctgctggctgaaggtatcaatcgccccaggaagggccatgatgccggggatcatccccctattactccaatgaaaagtgccactgaagccgaattgggcggagacgcctggagattatacgagtacattacaaggcattttatcgccacggtctcccatgattgcaaatatctccagagcacaatatctttcaggattgggcctgaactttttacatgtagcggcaagacagtgttaagtccaggttttacagaggtgatgccgtggcagagcgtgcccctagaagagtcattgccaacctgccagaggggcgatgcgttccccgtgggcgaagtaaaaatgctcgagaagcaaacaaatccaccggactatctgactgaggccgagctgattacactaatggaaaaacatggtattggaaccgacgcaagcatccctgtccatataaataatatatgccaaaggaattacgttacagtcgagtccggccgcaggctgaagcctacaaatctgggtatagtgctagtgcatgggtactataagatcgatgccgaactggtgctgcccacgatcaggtccgccgtagaaaagcagctgaacctgattgcccagggcaaagccgattacagacaagtactcggacataccctagatgtgtttaagagaaagttccattatttcgtggatagcatcgctggtatggacgaactgatggaggtgtctttctcgccactggctgccactggtaagccattgtcccggtgtggcaaatgccatcggttcatgaaatacatacaagccaaaccttcacgtctccattgctcacattgtgacgaaacctacacgttgccccagaacggcaccattaaactttacaaagagctgcgctgtcctctggacgatttcgaactggtgctgtggagcagcggatctcgcgggaaaagttacccgctgtgcccttattgctataaccatcctccattccgggacatgaagaagggtgagtgttcccactcacttctgagtactggctcgtgttccctctttagcgtacctacaccggccctacaccaggctggactgtag

SEQ ID NO: 26720 - DNA, 951 bp, synthetic construct
  misc_feature 1..951: note = Description of Artificial Sequence: Synthetic coding sequence
  source 1..951: mol_type = other DNA
atgagcgccgaggtggagaccagcgagggcgtggacgagagcgagaaaaagaattctggagccctcgagaaagagaatcagatgcggatggctgaccttagcgaactgctgaaggagggcacgaaagaggcccacgaccgggctgagaatacccagttcgtgaaggactttctgaaaggtaatatcaagaaggaacttttcaaactcgccactaccgcactctacttcacgtactccgcactcgaggaggaaatggagcggaataaggatcatcctgctttcgcccctctttacttcccgatggagctgcaccggaaagaggccctgaccaaggatatggagtattttttcggcgagaactgggaagaacaggtgcagtgtcccaaagccgctcaaaagtacgtagaaagaattcattacatcggccaaaacgaacctgagctcctggtggcacatgcatatacccgatacatgggagacctgagcgggggacaggtgctcaagaaagtcgctcagcgggctctgaaattacccagtaccggcgagggtacacagttctatctgttcgagaatgtcgataatgcccagcagttcaaacagctttaccgcgcccgaatgaatgcactggatctcaacatgaagacgaaagagaggatcgtggaggaagctaacaaggctttcgaatacaacatgcagatattcaacgagctggaccaggccggctccacgctggcacgcgagactctcgaggatggctttcccgttcatgacgggaagggggacatgcggaaatgtccattttacgccgctgagcaggataaaggagctcttgaggggagttcctgcccatttagaactgctatggctgtgctgcgcaaaccatctttacagtttatcctggcagcgggagtggccttagcagcgggcctgctcgcgtggtattacatgtag

SEQ ID NO: 26721 - DNA, 1716 bp, synthetic construct
  misc_feature 1..1716: note = Description of Artificial Sequence: Synthetic coding sequence
  source 1..1716: mol_type = other DNA
atgaagtgccagccccggagcggcgcccggcggatcgaggagcggctccactacctgataacgacctacctaaagttcgggaataataataactacatgaacatggccgaggcaaataatgcattcttcgctgcctcggagactttccataccccctctctgggcgacgaggagttcgagattccaccaattaccccgccccctgaatctgatccagcattgggcatgccagatgtccttttgcccttccaggcactgtccgaccctctcccgtctcagggcagcgaatttactccgcaattcccaccacagtctctagatctcccatccatcaccatctctaggaacctggtggaacaagatggcgttctccactcaagtggtctgcatatggaccaatctcacacgcaagtctcccagtatagacaggatcctagtcttatcatgaggagcatcgtccacatgacagatgctgcacgctctggggtgatgcccccagcccaactgacaaccataaaccagtcccaactatccgcccagttggggcttaatctgggaggtgcaagcatgccacacacatctccgagcccccccgccagcaagagtgctacgccaagcccatcgtccagtatcaatgaagaagacgcggacgaggccaacagagcaatcggggaaaagagagccgcaccagattcaggtaagaaaccgaaaacacccaagaagaaaaaaaaaaaagatccgaatgagccccagaaaccagtctcagcctatgctctgttttttagggatactcaggcggcaatcaaaggccagaatccgaacgctacgttcggcgaagtgtccaagatagtcgcgagcatgtgggatagtctaggggaggaacagaagcaagtgtacaaaagaaagacagaggcagccaagaaggagtacctgaaggccctggcagcatatagagcgagcctcgtgtcaaaagcagcagccgagagtgctgaggcacagaccatccggtctgtgcagcagaccttggcctctacaaacctgacttcatccctgctcctaaataccccgttatcacagcatgggaccgtgagcgcctcacctcagactctgcagcagtccctaccgcgctccattgcacccaaaccgctgaccatgaggttgccaatgaatcagatagttactagcgtcactatcgccgccaacatgccatcgaacatcggggctccactcatctcatctatggggactactatggtggggtccgcaccgagcacacaggtgtctcctagcgtccagacacaacagcatcagatgcagctgcaacagcagcagcagcagcagcagcagcagatgcagcagatgcagcaacaacagctgcagcagcaccagatgcaccagcaaatacaacaacagatgcagcagcagcactttcagcatcatatgcagcagcacctgcaacagcagcagcagcatctgcagcagcagataaatcaacaacaacttcagcagcagctacagcagcggttgcagctgcagcaactgcaacatatgcagcaccagtcacaaccgtcccccagacaacactctcccgtggcttcccagatcaccagccccatccctgcaatcggctctcctcagcctgcaagccagcagcaccagtcacagattcaatcccaaacacagacacaagtgctgagtcaagtgagtattttttag

SEQ ID NO: 26722 - DNA, 5817 bp, synthetic construct
  misc_feature 1..5817: note = Description of Artificial Sequence: Synthetic coding sequence
  source 1..5817: mol_type = other DNA
atgcagagcttccgggagcagagcagctaccacggcaaccagcagtcttacccccaggaggtgcacggctccagccgcctggaggaattcagtcctaggcaggctcagatgttccagaattttggaggtactggaggatctagtgggagtagcggctccggttccggtggtggaagacggggcgcagctgccgcagccgctgcgatggcttccgagacttcggggcaccagggctaccagggctttagaaaggaggctggcgatttctactacatggccggcaacaaagacccagtgaccactggtacgccacagcctccacagaggcgcccatccggtccggttcagtcttatggacccccccagggcagtagcttcggaaatcaatacggttccgaagggcacgtgggccagtttcaagcacagcattccggtctggggggggtctcccactaccagcaggactataccggcccattctctcctggatctgcccagtaccagcagcaggcctcatctcagcagcaacaacagcaggtccaacagctgcgacagcaactataccagagccaccagcccctgccacaggcaacagggcaaccagcatccagtagcagccatctgcagcccatgcaaagacctagtactctcccaagtagcgcagccggctaccagcttagagtgggacaattcgggcagcattaccagtcctccgcgtctagtagtagtagctccagtttccctagcccccagcgattctcccagagcgggcagtcctatgacgggagctataatgtgaatgctggatcccaatacgaaggtcacaatgtgggatcaaatgcccaggcatatggaacacaatcaaactattcctaccaaccccagtcgatgaagaacttcgaacaagcaaaaatcccacagggaacacagcagggacagcagcagcagcagccacagcagcagcaacatccctcccaacacgttatgcaatacaccaatgccgcaacgaaactgcccctgcagtcccaggtcgggcaatacaaccagcctgaagtgccagtccgctctccaatgcagttccaccaaaatttttctcctatttcaaacccctccccagccgcttccgtggtgcagtctcctagttgcagctctactccaagtcctcttatgcagacaggagagaatctccagtgcggccaaggctccgtgcccatgggatcccgaaaccgtattctgcagctgatgccccagctgtcacctacaccttctatgatgccctctcccaactctcacgccgcaggtttcaaggggttcggactggaaggtgtgcccgaaaagcgcttaactgatcccggcctttcctcactgagcgccctgtcaacccaagtggccaatcttccgaacactgttcagcacatgctgctgagcgatgcgctgacaccgcagaagaaaacaagtaaacgaccctccagtagcaaaaaggcagatagctgtactaactcagagggcagcagccaacctgaagaacaactcaagtctccaatggcggagtctctggacggaggctgctctagcagcagtgaggatcagggagaacgggtcagacagctgtcaggtcagtccacttcaagcgatactacttacaagggtggggccagcgaaaaagcaggctcatcccccgctcaaggagctcagaacgaacctccccgactcaacgcatcgcccgccgcccgcgaggaggccacgtcacctggagctaaagacatgccactgtctagcgacggaaaccctaaggttaatgagaagacagttggagtgattgtctcccgggaggcaatgaccggccgggtcgagaaacccggaggacaagataaaggcagccaggaagacgatcccgccgctacccagcgcccaccatccaatggaggcgctaaggagacctcccacgcatccctgcctcaacctgagcctccaggcggcggaggatccaaaggtaataaaaacggggacaacaactcaaaccacaatggagagggcaacgggcagtctgggcattctgccgctggacctgggtttactagtaggaccgagccgtcgaaatcaccgggttccttgcgctactcttacaaagacagcttcggatcggcagttcctcggaacgtgagcggtttccctcaataccctacgggacaggaaaaaggcgacttcactggccatggcgaaagaaaaggtcgcaatgagaagtttcctagcctgctccaagaagtgcttcagggataccaccaccacccagataggagatactctcgttccactcaggagcatcagggtatggccggatcactggaagggactaccagacccaacgtgctggtgtcacagaccaacgagttggctagccgaggtctcctgaacaagagcatcggctccctccttgaaaaccctcactggggaccctgggaacggaaaagttcgtctaccgcccctgagatgaagcagattaatctaacggattatccaatcccacgcaagttcgagatcgagccacagagcagcgcccacgaacctggaggctcactctccgagagaaggtctgtgatatgtgatatctccccgttaagacagatcgtaagagaccctggtgcccacagcttgggccacatgagcgctgatacccggattggcaggaatgatcggctgaacccaacgttgagtcagagtgtgatcctgcctggggggctggtgagcatggagaccaagctgaaaagccaatccggtcagattaaggaagaagacttcgagcagagcaaaagtcaggccagctttaacaataaaaagtccggcgatcactgccaccccccgagcatcaaacatgagagctatcgcggtaacgcaagccctggagccgcgacccatgattctctcagcgactacggcccacaggattcaaggcctacaccgatgcgtcgcgttcctggccgcgtagggggcagagaggggatgagagggagatccccaagtcaataccatgacttcgccgagaaactcaaaatgagccccgggagatcccggggccctgggggcgacccacaccatatgaaccctcacatgaccttttcggagcgagccaatcgatcaagtctgcacaccccattttcgccaaactctgaaacactggccagtgcctaccatgcaaataccagggcccacgcatatggagaccccaacgctgggctgaactcacagctgcactacaagcgccagatgtaccagcagcagccagaggaatataaagattggtctagcgggtctgcgcagggcgtgattgctgctgcacagcatagacaggaaggaccgcgcaaatcacctcggcaacagcaattccttgacagggtgcgcagtccactcaaaaatgacaaggacggcatgatgtatggtccaccagtcggcacatatcacgacccttccgcccaagaagcaggccgttgcctcatgtctagcgacggcctgcccaataagggaatggaactgaaacacggaagtcagaagctgcaggagagttgttgggatctgagtcgccagactagccctgccaagtcctccggtcctcccggcatgagtagtcaaaagagatacgggcctccccacgagactgatggccatggcctggcagaggccacacagtccagcaagcccgggtcagtaatgctgcggctacctgggcaggaagatcacagttctcagaaccccctcatcatgagacgacgcgtgaggtcctttatttcccctattccaagcaagcggcagtcacaggacgtcaaaaactcaagtactgaggacaaaggtcgcctgctgcactcatctaaagaaggagccgataaggccttcaacagttacgcccacctgagtcatagccaggatattaagagtatccccaaaagagatagctctaaggatcttcccagtcccgattccaggaactgtccagctgtcaccctgacctcaccagcaaagaccaagattttgccccctcgaaagggaagggggttaaaactagaggcaatcgtccagaagataaccagtcctaatattcgcaggagtgcatcttccaattcagccgaagccgggggtgatacagtaactttggatgatatactcagcctgaaatctggccccccggaaggaggtagcgttgctgtgcaagatgccgatatagaaaaaagaaagggggaagtcgcctctgatctggtgtccccggctaatcaagagcttcacgtggagaagcctttgccaagaagtagtgaggaatggcgcggttctgtggacgataaggtaaagaccgagacacacgccgagaccgtcaccgccgggaaggagcccccaggcgccatgacctctaccacgtcacagaagcccggaagtaaccaaggaaggcccgacggcagtctgggcggaacagctcctctcattttcccagacagcaaaaacgtcccaccagtgggcatactggccccagaggcaaaccctaaagccgaggaaaaggagaatgacacagtgacgattagtcccaaacaggaagggtttccacctaaaggctattttccctcaggcaagaaaaagggcagaccaatcggatctgtcaataaacagaaaaagcagcagcagccgcccccaccgcctccccagccaccccaaatccccgaaggcagtgctgacggggagccaaagcccaaaaagcagaggcagaggcgggagcgaaggaagcccggggcccagccccgcaagcggaagactaaacaagcagtgcctatcgtggaaccccaagaacccgagatcaagctgaagtacgcaactcagcctctagacaagaccgacgcgaagaataagagcttctatccctacatccacgttgtgaataaatgtgagctgggtgccgtgtgtaccattataaatgctgaggaagaagaacagaccaaactcgtaaggggaagaaagggccagcgttccctgacaccgccaccttccagcaccgagtccaaagccctgcctgcaagctcatttatgctgcagggacctgtagtcacagaatcctctgtgatgggacatttagtgtgctgtttatgtgggaaatgggcatcatatcgcaacatgggcgacctctttggcccattctacccacaggactacgccgccacgttgcctaaaaatccccccccgaaaagggccaccgagatgcagtccaaggtcaaagtgcggcacaaatccgcgtcaaacggctcaaaaaccgacacagaagaggaggaagagcagcagcagcagcagaaggagcagagaagccttgcagcccatcctcgttttaagcgcagacatcggtctgaggattgtggaggcggtcccaggtcactgtccaggggattaccctgtaagaaagctgccacagagggaagtagcgagaagacggtgctagattctaagccaagcgtgccaacaacctctgagggaggccccgagctcgagctgcagatcccagagctcccgctggactccaacgaattctgggtccacgaggggtgtatattgtgggctaatgggatttacctcgtttgcggaaggttgtatggcttacaagaggctctcgaaatcgcccgggagatgaaatgctcccactgccaggaagcaggggcaactctcgggtgctataataaggggtgcagctttcgttatcattatccttgcgccattgatgctgactgcctattgcacgaagaaaatttctccgtgcgatgccccaaacacaaggtgcgcctctggcggtag

SEQ ID NO: 26723 - DNA, 5883 bp, synthetic construct
  misc_feature 1..5883: note = Description of Artificial Sequence: Synthetic coding sequence
  source 1..5883: mol_type = other DNA
atgcagagcttccgggagcagagcagctaccacggcaaccagcagtcttacccccaggaggtccacggttcgtctcgtctagaggagttctctccccggcaggcccagatgtttcagaatttcgggggcaccggcgggagctctgggagcagtggtagcggatccggcggggggcggagaggggccgcggctgccgccgcggctatggcctccgaaacctccggacaccagggttaccaaggatttcgaaaggaggccggcgacttttattatatggcagggaacaaggatcccgtgaccacaggcaccccacaaccaccacagagaagaccaagtggcccagtgcagtcctatgggcctccccagggatcttcattcggaaaccagtatgggagtgagggccatgttggacagttccaagcccagcattccggtttaggaggggtatcacactatcagcaggattacacaggccctttttctcccggttctgcgcagtatcagcagcaggcgtcttctcaacaacagcagcagcaggtccagcagttgaggcaacagctttatcaatctcaccagccattgccacaggctactgggcagccagcaagctcctcctctcatttacagccaatgcaacgccccagcaccttaccctcttctgctgccggataccagcttcgtgtgggacagttcgggcagcattaccaatcttccgcaagttcaagcagcagctctagctttccgagtccccagcgatttagccagagcggccagtcttatgatggatcctataacgtgaatgcgggttctcagtatgagggccacaacgtagggagtaacgcacaagcctacgggacccagtcaaactattcttaccaacctcagagcatgaagaacttcgagcaagccaagataccgcagggtactcagcagggtcagcagcagcagcaaccgcagcagcaacaacacccatctcagcacgttatgcaatacaccaacgccgccacaaagctacccctgcagagccaggtgggccagtacaaccagcccgaagttcctgttcggtcccccatgcagttccaccaaaacttttccccaatctccaacccctctcccgcggctagcgtggtccagagtccctcttgctccagcactcccagccctctcatgcagacaggagagaatctccagtgcgggcagggatcagtgcccatggggagtagaaatcgcatactgcagcttatgcctcaattgagtcctacaccttcgatgatgccttcacccaactcacacgcggctgggttcaaaggctttgggctggaaggggtgcctgaaaagagactcacggatccggggctgtctagtttatccgctttgagtacccaagtcgctaatcttcccaacacagtacagcacatgttgctgtcagatgcccttactccacagaagaagacatcaaaaaggccctcctcttccaagaaggctgatagctgtacaaatagcgagggctcatcccagcccgaggaacagttgaagagcccaatggccgagtccctggacggtggctgttccagcagctcagaggatcagggtgagagggtgcgccagctcagtggccaatccacttcttccgatacaacgtacaaggggggtgcttccgagaaagcaggttctagcccagcccagggtgcccagaacgagccgcctagactgaatgcctcgcccgcggccagagaggaagccaccagcccaggagccaaagacatgccgttgagcagtgatggaaatcccaaagttaatgagaagacagtgggagtgattgtatcacgtgaagccatgactggtcgtgtagagaagcctggaggacaggataagggcagtcaggaggacgaccccgccgcaacacaacgccccccctcgaacggaggagcaaaagagactagtcatgcctctttgccccagcctgagcctccaggtggtggaggctctaagggaaataaaaacggtgataataattctaatcataacggagaagggaatggccaatcagggcattcagccgctggccccggctttaccagtagaactgagccgtcaaaatcgcccggctcgctacggtactcttacaaggatagttttggcagcgcagttcctcggaatgtttccggcttccctcaatacccgactggccaggaaaaaggggactttaccggacacggcgagcgaaaaggacgcaacgagaagttcccctcactcctccaggaggtgctgcaggggtatcaccaccatcctgacagaagatactcaagatctacacaggaacaccaagggatggccggtagtttggaggggactaccaggcccaacgtgttggtgagtcagaccaatgagctcgcttcacgcggcctcctgaacaaatccataggctctcttctcgaaaatccccattgggggccttgggagcggaaatcgtccagcaccgcgcctgaaatgaagcagattaacctgacagactatcccatccctcgtaagtttgaaatcgaacctcagagcagcgctcacgagccaggcggatcactctctgaacgcaggtctgtgatctgcgatattagccccctgagacaaattgttcgagacccgggagcccactctctgggccacatgtccgcagacaccaggataggacgtaatgatcgcctgaatcctacactgtcacagagtgtcatcctcccagggggcctggtgtccatggaaacaaagcttaaatctcagtctgggcagattaaagaggaggattttgagcaaagtaagtcccaggcgtcatttaataataaaaagtctggagaccactgccatccgccatccatcaagcatgaaagctataggggcaacgccagtcccggagcggctacccatgactcactgtccgattatgggccccaggacagccgccctactccaatgcgacgggtacctggccgggtcgggggcagggaaggtatgaggggaagaagcccatcacagtaccatgacttcgcagagaagctgaagatgtctcccggccgctcccgcggtcctggtggcgatccacatcatatgaacccgcacatgacattctcagaaagggccaaccgaagcagtctacatacccccttctctcccaatagcgaaacactagcatctgcataccatgcaaacaccagagctcacgcttacggtgaccccaacgccgggcttaacagccagctccactataagcggcagatgtatcagcaacagcctgaagaatacaaagactggtcctcaggtagcgctcagggagttattgctgccgcccaacacaggcaggaaggacctcgaaaatcaccccgccagcagcagttcctcgaccgtgtgcggtcccccctcaagaacgataaagatggaatgatgtacgggccccccgttggaacataccatgatcccagcgcgcaggaggccgggcgatgtcttatgagctctgatgggctgccaaataaggggatggagctgaaacatggtagtcaaaaattgcaggagagctgctgggacctgtcacggcagactagccctgccaaatccagtggcccccctggaatgtcctcccagaagaggtatgggccgccacatgaaacagatggccatggcctggcagaagcgacccagtcaagcaaaccaggcagtgtgatgttacggctaccagggcaggaagatcatagttcacagaatcccctgataatgaggagaagggtcaggtccttcatatcacctatcccttcaaaacgacaatcgcaagatgtaaaaaactcctccacagaggataaaggtagactgctgcattcatccaaggagggagctgacaaggcctttaactcttacgctcatctgagccattcgcaggacatcaaatcaattcctaaacgagattcaagcaaagatttaccctctccagactcgcgcaattgcccagcagttacccttacatcaccagcaaagaccaaaattctcccacccagaaaaggcagagggcttaagctggaagcgattgtccaaaaaatcacctcacccaatattcggagatccgcatcttctaactctgctgaagcaggtggagataccgtgacattggatgacattctgtcattgaaaagcggtccaccagagggcgggtctgtggccgtgcaggatgccgacatcgagaaacgcaagggtgaggttgcgtccgacctcgtgtctccagctaatcaggaactgcacgtggagaagccactccccagatcatcagaagagtggaggggcagtgtcgacgacaaggtgaaaacagaaacccatgccgagacggtgaccgcagggaaggagccacctggcgccatgaccagtactacatctcagaagcctgggagcaatcaaggaaggcccgatggctccctgggagggactgcacccctgattttccccgatagtaagaacgttccgcctgtggggatcctggcacctgaagccaacccgaaggcggaagaaaaggagaatgacaccgtgactatatctcccaagcaagaaggcttccctcctaaaggatactttccctctgggaagaaaaaaggccgaccaatcggaagcgttaataaacagaagaagcagcagcagccaccaccacctccaccacagccaccccagatcccagaaggctccgctgacggcgagccaaaacccaagaaacagaggcagagaagagagcgccgtaaacccggcgcacaacctcggaaaagaaagacgaagcaagccgtgccgattgtcgaaccccaggagcctgagatcaagctgaaatacgccactcaaccattggataaaaccgacgccaaaaataagtcattttacccgtacatacacgtggtaaacaagtgtgagttaggggcggtttgtaccattataaacgccgaagaagaggaacagacaaagctggtacgcggacggaaggggcaaaggagtcttacacctccgccctcttcgactgagagcaaagcccttcccgctagctcatttatgctgcaaggtcctgtagtcactgagagtagcgtcatgggccaccttgtctgctgtctgtgtgggaaatgggcaagttacaggaacatgggcgatctgttcggccccttttatccacaggattacgcagctacgctcccaaaaaatccgccaccaaaaagagccactgaaatgcagtctaaagtcaaggttcggcacaagtctgcaagcaatggtagtaagaccgacacggaagaggaggaagagcagcaacagcagcaaaaggagcaacggtcactggcagcccacccgcgtttcaaacgccgacacaggagtgaggactgcggagggggccctcgaagcctgtcacggggccttccctgtaaaaaggccgcaactgaaggatcgagtgaaaagactgtgttggattccaaacccagtgtcccgacaacgagcgaaggcgggcccgaactagagctgcagattccagagctgcctttggacagcaatgagttctgggtgcacgaggggtgtattctctgggctaatggcatctacctggtatgcggacgcttatacggtctccaggaagctctggaaatcgccagggagatgaaatgctcacactgccaggaagccggtgccaccctgggttgctacaataaggggtgctcgttccggtaccactacccttgtgcaattgacgccgattgcttattgcacgaagagaattttagtgtgagatgccctaagcacaagcctccactgccctgcccacttccacccttgcaaaataagaccgccaaaggatcgcttagtactgagcagtctgagaggggctag

SEQ ID NO: 26724 - DNA, 540 bp, synthetic construct
  misc_feature 1..540: note = Description of Artificial Sequence: Synthetic coding sequence
  source 1..540: mol_type = other DNA
atgagcaccggcagcctgagcgacgtggaggacctgcaggaggtggaaatgctggaatgtgacggactcaagatggattccaataaagaattcgtcacttcaaatgagagtaccgaggagtcgtcaaactgcgagaatggctccccacaaaaggggcgggggggactaggaaagcgaagaaaagcccctacaaaaaagagcccactcagtggtgtgagccaggagggcaagcaggtgcagcgaaatgctgctaatgcccgggaacgcgcgcgaatgcgtgtcctcagtaaagcgttctctagacttaaaaccacactgccatgggttcctccagatactaaactgtccaaactcgatactttgcgccttgcctcctcttatatagcgcacctaagacaaatcctggcaaacgacaagtatgagaatggttacatacatcctgtgaacttaacctggcctttcatggtcgcgggtaaaccagagagtgacctgaaggaggtagttaccgcctcccgcctctgcggcaccaccgctagctag

SEQ ID NO: 26725 - DNA, 540 bp, synthetic construct
  misc_feature 1..540: note = Description of Artificial Sequence: Synthetic coding sequence
  source 1..540: mol_type = other DNA
atgagcaccggcagcctgagcgacgtggaggacctgcaggaggtggagatgctggagtgtgacggtctgaagatggacagcaataaagaattcgtcacctctaatgagtctactgaagagtcgtctaattgcgaaaatgggtccccacagaaggggaggggcggtcttgggaagcgcagaaaggcaccaacgaagaaaagcccactcagtggcgtgtcacaggagggcaagcaagttcagcggaatgcggccaatgccagagagagggcccgaatgagggtgcttagtaaggccttctcgcgtctgaagactacgctgccatgggtccctccggacaccaagttgtctaagctagatacactgcgtctagccagctcctacattgcccatctgcgccagatcctagcaaacgacaaatacgagaacggatatatccaccccgttaatctgacatggccttttatggtagccggcaagcccgagtcagacctcaaggaggtggtgacagcgagcagactttgcggcactactgctagctag

SEQ ID NO: 26726 - DNA, 1965 bp, synthetic construct
  misc_feature 1..1965: note = Description of Artificial Sequence: Synthetic coding sequence
  source 1..1965: mol_type = other DNA
atgaaccagccccagcggatggcccccgtgggcaccgacaaggagttatctgacctgctggacttcagcatgatgtttccacttcctgtgacaaatggaaaggggagaccagccagcttagccggggcacagtttgggggctccggactcgaggacaggccttcaagcggctcatggggctcaggcgaccagagcagctcttcatttgatccatcgaggacttttagtgaagggacccattttacagagagccattcgagtctctcatcttccacattcctgggccccggactcggggggaaatcaggggaaaggggggcatacgcatcttttggtcgcgacgcaggtgtcggcgggttgactcaggcagggtttctatcaggcgaacttgctctcaacagcccaggaccgctaagccctagtgggatgaagggaacctcacagtactatcccagctattctggctcatcaagacggagggccgccgacggctccttggatacacagccgaagaaggtgaggaaggtaccccctggcctcccttcttctgtctatcctcctagcagcggggaggattatgggcgggacgcaactgcttatccttctgccaaaacaccctcgagtacctacccagctcccttctatgttgctgacggctctttacaccccagcgctgaactgtggtcacctccaggtcaggccggctttgggcctatgttgggtggaggttccagtccgttgcctctcccaccgggcagcggcccagtggggagcagcggctcctcctccacgttcgggggattacaccagcacgagagaatgggttatcaactgcacggcgccgaagtgaacggtggtttacctagcgcctcgtccttttcttccgcccctggagctacctatggaggagtgtcgtcccacacacctcccgtttccggagccgattctctcctgggctcgcgcggaacaaccgctgggtcctctggcgatgcactcggcaaggctcttgccagcatttactccccggatcacagcagcaacaatttttcgtccagcccctcaacgcctgtcggcagccctcaaggcctggcgggtacatcacagtggccgcgagcaggcgcccctggtgctctctctccgtcctatgacggagggctccacggtctgcaatcaaaaatcgaagaccaccttgatgaggcgattcacgttctgcggtctcacgccgttggaactgctggcgacatgcacaccttgctgcccggacatggagccctcgcaagtggctttacaggccctatgtccttgggcggacgacacgctggtctggtgggaggctcccatcccgaggatgggttagctggcagcacctctttaatgcacaaccacgcggcattgccctctcagccgggaacactgcctgacctgtcccgccctccagattcgtattccggcctcggcagggctggagcaactgcagccgcgagcgaaatcaaacgtgaggagaaagaggacgaggaaaacacgagtgcagctgatcacagcgaagaagagaagaaagaactcaaagcaccccgggccaggacctcaccggacgaggacgaggacgacctgttgcccccagagcagaaggccgaacgagaaaaagagaggcgagtcgcaaataacgccagggagcggttgagagtaagagacattaacgaggcttttaaggagctagggagaatgtgtcaactgcatcttaattccgagaagccacagaccaaactgttgatactgcaccaggcggttagcgtaatcttgaacctcgagcagcaggtgagagagcgaaacttgaatcctaaggccgcctgtttaaaaaggagagaagaggagaaagtgagtggcgtggtgggagatccgcaaatggttctctctgccccgcatcccggcctgagtgaggcacataaccctgctgggcacatgtag

SEQ ID NO: 26727 - DNA, 1956 bp, synthetic construct
  misc_feature 1..1956: note = Description of Artificial Sequence: Synthetic coding sequence
  source 1..1956: mol_type = other DNA
atgaaccagccccagcggatggcccccgtgggcaccgacaaggagttgtccgatcttctggatttttcaatgatgtttccactccccgtcaccaatggtaagggccgacctgccagtttggctggagctcagttcggaggaagcgggctggaggatcgaccatcttctgggagttgggggtccggagaccagagtagctcgtctttcgacccgtcccggacgtttagcgaaggtacccatttcactgagtctcactcctccttgtcctcctccacttttttgggtcctgggctggggggcaaaagtggagagcgcggggcttacgcatccttcggacgcgacgcgggagtgggaggactgacccaagcaggctttctttccggggagctggcactaaacagccctgggcccctgagtccaagtggcatgaagggcacttctcagtactatccatcctattctgggtccagtcgcagaagagcagccgatggcagcctggacactcagcctaaaaaggtcaggaaagttccgcccgggctgcctagttctgtatatcccccatcaagcggtgaggactacggacgcgatgctaccgcctatcctagcgcaaaaaccccgtccagcacttaccctgcacctttctacgtggctgacggtagtttacatccttcagctgagctgtggtcacctcccggccaagccggcttcggtccaatgctaggcggggggagctccccgctgccactacccccaggaagcggccctgtcggaagctcgggttcctcttccacattcggcggactgcatcagcacgaaaggatgggctaccaattacacggcgcagaagttaacggaggcttgccttctgcgtcttcattcagcagtgctccaggcgccacatacggcggcgtgtccagtcataccccccctgtatccggggcggattctctgttgggatcgagaggaaccactgcaggatcaagcggagacgctctgggaaaagctctggccagcatatactcgcccgaccatagctccaacaacttctcaagctccccgtccacccccgtcgggagccctcaaggtcttgcgggcaccagtcagtggccaagggctggggctcctggagccctcagtcctagttacgacggtggtctacacgggctgcagagtaaaatagaggatcacctcgatgaagcaatccacgtgcttcgcagccatgccgttggcaccgctggcgacatgcacaccctgctacctggccacggagcactcgcttctgggtttacaggacccatgtccttaggggggaggcacgctggcctggttggtgggtcacaccctgaagatggtcttgccggcagcacctcgctaatgcacaaccatgctgccctcccctctcaaccaggaactctacccgaccttagtagacccccggatagctactcaggacttgggagggccggagcaaccgccgcagcctccgaaatcaagcgcgaagagaaggaggatgaagagaatacatctgctgctgaccactctgaggaggagaagaaggagctgaaagcccctcgggcccggactagcagcacggatgaggtgttatctttagaagagaaagacttacgtgaccgagaaaggcggatggcgaataacgcacgcgaaagagtgcgcgtgagggacatcaacgaggcatttagagaattggggcgcatgtgccagatgcatctgaagtcagacaaggcccagacaaagctgcttatccttcagcaggctgtgcaagtaatcctggggctggaacagcaagtccgcgagcggaatctcaaccccaaggcagcatgcctgaaacgccgcgaagaagaaaaggttagtggggtggtgggggatccacagatggtgctatccgccccccacccaggactgtcagaggcccacaatccagcaggtcacatgtag

SEQ ID NO: 26728 - DNA, 1977 bp, synthetic construct
  misc_feature 1..1977: note = Description of Artificial Sequence: Synthetic coding sequence
  source 1..1977: mol_type = other DNA
atgaaccagccccagcggatggcccccgtgggcaccgacaaggagttgtctgatttactggactttagtatgatgtttccgctgccagtcacaaatggaaaaggacggcctgcttctctggctggagctcagttcggagggagcgggaagagcggagagagaggcgcatatgcgtccttcggacgtgatgcgggggtgggcggccttactcaagcgggattcctcagtggtgaactggctctaaatagccccgggcctctctcacctagcggtatgaagggtacctcccagtactatccctcctattcaggtagttcacgcaggcgagccgctgacgggagcctggatacccagccaaaaaaggtaaggaaagtgccccccggcctgccctcttccgtttacccccctagttctggcgaggactacggaagggacgccacggcttacccttctgccaaaacaccgtcctcaacataccctgctccattctatgtggccgatggaagtctgcaccctagcgcagagctgtggtcaccgccaggtcaggctggcttcggccctatgctaggaggaggcagctcacccctgcccctgcccccaggcagtgggccagtgggaagcagcggtagcagcagtaccttcggcggtctgcatcagcacgaaagaatggggtatcagttacatggagccgaagtgaacggaggattaccttcggcctcttccttctcatcagcccccggggccacatatggcggcgtaagctcacacacacctcccgttagcggcgccgattccttactgggatccaggggtactaccgccgggagctccggtgacgcgctaggcaaggctctggctagtatctatagtcccgatcacagcagcaacaatttttcgtcgtccccttcaactcccgttggttcacctcaaggattggccggcactagccagtggcccagagcgggagcccctggggccctctccccgtcttacgacgggggattacacggtctccagtccaaaatagaggaccatctggacgaggccattcacgtgctgaggtcccacgcggtcggcacagcaggcgacatgcatacactcctgcccggtcatggcgctttagcttccggatttacagggccaatgagcctgggaggacggcacgcgggactcgtaggcggttctcatcctgaggacggtctcgccggctccacctcgctaatgcacaatcacgccgctctgcctagccaacccggcactcttcccgatttgtcaaggccccccgatagctatagtggcttgggacgcgcaggagccacggcagccgcctctgagattaagcgggaagagaaggaggatgaggagaacacatccgctgctgatcatagcgaggaagagaaaaaggaacttaaggcaccgcgtgcaaggacacgctgccagccaacgcccaggcactcccccccatcaccccatcaagacgcccatgtgcataggccccatgcccatcgcacacacaccggacggccttcagcaggcccaaccctgtttccacaaccccactgcctcccgttggcgcctagccgccggccaccacattctccagacgaggacgaagacgatcttctccccccagagcagaaggccgaacgggaaaaggagagacgggttgctaacaacgcaagggagagactgagagtgcgggacatcaacgaggctttcaaagagctgggtagaatgtgtcaactccacctgaactcggaaaagccccaaactaaattgctgattttgcaccaggccgtgtccgtgattctcaatctagagcagcaggttcgcgaacgcaatttgaatccaaaggcggcatgcctcaagaggagagaggaggaaaaggtctcaggagtggtcggcgatccccagatggtgctgagtgccccgcacccgggccttagtgaagcacataacccggctgggcatatgtag

SEQ ID NO: 26729 - DNA, 1956 bp, synthetic construct
  misc_feature 1..1956: note = Description of Artificial Sequence: Synthetic coding sequence
  source 1..1956: mol_type = other DNA
atgaaccagccccagcggatggcccccgtgggcaccgacaaggagcttagcgatctgctcgatttcagcatgatgtttcctctccctgtcacgaacggtaagggacggcctgcctctctcgccggcgctcaatttggcggcagtggcctggaagacaggccttcctccggatcttgggggagtggagatcagtcctcttcttcattcgacccttcgcgcaccttcagtgaaggcacacatttcacagagagccattcgtcactgagcagctctacttttctcggccctggattgggggggaaaagcggagagaggggagcttatgcctcttttggacgggacgccggagtcggcgggctgactcaagccggttttctgagtggggaactcgcactgaactcgccaggtcccttatccccatccgggatgaagggcacatcacagtactacccatcctattctgggtcaagtaggaggcgagccgccgatggttccctggacacgcaacctaagaaagtgagaaaagtgccaccaggactgcctagcagtgtctatccgccatcttcaggggaggactatggtcgcgacgctaccgcttacccctctgctaagacgcctagcagtacctaccctgcgccattttatgtggctgacggatccctacacccttcggccgagttgtggtccccacccgggcaggcaggattcgggcctatgcttggcgggggcagtagccccttacctctgccccctggcagcgggccagtcggtagcagcgggtcatcctctacattcggcgggctgcatcagcatgaacgaatgggctaccaactgcatggtgcggaagtgaacggcggccttccgtccgcgtcttctttctcgtcagccccgggggccacctatggaggagtgtcttcacatactccaccggtgagtggcgccgacagtctgctggggtctagaggcactacagcgggaagctctggagacgccttggggaaggccctcgcatccatctatagccctgaccactcatctaataatttttcgtccagtcccagtacacccgtcggttccccccagggtctggcgggaacatctcaatggccgagggcaggcgccccaggagctctgtcaccttcctacgacggtgggctccacggcctccaaagcaagattgaagaccatttagatgaagcaatccacgtgctgcggtcccacgccgtgggaaccgctggcgacatgcacactctcttgcctggacacggcgccctggcctctggcttcactggccccatgtctttgggcggcagacacgctggcctggttggcggatctcaccccgaggatgggctggccggaagcacatctctgatgcataatcacgcagctcttccctcccaacccggcacattaccagatctgtcccgcccaccagattcatacagtggacttggaagggccggcgccaccgccgctgcctccgagatcaaaagagaggaaaaggaggatgaggagaacacatcagctgccgaccactccgaggaagaaaagaaagaactgaaggcacctagagcacgtacatcctccacagacgaggtgctgtcgctagaggagaaggacctccgagaccgcgaacgccgaatggccaataacgcccgggaaagagtgagggtcagggacattaacgaagcattcagagagttaggccgaatgtgccagatgcatctgaagtccgacaaggcgcagacaaagttgctgatcctccagcaggcagtccaggtgatcctgggtttggagcaacaggttagagaacgtaatctcaaccccaaagctgcctgtcttaaaaggcgcgaggaagaaaaagtgagcggcgtggtgggagacccccagatggtccttagtgctcctcaccccgggctgtctgaagcacacaatccagcaggccacatgtag

SEQ ID NO: 26730 - DNA, 474 bp, synthetic construct
  misc_feature 1..474: note = Description of Artificial Sequence: Synthetic coding sequence
  source 1..474: mol_type = other DNA
atgggctaccagctgcacggcgccgaggtgaacggcggcctgccctctgctagttctttctcatctgcaccaggcgcaacatacggtggtgtctcctcacacactcctccagttagtggcgcagacagcttactgggctcccgcggaaccacggccgggtcttctggagacgccctgggcaaagctctggcaagcatctactcaccagatcactcatccaataatttctcttctagtccctccacgcctgttggaagcccccaggggctggcaggtacaagccagtggccccgcgccggggctcccggtgccttgtcaccaagttatgacggcggcctccacggccttgtcggcgggagccatcccgaggacgggcttgctggttccaccagtctcatgcataatcatgctgctttgccttcgcagcctggcaccctccctgacttatcacggccacccgatagttactcttag

SEQ ID NO: 26731 - DNA, 2016 bp, synthetic construct
  misc_feature 1..2016: note = Description of Artificial Sequence: Synthetic coding sequence
  source 1..2016: mol_type = other DNA
atgcaccaccagcagcggatggccgccctgggcaccgacaaggagctgagcgatttgctcgacttttctgcaatgttttccccgcccgtctcatcggggaaaaacggacctactagcctggcctctgggcatttcactgggtccaacgtcgaggaccgctcgtcatctggtagctggggcaatggcggccaccctagcccatcacgcaactacggcgacgggaccccctatgaccatatgacctctcgtgatctcggcagtcacgataatcttagtccaccctttgtcaatagtagaatacagtcaaaaaccgaacgaggctcatattcaagttacggacgtgaatctaatctgcaggggtgccaccagcaatctctgctcggcggtgacatggatatgggcaacccaggcacccttagcccaactaagcccggttctcagtactatcaatacagctctaacaaccccaggcggcggccccttcatagcagcgctatggaagtgcagaccaaaaaggtccgaaaggtccctccgggactgcccagttccgtgtacgcacccagcgcttctacagctgattataaccgcgactctcccggctaccctagcagtaaacctgccacctccactttcccttccagcttcttcatgcaggatggccatcattctagcgatccatggtcatcttcatcggggatgaatcagcctggctacgctggcatgctggggaactcttcgcatatcccgcaatctagttcttactgtagcctgcacccccacgagcgcctttcgtatccgtcccatagctccgccgacattaactcgagcctccctccaatgagtacatttcataggtccggcactaatcattatagcaccagtagctgcactccccccgccaatggaaccgatagcatcatggccaataggggttccggggctgccggcagctctcagaccggtgatgctctgggcaaggccctggccagcatctattctcccgaccacactaataattccttctcttccaatccgagtactcccgtaggaagtcccccgagcttatcagctgggactgccgtctggtcgcggaatggcggacaggccagctcctcacctaactacgagggccccctgcatagcctccaaagccgcattgaagatcggcttgagaggctcgacgacgcaatccatgtactaaggaatcatgctgtggggcctagcactgcgatgccaggcgggcatggggatatgcatggtatcattgggccatcgcacaatggtgccatgggggggctgggatccgggtacgggactggcctgctgtctgccaaccggcattcactaatggttgggacacacagagaggatggggtggcgctgcggggctctcatagcctcctaccgaaccaggtgccggtgcctcagctgcccgtgcagagtgctacgagccctgatctaaacccacctcaggatccttatcggggcatgccgcctggactgcagggacagtcggtctcttcagggagctcagagattaaaagcgatgacgaaggtgatgagaacttgcaggataccaaaagctctgaggacaaaaaattggatgacgataagaaggacattaagtctatcactagaagccgaagctcgaacaatgacgacgaagatctcactcctgagcagaaagcggagcgcgaaaaggagaggcggatggccaataacgctcgcgaaaggttgcgcgtgcgagatattaatgaggcttttaaagagcttggacgaatggtccaactacatctgaaaagtgacaaaccacaaacgaagctattgattctgcatcaagccgtggcagtgatcctctcgctcgaacagcaggtgagagagcgcaacttgaaccctaaggctgcctgtctaaagagaagagaggaggaaaaggtttcgagtgagccacctcccctgagtttggccggtcctcaccccggaatgggagatgcgtcgaatcatatgggacagatgtag

SEQ ID NO: 26732 - DNA, 2004 bp, synthetic construct
  misc_feature 1..2004: note = Description of Artificial Sequence: Synthetic coding sequence
  source 1..2004: mol_type = other DNA
atgcaccaccagcagcggatggccgccctgggcaccgacaaggagctgagtgatctgctggatttctctgctatgtttagtccaccagtcagctccgggaagaatggccccacaagtctggcatcggggcatttcactggcagcaatgttgaagatcgaagttcatcaggttcttggggcaacggcgggcacccatctccctccagaaattatggagacggcactccgtacgaccatatgacaagccgcgacctgggatctcacgataacttgtctcctccttttgtgaattcgcgaattcagtccaagactgaacgagggagctatagttcgtatgggagagaatcgaatctccagggctgccaccaacagtccctgctgggcggtgacatggatatggggaatcccggcacccttagccctactaaacccggctcccaatactaccaatacagctcgaataacccccgccgacgccctctgcattcctctgccatggaggtgcagaccaaaaaggtgaggaaggtgcctcccggcctcccatcttccgtttatgctccatctgcaagcaccgcagactacaatcgggattctcctggatacccttcttcaaaaccagcaacaagcaccttcccttcgagtttttttatgcaggatgggcaccactccagcgacccctggagctcatccagcggcatgaaccagcctggttacgccggtatgctgggaaactcctcccacatcccccaatcctcatcatactgcagcctgcacccccatgaacgtctgagttacccttctcacagttcagctgacatcaactcttcactgccccctatgtccacatttcacagatctggtacaaatcactacagcacttctagttgcacccctcctgctaacgggaccgactccatcatggctaatcgcgggagcggagctgcggggagctctcagactggagatgccctggggaaagccttagccagcatttacagccccgaccacacaaataatagcttttcatctaatcccagcaccccggttggaagcccacccagtttgagcgccggcaccgctgtctggtcccgtaatggcgggcaggcctctagcagtcccaattatgaggggcctttgcatagtcttcagagtcggatagaggatagactggagcgattggacgacgccatccacgtgctacgtaaccatgctgtgggcccctccacagccatgccaggtgggcatggcgacatgcatgggattataggccccagtcataacggcgctatggggggacttgggagtggctatggcactggtttgctgtctgcaaacaggcactcactcatggtcgggactcaccgggaggatggagtcgcacttcgtggaagccactctctgctgcctaatcaagttcctgtcccacagcttcccgtgcaaagcgcaactagtccagatctcaacccacctcaggacccctatcgcggaatgccaccgggactacagggccagagtgtctcttcaggaagctcagagattaagagtgacgatgaaggagacgaaaatctgcaagatacaaagtcttccgaggacaagaagttagacgatgacaagaaggacatcaagagtattacttctaataacgacgatgaggatctcacacccgagcaaaaggctgaacgcgagaaagagcggagaatggccaacaacgcccgcgaacgtctcagagtgcgagatattaacgaagcctttaaggagctggggcggatggtgcagcttcaccttaagagtgataagccgcaaaccaaactgctgatcctccaccaagctgtcgcagtgattctgagtttagagcagcaggtgcgagaaagaaatttgaacccaaaagctgcctgcctgaagcggagagaggaagaaaaagtgtccagcgaaccacccccactgagcttggccgggccgcatcccggaatgggggacgcttccaatcacatgggacaaatgtag

SEQ ID NO: 26733 - DNA, 2322 bp, synthetic construct
  misc_feature 1..2322: note = Description of Artificial Sequence: Synthetic coding sequence
  source 1..2322: mol_type = other DNA
atgttcagcaagcggctggagaagatcgcccaggtgcccctgctgttcccctttatttttattatcttgacaaattattcaaagatggaaggcgctgtggagtcccaaccctcattcttcaagacatcgcaagatatcgtgacctgtacttgggtagagaactgctattcctccttcagtcgcaggccactagagcagatgttctgtaaacaccaatctaagaacattattagctggaccggaatggttgcccacacttgtaatccgtccacactgggcggacaggggttgtgtgacttcgctaagatgcatcaccagcagagaatggccgccctcgggactgacaaggagctttctgacctacttgatttctcagcaatgtttagcccacccgtgtcaagtggtaagaacggtccaactagcctggcgtctggccattttactggctccaatgtggaggaccggagctcctccggaagctgggggaatggcgggcatccatctccgtccagaaactatggagacggaaccccttacgaccatatgacgagccgtgatctaggctcgcacgacaatctttctcctcctttcgttaactctcgcatacagtccaaaaccgaacgtggctcttactcttcctatggccgagagagtaaccttcagggctgtcaccaacagtcactcttggggggcgatatggacatggggaatcctggcactcttagtcctactaaacccggttcgcagtattaccagtacagtagcaataaccctcggaggcggccattgcatagcagcgcaatggaagtgcagaccaagaaagtgaggaaggtgccccctgggttgccttccagtgtgtacgccccctccgctagcaccgctgattataatagggatagcccgggctatccatcatccaaaccagccactagcacttttcctagctctttctttatgcaggatggtcaccattccagcgacccatggtcctccagctctggcatgaaccaaccggggtacgccgggatgttaggcaactcatcacatattccacagagtagtagttattgctccctgcatcctcatgagaggctatcctatccgtcacattcttccgctgatatcaacagctcgcttcccccaatgagtacttttcatcgctccggcacaaaccactacagcacatcttcttgtactccccctgccaacggcactgactcgattatggcaaaccggggcagtggggcagccggatcatctcagaccggggatgctctcgggaaagcactggcctccatctattctccggaccataccaacaactctttctcttcaaatccatctacgccggtcggcagcccaccaagcctgagcgctgggaccgcagtctggtcacgcaacggaggccaagcatcttccagccctaactatgaaggcccactccacagcctgcagtccaggatcgaggaccggcttgaaagactggacgatgctattcatgtgctgcgtaaccatgccgtgggaccaagtacagctatgccgggaggacatggcgatatgcacggcataattggccctagtcacaatggagctatgggaggcctagggtccggctatggcaccggcctgttatctgccaatagacacagtttaatggtgggaacccatcgggaggacggcgtggcactcagaggatcacatagtctgctgcccaatcaggtgcctgtgccccagctgcccgtgcagtctgcaacttcccccgacctgaacccccctcaggatccataccgcggaatgccgcccgggcttcaaggccagtccgtgtcgagtggcagttcagagattaaaagcgatgatgagggggacgagaacctccaagatactaagtcctccgaggacaagaaattggacgacgataaaaaagacataaagtcaattacccggtccagatcctccaacaatgatgacgaggatctgacccctgagcagaaggctgagcgggagaaggaacgaaggatggccaacaacgcccgagagagattacgggtgcgtgacatcaacgaagcgttcaaggagctcggcagaatggtgcagcttcatctgaagtcagataagccacagaccaagctgctgatactgcatcaggcggtagcggtcattctttccctggagcagcaggtgagagaacgcaacctcaatccaaaagcggcgtgccttaagaggcgcgaggaagagaaggtgagcagcgaacccccgcccctatccctcgctggcccccatcctggaatgggtgacgcttccaaccatatgggccagatgtag

SEQ ID NO: 26734 - DNA, 1536 bp, synthetic construct
  misc_feature 1..1536: note = Description of Artificial Sequence: Synthetic coding sequence
  source 1..1536: mol_type = other DNA
atgtactgcgcctacaccatccccggcatgggcggcaacagcctgatgtactactataacggcaaagcggtatacgcaccaagtgcgtctacagctgattataatcgtgatagccctggctaccctagtagcaagcccgccacctcaacttttcccagtagcttcttcatgcaagacgggcatcactcaagcgacccatggagcagcagttccgggatgaatcaaccgggatacgctggaatgctgggtaacagctcacacatccctcagtctagctcctactgtagcctacatccacacgagagactgagctacccaagtcactcctcagccgatattaatagtagtcttccccccatgagtactttccatcgctccggcacaaatcattactccacctcctcttgcaccccacctgctaacgggacagactctatcatggccaaccggggctcaggagctgccggatcaagccagaccggggacgcgctggggaaggcactggcaagtatttactctcccgaccacaccaacaattctttctcctccaacccttcaacccctgtggggagcccgccctctctgagcgccggaactgccgtgtggtctcgcaatggaggccaggcttcgagctcaccaaattatgagggccccctccatagtcttcagagtagaatcgaagacaggcttgagaggctggacgatgccatccacgtgttaagaaaccacgctgtggggccgagtactgctatgcctggtggccatggtgatatgcatggaataattggaccatctcataacggggcaatgggcggactgggctctgggtatggtactgggcttttgtcagctaatagacacagtctgatggtgggtactcatagggaggatggcgtggctctgagggggtcccacagcctgttgcctaaccaagtcccggtgcctcagctgcccgtgcagtccgccactagcccagatctcaatcctccacaggatccgtatagaggtatgcccccaggcttgcaaggccagagcgtctcctccgggagcagtgaaatcaaaagtgacgatgagggtgacgagaacctccaggataccaagtcaagtgaagataagaagctggatgatgacaaaaaggatatcaaaagtatcacccggagcaggagctcaaacaatgatgacgaagacctcacacccgaacagaaggctgaacgcgaaaaggaaaggaggatggcaaacaatgcccgcgagaggctgagggtgagggatatcaatgaggcctttaaagagctgggcaggatggtgcagctccacctcaaaagcgacaaacctcagacgaaactcctaattcttcatcaagcggtagcggttatcctatcgctcgagcagcaagtccgggagaggaatctcaaccccaaagccgcctgccttaaaaggagagaggaggagaaagtaagctctgagcctcccccgctgagtctggcagggccacaccccgggatgggcgacgcttccaatcacatgggacagatgtag

SEQ ID NO: 26735 - DNA, 1944 bp, synthetic construct
  misc_feature 1..1944: note = Description of Artificial Sequence: Synthetic coding sequence
  source 1..1944: mol_type = other DNA
atgttcagcccccccgtgagcagcggcaagaacggccccaccagcctagcaagtggacactttacaggctcaaacgtggaggacaggtcctccagtggctcatggggtaacggcgggcatccaagtccaagtcgaaactatggcgacggtacaccgtatgaccacatgactagccgcgatcttggcagtcatgacaatctttcaccaccatttgttaattctaggatacagtccaaaacagagcgcggcagttacagttcgtacgggagggagagcaacctccagggatgtcaccagcagagcttacttgggggggacatggacatgggcaacccaggcacgctctctcccacgaaacctgggtcacagtactatcaatacagcagcaacaaccctcgccggcgccctttgcactctagtgcaatggaggtgcagaccaaaaaagtgcgaaaggtgcctcctgggctgccatcgtctgtgtatgccccttctgctagtacagcagattataacagggactcccccggctatccatcgtcaaaacctgcaacaagtactttcccgagcagcttctttatgcaggatgggcaccacagctccgatccatggtccagctcctcgggtatgaatcagcccggctacgccggaatgctgggcaattcttctcacatccctcagtcctcaagctattgtagcctccatcctcatgaacgcttatcctatccctcgcattctagtgccgatattaattccagcttacctcccatgtcgacgttccatcgatcaggaaccaaccattacagcacgagctcctgcaccccacccgcaaatggcaccgactcaatcatggcaaatcgcggcagcggcgctgccggaagcagccagacgggggacgcacttggcaaggctctagcaagcatctatagcccagaccacactaataactcctttagttctaacccatcgactccggtcggctctccgccctctctgagcgcaggcacagcggtgtggtcaagaaacggtggtcaggcctccagtagcccaaattacgagggacccctgcactcacttcagagcagaatcgaggaccggctggagcggctagacgatgctattcacgtgttaaggaatcacgctgttggacccagcacagcaatgcctggaggccacggggacatgcacggaataattgggccctcacataatggagctatgggaggcttagggtctggctatggtaccggtctgctgagtgcaaacagacattctctcatggtgggaacacaccgggaggatggggtcgccctccgcggttcacattcattattgccgaaccaggtgcccgtgccccagttgccggtgcagtcagccacgtcccctgaccttaacccccctcaggacccctaccgaggcatgcctccaggtctgcagggccagtccgtgagcagcggtagttccgaaatcaagtctgatgacgagggggacgaaaaccttcaagatactaagagctcagaagacaaaaaactagacgacgacaaaaaggacatcaagagcatcaccaggagcaggtcttccaataatgatgatgaggacctgacaccagaacagaaggccgaacgggaaaaggaacgccggatggcaaacaatgcccgggagagattacgcgtcagggatattaacgaagcctttaaggaattaggccgcatggttcagctgcacctgaagtccgataaaccccagacgaagctgcttatcctacaccaggccgtggctgtgatcctgtctctggaacagcaggtgagggagagaaacttaaatcctaaagcagcctgtttgaaacgacgtgaggaggaaaaggtaagcagcgaacccccacccctctctctagcaggtccacatccgggtatgggggatgcatccaaccatatgggccagatgtag

SEQ ID NO: 26736 - DNA, 1614 bp, synthetic construct
  misc_feature 1..1614: note = Description of Artificial Sequence: Synthetic coding sequence
  source 1..1614: mol_type = other DNA
atggacatgggcaaccccggcaccctgagccccaccaagcccggctctcagtactatcaatattcaagtaacaaccctaggagacgcccactgcactcatctgccatggaggtgcagacaaagaaggttcgaaaagtccccccagggctgccctccagcgtctatgctcccagtgcatccactgctgattataacagggactctcccggataccccagctcgaaacccgccacgtcaacctttccttcatctttttttatgcaagacgggcaccatagcagcgacccgtggtccagttcctctggaatgaaccagccaggatacgcgggcatgctggggaactcatcacatatccctcagtctagcagctactgcagcctgcatcctcacgaacgactgtcttatccttctcacagctctgccgatattaacagctccttgccccccatgagtactttccaccggtcgggaaccaaccattatagtactagtagctgtaccccacccgctaatgggacggattcaatcatggccaacagggggtccggtgcggctggaagttctcaaaccggggatgccttgggcaaggctctggcctccatctacagccctgatcatacaaacaattccttttcctcaaacccttctacccccgttggctcccccccatcgctgtcagccgggacagccgtttggtcccgcaacggcggacaggctagctccagtcccaactacgagggccctttgcacagccttcagtcccgtatcgaggataggttagagcgcctggacgacgcaatacatgtgttacgtaatcacgcagttggaccttcaactgcaatgcctggcggtcacggggacatgcatgggattatcggtccgagtcataatggcgcaatgggtgggctcggatcagggtacggcactggtttgctgagcgcaaatcgccattcactaatggtgggaacccatcgggaggatggggtagctttgcggggatcacactctctgctgcccaatcaggtgccggtgccgcagcttccagtgcagtcagctaccagcccagatctcaatcctccccaggatccctatagggggatgccacctggactccagggacagtctgtctcaagtgggtcctctgagatcaagtcggatgacgagggtgacgaaaaccttcaggatactaagtcctcagaggacaaaaagctggatgatgacaaaaaggatataaaatccatcacttctaataatgatgatgaggacctcaccccagagcagaaggcagaaagggagaaggaaagacggatggcaaataatgctagggaacgcctacgagtccgggatattaatgaggccttcaaagagctcggccgcatggtgcagctacatttaaagagtgataagcctcagactaaactcttaattctgcaccaggcggttgcagtaatcttgtctctcgagcagcaggtgcgtgagcgcaacctgaaccccaaggcggcctgcttgaagcgtagggaggaggagaaagtttccagcgagccaccccccctgtcacttgccggtccccatcccggtatgggcgacgcatcaaatcacatgggccagatgtag

SEQ ID NO: 26737 - DNA, 1932 bp, synthetic construct
  misc_feature 1..1932: note = Description of Artificial Sequence: Synthetic coding sequence
  source 1..1932: mol_type = other DNA
atgttcagcccccccgtgagcagcggcaagaacggccccaccagccttgcatccggacattttacggggagcaatgtggaagataggagttcttccgggagttggggcaacggcggtcaccctagtccgtcaagaaactacggcgatggcaccccttatgaccacatgacttcgcgggacttaggcagccacgacaatctctcccccccgtttgtgaatagtaggatccagtccaagactgagagagggtcatactcgagttatgggagagaatccaacctacagggatgccaccagcagtctctgttgggaggcgatatggacatgggcaatccaggaacactctctcccacgaaacccggatcccaatattaccagtactcgagcaataacccgcgccgcagaccattgcacagctcagctatggaggtacaaacaaagaaggtgcggaaggtacctcccggactgccttcctccgtgtatgctccatcggcgtccaccgcagattataatagggatagtcctggctacccaagttccaagcctgccacctccacattccccagctcatttttcatgcaggacgggcaccactccagcgacccgtggagctcaagctcaggtatgaaccagcctgggtacgcggggatgttaggtaatagttctcacataccgcagtcaagtagctattgttcactgcacccccacgagagactgtcctaccctagccatagttctgccgacatcaactcgtccctgcctcctatgtctacatttcacaggtcgggcacgaatcactactcaactagtagctgcactccccccgccaacgggacagactctatcatggccaaccgagggagcggggctgccggatcaagccagacaggggacgcgttaggcaaggctctggcctctatctactcacctgatcatacgaacaatagctttagctctaatccgagtactcccgtcggatcccctccgtcgctttctgccggcactgccgtctggagtcgaaacgggggtcaagctagtagttcacccaattatgagggtcctttgcattcacttcagagtcgcatcgaagacagacttgaaaggcttgacgacgcaatccatgtactcagaaatcatgccgtcggaccctcaacagccatgcctgggggacacggggacatgcacggtataataggacctagccataacggggcgatgggcggtttagggtcaggatacggcactgggctgctgtctgccaaccgccactctctgatggtgggaacacaccgtgaagacggggttgcgctgcgtggctcccattctctgcttccaaaccaggtcccggtcccccaactccccgtgcagtcggcaacctccccggacctcaacccaccccaggatccgtaccggggtatgccgcctggactgcaagggcagtctgtttcctcagggtcttctgagatcaagtcggacgatgaaggcgacgaaaacctgcaggacactaaatcttctgaagataaaaaactcgacgacgacaaaaaagatatcaagagcatcacaagtaataacgatgacgaggacctgaccccagaacagaaggccgagagagagaaagagaggcggatggctaacaacgctcgcgaaaggctcagagtgagagacattaacgaggcctttaaggaactcgggcgcatggtccagcttcacctgaagagcgataagccccagaccaagcttctgatcttgcaccaggccgtcgccgtaattctgtcgctggaacagcaagtgcgagagagaaacctaaaccccaaggcagcatgccttaaacggagagaggaggaaaaagtctcttccgagccccctcccctgtctctggcgggaccacatcccggcatgggagacgcaagtaaccacatgggacaaatgtag

SEQ ID NO: 26738 - DNA, 1878 bp, synthetic construct
  misc_feature 1..1878: note = Description of Artificial Sequence: Synthetic coding sequence
  source 1..1878: mol_type = other DNA
atggaggaggacagccgggacgtggaggaccggagcagcagcggcagctggggcaatggcggacaccctagtccgtccagaaattatggcgatggtacaccatacgatcatatgacgagcagggacctggggtctcacgataatcttagcccaccatttgttaactcgcgaattcaatctaaaaccgagcgcggctcttattcatcttatgggcgcgaaagcaacctccaaggatgccatcaacaaagtctgctaggaggagatatggacatgggaaacccagggaccctctcaccaaccaaaccgggatctcagtactaccaatatagtagtaacaaccctagaaggagacctctccatagctcagcgatggaggttcagaccaagaaggtacgcaaggtaccacccggattaccaagtagcgtctatgcaccctccgcaagtacagcggactataacagagattcacctggatatcctagctctaaacccgctacgtccacatttcccagcagtttcttcatgcaagatgggcaccactcatccgatccttggagcagttcctcgggtatgaaccagcctggctatgctggcatgctcgggaatagttctcatatcccgcaatccagctcctattgcagtttgcatccgcacgagcggttgagctatccttcccactctagcgccgacatcaattctagcctcccgcccatgtcaacatttcacaggtctggaactaatcattattcaacatcttcctgtacccctcctgctaatggaaccgacagtatcatggcgaatcgaggatcaggtgcagcaggaagctcccagactggtgacgctttggggaaggcccttgccagtatctattcgccggaccatacaaacaactcattcagctccaatccatctactcctgtggggagccccccaagcctatccgccggaaccgccgtgtggagtcggaatggtggacaggcctccagcagtcctaattacgagggaccattacattcattacagagtcgcatcgaggatcgtctggagcgattagatgacgcaatccacgttttgcggaaccacgccgtgggccctagtaccgctatgcccggaggccacggagacatgcatggcattattggccccagtcacaacggagccatgggcgggttggggagcggatacgggactggactgctgtctgccaatcgccattccctcatggtcggtacccatagggaggacggcgtcgcactcagagggagtcactccctgctcccgaatcaggttcccgttccacaattgccggtacagtctgcaacaagccccgaccttaacccaccccaggacccttacagagggatgccacccgggttgcagggccagtccgtctcatcaggtagctccgaaattaagagtgacgatgaaggcgacgagaatttacaggatacaaaaagcagcgaagataaaaaactcgatgacgataagaaagatatcaaatccatcaccagcaacaacgatgacgaggacttaactccagagcagaaagccgaacgtgaaaaagaacgtcggatggccaataatgcccgtgagaggcttagggtgcgcgacatcaatgaagcatttaaagaactgggccggatggtccagctacacctgaagtccgataagccccaaacaaaactactgatactgcatcaggccgtagcagtgattctgtcacttgagcaacaggtgcgagagcggaatttaaacccaaaagctgcctgcctgaagaggagggaggaggagaaggtgtcatctgagccacccccgctgtcactagccggcccccatcccggtatgggtgatgcaagcaaccacatgggtcagatgtag

SEQ ID NO: 26739 - DNA, 1803 bp, synthetic construct
  misc_feature 1..1803: note = Description of Artificial Sequence: Synthetic coding sequence
  source 1..1803: mol_type = other DNA
atgaaggacatcttcttccagttcatcatcgcccgggtgcggaagtgctatagtctaagctgcttacacacccttcctgtggtgccaacgttgcggaaaaccgagcgtgggtcatacagctcctacggccgagagagtaacctccaagggtgccaccagtcattgttgggtggtgatatggatatggggaaccccggaacactctcgccaacgaagcccggatctcagtattaccagtactcttctaacaatccgcgacgtcggcccctgcattcctccgctatggaggtacaaacaaagaaagtcagaaaggtccccccgggcctgccctcatctgtctacgccccttcagcatctacagcggattacaatagagactctcctggctatcctagctctaagcccgccacatctaccttccccagcagctttttcatgcaagacggccatcactcctcagacccttggagttctagctctgggatgaatcaacccggatatgcaggaatgcttggaaacagtagtcatattccccagtcttcctcgtattgtagccttcacccgcatgagcggctgtcgtaccccagccatagtagcgccgatatcaattcatcactgccaccaatgtcaacttttcacaggagtgggacaaatcactattccacaagcagttgcacccctccggcaaacggcaccgactccataatggctaacagaggctccggagctgcgggatcctcgcagacgggagatgccttaggaaaagccctagccagcatctactccccagatcacactaataatagcttttcgagtaacccatcaaccccagtgggttctccaccatctctgtcagcaggcaccgccgtgtggtccagaaatgggggccaggcttcaagcagtcctaactacgagggacccctgcacagccttcagtcccgcatcgaagaccgtctcgaaagactagacgacgccatccatgtgctgcgcaatcatgctgtcggcccgtcaacagcgatgcctggggggcatggagacatgcatggcataatcggtccttcacacaacggggctatgggtggattgggctccggttacggtacaggtctgctgtctgccaatcggcactcacttatggtgggcactcaccgggaagacggcgtggccctacgtgggtcccactccttgctgccaaatcaagtacccgtgccacagctgcctgtccagtcagcgacatccccagatctcaaccccccccaggatccctatcgaggcatgccccctgggctgcaaggtcagagtgtgtcctcggggtcatccgagatcaagtcagatgatgaaggggatgaaaatcttcaagacactaagtcttccgaagacaagaagctggacgacgataagaaggatattaagagcatcactagaagtcgtagtagcaataacgacgacgaggacctgactcccgagcagaaggcggaacgtgaaaaggaaaggaggatggccaataacgcaagggagcgacttcgtgtgcgggatattaacgaggcttttaaggagctgggacgcatggtgcagctgcatctcaaatccgataagccacagacgaagctgcttatcctgcatcaggccgtagcagtcatcttgagcctggaacagcaggtcagggagagaaatctgaatcccaaggcggcctgcctgaagagacgtgaggaggagaaagtcagttccgagccaccacccctgagcttggccggtccccaccctggaatgggtgatgcaagtaatcacatgggacagatgtag

SEQ ID NO: 26740 - DNA, 1233 bp, synthetic construct
  misc_feature 1..1233: note = Description of Artificial Sequence: Synthetic coding sequence
  source 1..1233: mol_type = other DNA
atggccaaggacgccggcctgatcgaggccaacggcgagctgaaggtattcattgaccagaatctcagcccagggaaaggcgtggtgtctctggtcgccgttcatccatcaaccgtgaatcctctggggaagcagctcctacccaagacatttggccaatcaaatgtcaacatcgctcaacaagtggttataggaactccacaaaggccagcagcctcgaacacgctagttgtgggtagcccacacacaccaagcacacacttcgccagccaaaatcagcctagtgatagtagcccctggtctgccggcaaaagaaatagaaagggtgaaaagaatggaaaaggactgcggcatttctccatgaaggtctgtgagaaagtccagcgcaaggggacaacatcctacaatgaggtggctgatgagctggtggctgagtttagtgccgcagataaccacatattgcccaacgagtccgcatacgaccagaagaatatccggcgaagagtgtacgacgcattgaacgtcctaatggcaatgaatataatatctaaggagaaaaaagagatcaagtggattggcttgccaacgaattcagcccaggagtgtcagaacctcgaggtggaacggcagcgacggctcgaacgtataaagcagaaacaaagtcagctgcaggagctgatacttcagcagatcgcgttcaaaaatcttgtgcagagaaacaggcacgctgagcagcaggccagtcggccgccacctccaaattctgttattcacttgccctttattatcgtgaacacatctaagaaaaccgtgattgactgttctatcagcaatgataagttcgaatacctttttaatttcgataatacattcgagattcatgacgatattgaggtcctcaagagaatgggtatggcctgcggtcttgagagcggatcatgctcggctgaagacctgaagatggcacggtccctggtgcctaaggccctggagccgtacgtcaccgaaatggcccaggggaccgtgggcggggtttttatcacaacagccggatcaacatcaaacggcactcgcttcagcgccagcgaccttactaatggggcagacggcatgctagccaccagctccaacgggagtcagtattccggcagtcgggtggagacacccgttagttatgtgggggaagacgacgaagaagatgatgattttaacgaaaatgacgaggacgactag

SEQ ID NO: 26741 - DNA, 711 bp, synthetic construct
  misc_feature 1..711: note = Description of Artificial Sequence: Synthetic coding sequence
  source 1..711: mol_type = other DNA
atggccaaggacgccggcctgatcgaggccaacggcgagctgaaggtgttcatcgatcagaatttgagcccaggaaaaggagtggtcagcctggtggcagtgcaccctagcaccgttaacccgttagggaaacagctgttaccaaagaccttcggccagagcaatgtcaatatcgcgcagcaggtcgttattggcacaccccagcgacccgccgcatcaaatactctggtggttgggtcccctcacactccgagcactcacttcgcctcccaaaaccaacccagcgactctagcccctggagcgcaggtaaacgcaatagaaaaggcgaaaagaatggaaaaggactgcggcactttagtatgaaagtctgcgagaaggtacagcgcaaaggcaccaccagttacaatgaagtagccgatgaactggttgccgagttctcagctgcggataatcatatcctgccaaatgaaagcgcatacgatcagaaaaatatccgccgcagggtttacgatgcattgaatgttctgatggctatgaacatcatctcaaaggaaaagaaggagatcaaatggatcggactgcctaccaacagcgcacaggagtgtcaaaacttggaagtggagcggcagcgccgacttgagcgaataaagcaaaaacagagtcagctgcaggagctgatactgcagcagatcgctttcaaaaatctttag

SEQ ID NO: 26742 - DNA, 480 bp, synthetic construct
  misc_feature 1..480: note = Description of Artificial Sequence: Synthetic coding sequence
  source 1..480: mol_type = other DNA
atggccaaggacgccggcctgatcgaggccaacggcgagctgaaggtcttcatcgaccagaatctttcacccgggaagggagtagtgagcttggtggcggtacacccctccaccgtgaatccacttggaaaacagctgctccctaagacctttgggcagagtaatgtcaacatcgctcagcaagtcgtaattgggactccgcagagacctgcagcctcgaacaccctggtcgtggggagtccccacacgccttctactcacttcgcaagtcagaatcagcccagtgatagtagcccttggagtgctgggaagcgcaatcggaaaggcgaaaagaacggcaaggggctacggcacttttccatgaaggtttgcgagaaagtgcagagaaaggggacaacatcctacaacgaagtggccgacgaactggtcgcggagtttagcgctgccgacaatcacattctcccgaatgagagcgtctag

SEQ ID NO: 26743 - DNA, 936 bp, synthetic construct
  misc_feature 1..936: note = Description of Artificial Sequence: Synthetic coding sequence
  source 1..936: mol_type = other DNA
atgagcaccctgcccagcaagtggaagcggaaccggaagggcgagaagaatggcaagggccttagacattttagcatgaaggtgtgtgagaaagtacaacggaagggcactacgagttacaacgaggtggccgacgaactggttgccgaattctcagcagccgacaaccacatcctccctaatgaatccgcctacgatcagaaaaacattagaaggcgggtctatgacgctctcaatgtcctgatggccatgaacatcatatcaaaagagaagaaagagatcaaatggattggacttcctaccaactctgcccaggagtgtcagaaccttgaggtggagaggcagcgaagattagagagaatcaaacagaagcagagccagctccaggagttgattctgcagcagattgcttttaagaacctcgtgcaacgcaatcgccatgccgagcaacaggcatccaggccaccgccccccaatagtgtgattcatctgcccttcatcatcgtgaataccagtaagaagacagtgatagattgttccattagtaacgacaagttcgaatatctgtttaatttcgataatacattcgagattcatgatgatatcgaggtgctcaagcggatggggatggcctgtggacttgagagtggtagttgctcggccgaagatttgaagatggcccgatccctggtacctaaggctctggaaccgtatgtcaccgaaatggcacaagggaccgtgggcggggtgttcatcactaccgccggcagcacaagcaatggcacttccgacctgacaaacggtgcagacggtatgctggccacatcctcaaacggcagtcagtattctgggagccgggtagagacgcctgtctcctacgttggagaagatgatgaggaggacgacgatttcaacgaaaacgacgaagatgattag

SEQ ID NO: 26744 - DNA, 1146 bp, synthetic construct
  misc_feature 1..1146: note = Description of Artificial Sequence: Synthetic coding sequence
  source 1..1146: mol_type = other DNA
atgagcaccctgcccagcaagtggaagcggaaccggaagggcgagaaaaatggcaagggattgcgacacttcagcatgaaggtgtgcgagaaggtgcagcggaagggcacgaccagctacaacgaggtggccgacgagctggttgccgaattcagcgccgcagataatcatatcctcccaaacgaaagcgcttacgatcagaagaacatccgtcgccgggtctacgatgctctcaatgtgctgatggctatgaacataatttccaaagagaaaaaggaaatcaagtggattgggctaccgactaatagcgcccaggagtgccagaatcttgaggtcgagcggcagcgcaggctggagcgaatcaaacagaagcaatcccaactccaagaactgatcctacagcagattgcttttaagaacctggttcagcggaaccggcatgctgagcagcaggcatcacgaccccctcctcccaactcagttattcacttgccattcatcatcgtgaacactagtaaaaaaaccgtgatcgactgcagcataagcaatgacaagttcgagtacttgtttaattttgacaatacttttgagatccacgatgatatcgaagtcctgaaaagaatgggaatggcctgtggtctggagtcaggcagctgctctgccgaggacctgaaaatggctagaagtcttgtcccaaaggccttggaaccttatgtcactgagaagactggattgtgcgactgtaccgctggctgtcctgctccctggaggtcagtcgaaaacactgggcaagcaaaagatatccgaaaactgcttcaaccctccgtgctgtggaactgcgctagtttttgctggctcccggtccggttggtcctatttctgtttcatgatcattctctgattttctttccattctcagagatggcacagggcacagtggggggagtatttatcaccacagcaggctctacatcaaacgggacacggttcagcgcctcggatctgaccaacggagccgacgggatgcttgccacatcttctaacggcagtcagtatagtggcagcagagtggaaacacctgttagctatgtcggcgaagacgatgaagaagatgacgatttcaacgaaaacgacgaagatgattag

SEQ ID NO: 26745 - DNA, 1161 bp, synthetic construct
  misc_feature 1..1161: note = Description of Artificial Sequence: Synthetic coding sequence
  source 1..1161: mol_type = other DNA
atgatcatcagcaccccccagcggctgaccagcagcggcagcgtgctcataggaagcccctatacaccagccccagctatggtgacacagacccatattgcagaggcaacggggtgggtaccaggcgacagaaaacgcgctcgtaaattcattgattccgacttctctgaaagtaagagatcaaagaagggggacaagaatgggaagggcctcagacacttctccatgaaagtctgcgagaaggtgcaacggaaagggaccactagttacaacgaggttgcggacgagttggtgtctgaattcacaaattctaacaaccatttggcagccgattcccaggcctatgaccagaagaacattcggagaagggtctacgacgccttgaatgtgctcatggctatgaacatcatttctaaggaaaagaaggaaattaaatggattggacttcctactaactccgcacaggaatgtcagaatttggagattgagaagcagaggcgaattgagcggataaagcagaaacgggcccaactccaggagctgctccttcaacagattgcatttaagaacctcgtgcagcgcaacaggcaaaatgagcagcaaaaccagggtccaccagcattgaattccacaatccagctgcccttcattatcatcaatacgtctcgcaagacagttatagactgctccatctcatcagacaagttcgagtacctttttaattttgacaacacgttcgaaatccacgatgacattgaagtactgaagcggatggggatgtcgtttgggctggagtccggaaaatgcagcctggaggacttaaagttggcaaagtctctggtgccgaaagctctagagggttacattactgacatttccacgggtccctcctggctgaatcaggggctcctcctgaactccactcagagcgtctctaatctggatctgaccactggcgctacacttccacaatcttccgtcaaccagggcctgtgcctcgatgcagaggtcgctttggccaccggccaattcttagccccgaatagccaccaaagctcctcagcagccagccactgctctgaaagcaggggcgaaacaccctgctctttcaatgacgaggacgaagaggatgacgaagaggattcgtctagccccgagtag

SEQ ID NO: 26746 - DNA, 1113 bp, synthetic construct
  misc_feature 1..1113: note = Description of Artificial Sequence: Synthetic coding sequence
  source 1..1113: mol_type = other DNA
atgatcatcagcaccccccagcggctgaccagcagcggcagcgtgctgattggaagtccatatacaccagcgcccgctatggtgacacaaacccacatcgccgaggccacgggctgggtcccaggcaaaaggagcaaaaagggagacaagaacggcaaaggtcttcggcacttctccatgaaagtatgcgaaaaagtccagcgaaaaggtaccacaagctacaacgaggtggctgatgagctcgtaagtgagtttaccaattctaataaccacttggcggccgattcccaagcctacgaccagaagaacattagaagaagggtgtacgacgcattaaatgttctgatggcgatgaatatcataagtaaggagaaaaaagaaatcaagtggatcggcttgcccaccaacagcgcccaggagtgtcagaacctggagatcgaaaaacagcgtcggatcgaacgtatcaagcaaaagcgggcccaattgcaggagctgttactgcagcaaattgcatttaagaacctcgtgcagagaaatcgacagaacgaacagcagaatcaagggcctccggccctgaatagtacaatccagcttccctttattattataaatacctccagaaagaccgtgatagactgctcaatctcctctgataagtttgaatacctgttcaatttcgacaacacattcgagatccacgatgatatcgaagtgctgaagagaatgggtatgtcattcgggcttgaatctggcaaatgctcactcgaggacctgaaactggccaagtctcttgtgcctaaggctctggaggggtatatcacagacatatcaaccggaccaagctggttaaaccaaggattgcttttaaattctacacaaagcgtctccaatcttgacctgactacgggagctaccctgcctcagtcgagtgtcaaccaggggctctgtctagacgccgaggtggccctggctacaggccagttcctcgcacccaattcgcaccaatcctcatcagccgcaagccactgttccgaatcacgcggcgaaacaccttgttcattcaatgacgaagacgaagaagacgatgaagaggattcttcatcacctgaatag

SEQ ID NO: 26747 - DNA, 1257 bp, synthetic construct
  misc_feature 1..1257: note = Description of Artificial Sequence: Synthetic coding sequence
  source 1..1257: mol_type = other DNA
atgcagcccgagggcatcatcttcgaggccgagaacaagcccagcccaggcaccgaatcagcaggcacctttatcctcgaccttagcgcaacgagccggaccattatctcaactcctcagcgattgacttcctcaggcagtgttctcatcggtagcccttacacccctgcgccggcgatggtgacccagacccacattgccgaagctactggttgggttccgggcgatagaaagagggcccgtaagttcatcgattccgatttctcagaatccaagagatccaagaagggagacaagaatgggaaaggcctccgacacttctcaatgaaagtatgtgaaaaagtccagagaaaaggaaccacctcctacaatgaagtggcagatgaactcgtttcagagtttactaactctaacaaccacctggcggctgattcggcttacgaccaaaaaaacatccgccgtagggtgtacgatgccttgaatgtacttatggcgatgaatatcatcagcaaggaaaaaaaggagattaagtggatcggactgccaaccaatagcgcgcaggaatgccagaatctcgagatcgagaagcagcgcagaatcgaacgaattaaacagaaaagggcgcagctgcaggaactgcttctgcagcaaatcgcttttaaaaacctcgtccaacggaatcgccagaatgagcagcagaaccagggacctccggccttgaacagtaccatacagctccccttcatcatcataaatacaagccgtaaaaccgtgattgattgctccatttcatcagacaagttcgagtatctatttaacttcgacaacacttttgagatacatgatgatattgaagttttaaagcgcatgggaatgtctttcggactggagtctgggaaatgctcactggaggatttaaaactggcgaaatccctggtacccaaggcgctagagggctatataaccgacatctccacaggcccgagttggttaaaccagggcctactattgaattcaacccaaagcgtgagtaatctggatctcacaactggcgctactctaccccaatcaagcgttaatcaggggctgtgtttagacgctgaagtagcccttgctactgggcagttccttgctcctaattcccatcagtcaagctctgccgctagccactgttctgagtcgagaggcgaaaccccgtgctcattcaatgacgaggatgaggaggatgatgaagaagactccagttcccccgagtag

SEQ ID NO: 26748 - DNA, 1161 bp, synthetic construct
  misc_feature 1..1161: note = Description of Artificial Sequence: Synthetic coding sequence
  source 1..1161: mol_type = other DNA
atgatcatcagcaccccccagcggctgaccagcagcggcagcgtgctgattggctcaccttacacacctgccccggctatggtcacgcagacccatatagcagaagcaacaggatgggtccccggtgatcgcaagcgagcccggaaattcatcgatagcgatttttctgagtccaagcgatctaagaaaggcgataagaacgggaaaggtctcagacactttagtatgaaggtgtgcgagaaggtgcagaggaagggcacaactagctacaatgaagtggccgacgaactagtttccgaattcacaaatagtaacaaccacttggcagcagatagtcaagcatacgatcagaagaacattaggcggagggtgtatgatgccctgaacgtgcttatggcgatgaatatcatctcaaaggagaaaaaagaaattaaatggatcggattgcccaccaacagcgcccaggaatgtcagaacctcgagatcgaaaagcagcgccgcattgaaaggatcaagcaaaagagagcccaacttcaagaactgttactgcagcagatcgccttcaagaacttggtacagcggaatcggcagaacgagcaacagaatcagggccctcctgcattgaactcaacaattcagcttcctttcatcattattaacacctctcggaagaccgttatcgactgttcaatcagctcggataaatttgagtatcttttcaacttcgacaataccttcgagatccatgatgacatcgaggtgctgaaacgcatgggtatgagtttcggcctcgaatcaggcaagtgctcgctcgaggatctcaaattggccaaatcacttgtacctaaggctctcgaaggttatattaccgatatctctaccggacctagttggttgaatcaggggttactcctaaactcgacccaaagcgtgtctaaccttgacctgactacgggggccacactcccccaaagctccgtaaaccagggcctgtgcttggatgccgaagtcgccctagccaccggccagtttctggcccccaatagccatcagtcgagttctgccgccagtcattgctcggaatcacgcggggagacaccatgcagctttaacgacgaagatgaggaggatgacgaagaagattcttctagtccagaatag

SEQ ID NO: 26749 - DNA, 261 bp, synthetic construct
  misc_feature 1..261: note = Description of Artificial Sequence: Synthetic coding sequence
  source 1..261: mol_type = other DNA
atgaccgccaagaacgtgggcctgaccagcaccaacgccgaggtgagaggtttcatcgaccagaatctgagcccgactaagggtaatataagttttgttgcattccctgtctccaacacaaactcacccaccaagatattgcctaagacactcggccctataaatgtcaacgtagggccccaaatgatcatttctacacctcagagattgacctcaagtgggtctgtactgattgggtctccgtataccccagccccctag

SEQ ID NO: 26750 - DNA, 141 bp, synthetic construct
  misc_feature 1..141: note = Description of Artificial Sequence: Synthetic coding sequence
  source 1..141: mol_type = other DNA
atgatcatcagcaccccccagcggctgaccagcagcggcagcgtgctgattggctctccatacacaccagctcccgccatggtgactcagactcacatcgccgaggccactggttgggtgccaggtgataggaaacggtag

SEQ ID NO: 26751 - DNA, 1158 bp, synthetic construct
  misc_feature 1..1158: note = Description of Artificial Sequence: Synthetic coding sequence
  source 1..1158: mol_type = other DNA
atgatcatcagcaccccccagcggctgaccagcagcggcagcgtgctgatagggagcccctatactccagcaccggctatggtaacccagacacacatcgctgaggctaccggctgggtaccgggtgatcggaagcgagctagaaaattcatcgattccgactttagcgaatccaagcgaagcaaaaaaggtgacaaaaatggaaaggggttgcgccacttcagcatgaaggtctgtgaaaaggtccagcgcaagggtacaaccagttataatgaggttgccgatgaactggtcagtgaattcacaaactctaataatcacctggccgcagattccgcctacgatcagaagaatattaggcgaagggtttacgacgcactcaacgtgctcatggccatgaatattattagtaaagagaagaaagaaataaaatggataggactccccacgaactccgcacaggagtgccagaacctggagatcgagaagcagagacggattgaacgcattaagcagaaacgcgcccagcttcaggagcttctgctgcagcagattgcctttaaaaacctggtgcaacggaacaggcagaacgaacagcagaaccagggaccacccgccttgaattctacaatacagctgccattcattattattaataccagtcggaaaaccgttattgattgctctatttcaagtgataaattcgagtatctcttcaatttcgataatacttttgagatccacgacgatatcgaggtgctgaagcgcatgggcatgagtttcggactcgagtccgggaaatgctcattagaagatctgaaactggcaaagtccctggtaccaaaagcccttgagggttacatcactgatatctccacaggaccttcttggttgaatcagggccttctccttaattcgacccagtcagtctccaacctggatctgacaactggcgcaacactgccgcaatcatccgtcaatcagggcctttgcttagatgccgaagtagccctggcaacagggcagttcctcgccccaaattcacatcaaagctccagcgctgcatctcactgctccgagagtcgcggagaaacaccctgctccttcaacgacgaggatgaagaggacgacgaagaggattcctcttcacccgagtag

SEQ ID NO: 26752 - DNA, 270 bp, synthetic construct
  misc_feature 1..270: note = Description of Artificial Sequence: Synthetic coding sequence
  source 1..270: mol_type = other DNA
atgatcatcagcaccccccagcggctgaccagcagcggcagcgtgcttatcggctccccctacactccagcgccagcaatggtgactcagacccacatagccgaggccaccgggtgggtaccaggggatagaaagcgagctcggaaatttatcgactcggatttttctgagagcaaaaggtctaagaagggtgacaagaatggaaaaggactgagacacttctctatgaaggtctgcgaaaaagtacagaggaaaggtaccacatcgtag

SEQ ID NO: 26753 - DNA, 1341 bp, synthetic construct
  misc_feature 1..1341: note = Description of Artificial Sequence: Synthetic coding sequence
  source 1..1341: mol_type = other DNA
atgaccgccaagaacgtgggcctgaccagcaccaacgccgaggtgcggggattcatcgatcagaatctgagccctaccaaagggaacatctctttcgtagctttccctgtttccaacacaaattctccaactaagattctgcccaaaacactgggtcccattaacgtcaatgtgggccctcagatgattattagtaccccacagcgactgacgtcctccggctccgtcctgatcggctcaccctacacaccagctcccgccatggtaacccagacacacatcgcggaggcaacaggatgggtgcctggcgatcgtaagagggcgcgcaagttcatagatagcgatttcagtgagtccaagcgttcaaagaaaggggataaaaatggtaagggtctgcggcacttctcgatgaaggtgtgcgagaaggtccagaggaagggaaccacttcttataatgaagttgctgatgaattggtctctgagttcaccaacagtaacaaccacctcgcagccgacagtgcctatgatcagaagaacattcgcaggagggtgtacgacgccctgaatgtactcatggcaatgaatatcatctctaaagagaaaaaggaaatcaagtggatcggcttacccacaaattcagctcaagagtgtcaaaaccttgaaattgaaaaacagcgccgaatcgagcgcattaaacagaagagggctcagctgcaggagttgctccttcaacagatcgcctttaagaacctggtgcagcgcaaccgccagaatgaacagcagaatcaaggccctcctgcgcttaactcaaccattcagttaccctttattattataaacactagtagaaagacagttatcgactgttccattagctctgataaattcgagtacctgttcaacttcgacaatacgtttgaaatccacgatgatattgaggtcctgaagcgcatggggatgagttttggcttagagagtggaaagtgttcactggaggatctcaaactggcgaagtccctggttccaaaggcgttggaggggtacatcacagacatatccaccgggccaagttggctcaatcagggtctgctcctgaatagcacccagtcagtcagtaacctggatctcacaactggggctactctccctcagtcctcggtgaaccagggactctgcctcgacgccgaagttgccctcgccacaggccaattcctggcccccaattcacaccagtcatcttctgcagcctcgcattgctctgaaagccgcggcgagactccctgtagtttcaatgacgaggacgaggaggacgatgaagaggattcaagctccccagaatag

SEQ ID NO: 26754 - DNA, 84 bp, synthetic construct
  misc_feature 1..84: note = Description of Artificial Sequence: Synthetic coding sequence
  source 1..84: mol_type = other DNA
atgatcatcagcaccccccagcggctgaccagcagcggcagcgtgctgataggtagcccctacactccagcacccgctatgtag

SEQ ID NO: 26755 - DNA, 1050 bp, synthetic construct
  misc_feature 1..1050: note = Description of Artificial Sequence: Synthetic coding sequence
  source 1..1050: mol_type = other DNA
atgctggaccccaagtgcgaccggaagcgggcccggaagttcatcgacagcgacttttccgagagcaagagaagcaagaagggcgacaagaatggcaaggggcttcggcacttctcaatgaaagtgtgtgagaaggtgcagcggaagggcaccacaagctataacgaggtcgccgacgaactggtgagtgagttcacgaatagcaataaccatttggcagcagactccgcatacgatcaaaaaaacatccggagacgtgtgtacgatgcactgaacgttttaatggccatgaacatcatttcaaaggaaaagaaggagattaagtggatcggacttcccactaactctgcccaggaatgccaaaacctcgagatcgagaagcagcgcaggattgaaagaattaaacagaagagagcccagctgcaagagttgcttctacagcagatagcttttaagaacttggttcagcgcaaccgtcagaacgagcaacaaaaccagggacctcccgccctaaattccaccattcagcttcccttcattattattaatacctctagaaagacagtgatcgattgctccataagctccgataagttcgaatatctctttaatttcgacaacacctttgagattcacgatgacatcgaagttctgaaaagaatgggtatgtctttcgggctggaaagcgggaaatgcagcctggaggatttgaagctggctaagtctctcgttccgaaagctcttgaggggtatatcacagacatcagtactgggccaagttggttgaatcaggggcttctcctaaatagtacccagagtgtctcaaacttagatctaactacaggcgcgactctgccccagagctctgtcaaccaggggttgtgtttggatgcggaagtagctctggccaccggtcagtttctggctcccaatagccaccagagttcgtctgctgcatcccattgttccgaaagccgaggtgagacaccttgttcttttaacgacgaagacgaggaagacgatgaggaagacagctcatcgcccgaatag

SEQ ID NO: 26756 - DNA, 663 bp, synthetic construct
  misc_feature 1..663: note = Description of Artificial Sequence: Synthetic coding sequence
  source 1..663: mol_type = other DNA
atgatcatcagcaccccccagcggctgaccagcagcggcagcgtgctcatcggatccccttacacgcctgctcctgccatggtgactcaaactcacatcgccgaggccaccggatgggtccccggagatagaaaacgcgctcgcaagttcatcgacagcgatttctcagagagcaagcgttccaagaagggcgacaaaaacgggaaagggttgaggcactttagcatgaaagtttgcgaaaaggtgcagcgtaaaggcaccacgtcctacaatgaggtggcagatgagctcgtgagtgaatttaccaattctaataaccacctggccgctgattctgcatacgaccagaagaatatcagacggcgagtgtacgacgctttaaatgtattgatggccatgaatataatctcgaaagagaagaaggagattaagtggatagggctccccactaacagtgctcaggaatgtcagaatctggagatcgagaaacagcgacgcatcgagaggattaaacaaaagcgcgcccagctgcaagagcttctgcttcaacagattgcattcaaaaatctggtgcagaggaatcgccagaacgagcagcaaaatcaggggccacctgccctcaatagcacaatccagttgcccttcataatcatcaacacctag

SEQ ID NO: 26757 - DNA, 1161 bp, synthetic construct
  misc_feature 1..1161: note = Description of Artificial Sequence: Synthetic coding sequence
  source 1..1161: mol_type = other DNA
atgatcatcagcaccccccagcggctgaccagcagcggcagcgtgcttattgggtcaccttatacccctgcacctgctatggtaacccaaactcacattgccgaggcgaccggctgggtgcccggtgatcgcaagagagcccgaaagttcatcgactccgatttctctgagagcaagaggtctaagaagggtgataaaaacggtaagggcttacgacattttagcatgaaagtttgtgagaaagtgcagcggaagggaaccacatcatataatgaagttgctgatgaactggtctccgaatttacaaactccaacaatcatttagccgcagatagccaggcgtatgatcagaagaatatccgcagaagagtgtacgacgcactgaacgtgttgatggctatgaatatcatatcaaaagagaaaaaagaaatcaaatggatcggactgccgactaattcagcccaggaatgccagaatcttgaaattgaaaaacagcggaggattgagcggatcaaacagaagagagcacagctgcaggaactgctgctccagcagatcgcctttaagaacctagtgcaaagaaaccggcagaatgagcaacaaaaccagggccctccagctctgaattctaccatccagctgccctttataattattaatacttctcgaaagacagtgatagattgcagtatcagtagtgataagttcgagtatctgttcaacttcgataatacatttgagattcacgatgacattgaggtacttaagcgaatgggcatgagcttcggcctggagtcagggaagtgtagccttgaggaccttaagcttgccaagagtttagtcccaaaggccttggagggctacattacggacattagcaccggaccctcgtggcttaaccagggactgctcctcaattccacgcagagtgtgtccaatttggacctgactacaggcgcaacactgccccagtcatctgtcaaccagggcctttgtctcgatgctgaagtggctctggctactgggcagttcctggctcccaacagtcaccagtcatcctccgctgcctcccactgctccgaatcaaggggagagaccccctgctctttcaacgatgaagacgaggaggatgacgaagaggattcttccagccctgaatag

SEQ ID NO: 26758 - DNA, 933 bp, synthetic construct
  misc_feature 1..933: note = Description of Artificial Sequence: Synthetic coding sequence
  source 1..933: mol_type = other DNA
atgaaggtgtgcgagaaggtgcagcggaagggcaccaccagctacaatgaggtggctgacgaattggttagtgaatttactaatagcaacaatcacttggcagcggatagcgcctatgaccagaagaatattcggaggagggtgtatgatgctttgaatgttctcatggcaatgaacataatttcgaaggaaaagaaggagataaagtggattggcttgccgactaattccgcacaggaatgccagaacctggagattgagaagcagagacgcatcgaaaggatcaagcagaaacgcgctcagcttcaggaattgctgttgcagcagatcgcttttaaaaatctagtccagcgcaaccggcagaatgagcagcagaaccagggccctccagccctgaattccacgatccagttaccctttatcattattaatacgtcccggaagaccgtgatagattgctccatctcatcggacaagtttgagtacttgttcaacttcgataacactttcgagattcacgacgacatcgaggtacttaagcgcatgggtatgtctttcggacttgagagtggaaagtgcagtttggaggatcttaagcttgccaaatcgcttgtgcccaaggccctagagggctacatcaccgatatctccaccggcccttcctggctcaatcaaggactgctcctgaattccactcaaagcgtgtcaaatctcgatctgactactggcgccactctgccacagtccagtgtgaaccaagggctatgcttggacgcagaagtggctcttgctacgggccagttcctggcgcccaattcccaccagtcatcgagtgccgccagccactgttctgagagcagaggggagacaccctgctcttttaacgatgaagacgaggaggacgacgaagaggattccagcagtccagagtag

SEQ ID NO: 26759 - DNA, 1335 bp, synthetic construct
  misc_feature 1..1335: note = Description of Artificial Sequence: Synthetic coding sequence
  source 1..1335: mol_type = other DNA
atgccccggagcggcgcccccaaggagcggcccgccgagcccctgacaccacccccctcttatggccatcagccccagacaggtagtggggagagctcgggggcttcaggcgacaaggaccacttgtacagtacagtctgcaagcctcgttcaccgaagccagctgctccagcagcccctcctttttcttcctcgtcgggagtcctgggcaccgggctctgtgagctggacaggctcctccaggaactgaatgccacgcagtttaacatcaccgacgaaatcatgagccagttccctagttctaaggttgccagcggcgaacagaaggaggaccaatctgaagataaaaagagacccagcctcccttcttctccctctccaggcttgccgaaagcctctgctacctctgcaaccttagagctcgacaggctgatggccagcctctccgatttcagagtgcagaaccatctgcccgccagcggacctacccagccaccagtggtgtcgagcactaacgaaggcagcccatcacctccggaacccaccggtaaaggttcactcgacaccatgctgggactactccaatccgatttgagtcggcgcggtgtacccactcaggccaaaggcctatgcggaagctgcaacaagcctatcgcggggcaggtagtgaccgccctgggcagggcttggcacccggagcatttcgtttgcggcggctgctccaccgctttaggggggagctctttcttcgaaaaggatggcgccccattctgtccagaatgctactttgagcgatttagtccccgatgtggcttttgtaaccagcctattcgccacaagatggtgaccgccctcggaacacattggcaccctgagcatttttgttgtgtgtcctgtggtgagccatttggagatgagggtttccatgaaagagaggggaggccctactgccgccgggatttcctgcagctgttcgcgccaagatgtcagggatgccaaggaccaattctcgataattacatttcagcactctctgcgttatggcaccctgattgtttcgtctgccgtgagtgttttgcacctttctccgggggaagcttttttgagcatgaaggccgcccgctctgcgaaaatcatttccatgctcgacgtgggtcactctgtgctacctgtgggttgccggtcaccggccgctgcgtcagcgcattgggaaggaggttccacccagaccacttcacgtgcaccttttgtctacgtcctctaactaaaggtagcttccaggaacgcgcaggcaagccctactgccagccttgtttcctgaagctttttgggtag

SEQ ID NO: 26760 - DNA, 1335 bp, synthetic construct
  misc_feature 1..1335: note = Description of Artificial Sequence: Synthetic coding sequence
  source 1..1335: mol_type = other DNA
atgccccggagcggcgcccccaaggagcggcccgccgagcccctgacaccacccccgagttatggacaccaaccacaaacaggatcaggagagtcaagcggggctagcggcgacaaggatcacctgtactcaaccgtgtgtaagcctcgtagtcccaaacctgcggccccagccgcccccccatttagttcgagttctggcgtcctcgggaccgggctctgcgaacttgaccgactgctgcaagagctcaatgcaacacagttcaatattacagatgaaatcatgagtcagtttccctctagcaaagtcgcctctggggaacagaaagaggatcaaagcgaagataaaaagcgaccctctctgccatcatctcccagtccaggcctgccaaaggcttccgctacatctgccaccttagaacttgacaggctgatggcaagtctttctgattttagagtgcagaaccacctgcccgccagtggacctacccagccccccgtcgtgagcagtacgaacgagggaagcccctctccacccgagcctaccgggaaagggtcactagatactatgctcggcctgctacagagtgacctgtcacgacgcggggtgcccacacaggccaaggggttgtgcggatcgtgtaacaagccgatcgcagggcaggtggtaactgccttggggagagcctggcatccagaacattttgtgtgcggcgggtgcagcactgcacttggaggctctagcttttttgaaaaggacggcgcacccttctgtcctgaatgttattttgaacgctttagtccaaggtgcggcttttgtaaccagcccattagacacaagatggttacagctcttggaacacattggcatcctgaacacttctgctgcgtgagttgcggagagcctttcggggacgagggcttccatgaaagagaggggagaccctactgtaggagggatttcctgcaactgttcgcacccagatgccaggggtgtcagggaccaatcctggacaactatatctctgctctatccgcattgtggcatccagactgttttgtttgcagagagtgttttgccccattttccgggggaagcttttttgagcacgagggcagacctctttgcgaaaatcattttcatgcacgaaggggaagcctctgcgcaacctgcgggctccccgtgactggtcgatgcgtgtccgcactggggcgacgttttcacccggaccacttcacctgtactttctgcctccgtccattaacgaaaggttcgtttcaggagagagcaggcaaaccctactgccaaccatgcttccttaaactgtttggatag

SEQ ID NO: 26761 - DNA, 1386 bp, synthetic construct
  misc_feature 1..1386: note = Description of Artificial Sequence: Synthetic coding sequence
  source 1..1386: mol_type = other DNA
atggaggacctggacgccctgctgagcgacctggagaccaccacctcccacatgccacgctctggggcaccgaaggaacggcctgccgagccactgactccacccccaagctatggccatcaacctcagaccggaagtggcgagtcctccggtgcaagcggcgacaaagaccatttatatagcaccgtctgtaagcccaggagtcccaagccggcggctccagccgctccacccttctcatctagcagcggagtgctgggtacagggctttgtgagttggaccggcttttgcaggaattgaatgcaactcagtttaacattacggatgaaatcatgtctcagttcccatcgtcaaaggttgcttccggagagcagaaagaagaccagtcggaagacaagaaaagaccaagccttccatcatccccttctcccggattacctaaggcaagcgcaacatccgctaccctcgaattagatagactgatggctagcctgtcagatttccgcgtgcagaaccatcttcccgcaagtggaccaacacagcctcccgtagtgagctctacaaatgaggggagcccctccccaccagaaccaacaggcaagggcagcctggatactatgcttggcctactgcagagcgatctttctaggcgaggagtacctactcaggctaaaggtctttgtggctcttgcaataagcctatcgcgggccaggtggtaaccgcgctgggacgcgcatggcaccccgaacacttcgtgtgcggcgggtgttccacagcgttaggtggcagttcctttttcgaaaaagatggcgcaccattttgccccgagtgttatttcgagcggttcagcccaagatgtggcttttgcaaccaaccaatccgccacaaaatggtcaccgccttaggcacacactggcaccctgagcacttctgttgcgttagttgcggggagcccttcggagacgaaggctttcacgaacgggagggccgaccttattgcagacgcgattttctgcaattgtttgcaccacgctgtcagggctgccaggggcctatcttagacaattacatttccgcactgtcggcactgtggcatccagactgctttgtgtgccgcgagtgcttcgccccgtttagcggagggagctttttcgaacacgaaggacggccattgtgtgaaaatcattttcatgcccgccgaggctccttgtgtgccacatgcggactgcctgtaaccggaaggtgcgtgtccgcactgggccgccgatttcaccccgaccattttacttgcactttctgtcttaggcccttgacgaagggctcttttcaagagagggccgggaagccctattgccagccctgcttcctgaaattatttgggtag

SEQ ID NO: 26762 - DNA, 783 bp, synthetic construct
  misc_feature 1..783: note = Description of Artificial Sequence: Synthetic coding sequence
  source 1..783: mol_type = other DNA
atggtgtggcccgccctgtgggagctgtaccgggagctgggcctgtttcaggggcccgcccttggtctgcgtaatcatctgggaagaaagctccgccggcgtaagaaaaaaaaagccaagcggacgaccaattggaagatcattacggatcggccaggatttcacgacgagagcgctatatatcccgtcggctactgttccactagaatttacgcaagtatgaagtgcccagaccaaaagtgcctgtatacatgtcaaataaaggacggtggggtgcagcctcagttcgagatcgtgccggaggacgatccccagaacgcgattgtgagctcgtctgccgacgcttgtcatgcagagctgttaagaaccatatccaccacgatgggcaagctgatgcctaatctcctgccagccggagctgactttttcggtttttctcatccggccatccataacctcattcagtcatgtcccggtgctagaaaatgtataaactaccagtgggtaaagttcgacgtgtgcaagcctggcgacgggcagctcccagagggtctcccagaaaacgatgctgccatgtccttcgaagccttccaacggcaaatatttgacgaagaccagaacgacccgctgctgcctgggagtctggatttacctgagctgcagcctgccgcttttgtgagcagctaccagcctatgtatcttacccacgagcccctcgtcgacacccacctgcagcatttgaagagccctagccaaggtagccctatccaatccagtgactag

SEQ ID NO: 26763 - DNA, 1236 bp, synthetic construct
  misc_feature 1..1236: note = Description of Artificial Sequence: Synthetic coding sequence
  source 1..1236: mol_type = other DNA
atgagcctgctggacggcctggccagcagcccccgggcccccctgcagtcttctaaggcacggatgaaaaaactcccaaagaagagtcagaacgagaaataccggctcaaataccttaggctgcgcaaagccgcgaaggccacagtgtttgagaacgctgctatttgtgatgaaattgctagattagaggaaaaattcctgaaggctaaagaggaacgaaggtatttactcaaaaagctgctgcaattgcaggcattgacagaaggcgaggtccaggctgccgcacccagccattcttcctccctgcccctgacttatggagttgctagcagcgtgggaaccattcagggggcaggacctatcagcggcccttctaccggggccgaagagccttttgggaaaaagaccaaaaaggagaagaaagagaagggaaaggaaaacaacaagcttgaggtgctgaaaaaaacctgcaagaagaagaagatggctggaggtgcaaggaagttggttcaaccaattgcacttgacccctcaggccgcccagtattccctatcgggcttggaggcttgaccgtctacagcttgggagaaatcatcacagacagacccggtttccacgacgagtcagcaatataccccgtgggctactgctccaccagaatttacgcatcaatgaaatgtcctgatcagaagtgcctgtacacctgccagataaaggatggaggggtccagcctcagtttgagatcgtgccagaggacgatccacagaacgccatagtgtcatcatctgccgatgcttgccatgctgagcttttgaggaccattagcacgactatgggtaagctgatgccaaatctgcttcctgcaggggcggactttttcggattcagtcatcctgccattcacaacttaatccagagttgcccgggggcccgaaagtgcatcaattaccaatgggttaaattcgacgtctgcaaacccggagatgggcaactccccgaaggactgcctgagaatgatgccgccatgtccttcgaggcttttcagcgccagatttttgacgaagaccagaacgaccctctacttcctggcagtttagatctccccgaactccaacccgcagcatttgtgtcctcctatcagcccatgtaccttacccatgagcctctcgtcgacacccacttgcagcacctgaagagcccaagccaagggagccccattcagagctctgattag

SEQ ID NO: 26764 - DNA, 1281 bp, synthetic construct
  misc_feature 1..1281: note = Description of Artificial Sequence: Synthetic coding sequence
  source 1..1281: mol_type = other DNA
atggaggccgccgtggccgccccccggccccggctgctgctgctggtccttgccgcggctgcggccgcggcggcagctctcctgccaggagccactgccctgcagtgtttttgccacttgtgtaccaaagataactttacatgcgtgacggacgggctgtgttttgtctcagtcaccgaaaccacagataaggtcattcataactcaatgtgcattgctgagatcgacctgattcccagagacagacctttcgtttgcgcgccaagctccaagacaggctctgtgactaccacttactgttgcaatcaagaccactgcaataagatcgagctgcccaccacaggcttaccgctgttagtgcagaggacgattgccagaaccattgttcttcaggaatccatcggaaagggtcgcttcggggaagtctggcgggggaagtggagaggcgaagaggtcgcagtgaagattttttcctctcgggaggaaaggtcatggtttagggaagccgagatatatcagaccgtcatgctcagacacgaaaacatcctcggcttcattgcggcggacaacaaggataacggtacatggacacagctttggttggtctcagactatcacgagcacgggtcattgttcgactatctgaatcgctacaccgtcaccgtagaggggatgatcaaactggctttaagcaccgcaagtgggctggcacatctacacatggaaatagtgggaacacagggaaagccggctatagcccaccgggatctgaagagtaaaaatattctggtcaaaaaaaacggtacctgctgtatcgctgaccttggcctggccgtccgacatgatagtgctaccgatacgatcgatatcgctcccaatcatcgcgtcggtaccaagaggtatatggctcctgaagtactagacgacagcattaacatgaagcattttgagagttttaagcgagccgatatctatgccatgggtctggtcttttgggagatcgcccggaggtgctcaattggcggtatccatgaagattatcagctgccttactatgatctcgtgccatctgatccatcggtggaagaaatgaggaaggttgtgtgtgaacagaaactgcgccccaacataccaaatcggtggcagtcttgtgaggcactccgtgtcatggccaaaatcatgagggaatgctggtatgctaatggagcggctaggttaaccgcacttcgcattaagaagacattgagtcagctgtctcagcaggagggcatcaaaatgtag

SEQ ID NO: 26765 - DNA, 1512 bp, synthetic construct
  misc_feature 1..1512: note = Description of Artificial Sequence: Synthetic coding sequence
  source 1..1512: mol_type = other DNA
atggaggccgccgtggccgccccccggccccggctgctgctgctggtcctggctgccgcggctgccgcagcagccgctctcctgccgggcgccacagctttgcagtgtttttgccatttgtgcactaaagacaacttcacctgcgttacggatggtctatgttttgtgtccgtgacggaaacaaccgacaaggtgatacacaatagtatgtgcatcgcagaaatagacctcattccaagggataggccttttgtgtgtgcccctagctcaaaaacaggtagtgtgaccaccacttactgctgtaatcaggaccattgcaacaaaatcgagctgcctacaacagtaaagtcatcacccggcctcggacctgtggaacttgccgcagtcattgccggccctgtgtgttttgtttgcatcagcctgatgctcatggtgtatatctgccataacaggaccgtaattcaccatcgcgtgcctaacgaggaagaccccagtctggataggcctttcatctccgaaggcacaacactcaaagacctcatctacgacatgaccacaagcggtagtggctctggtttacctttactggtacagcggaccatcgcgcggaccatcgtgttgcaggaaagtattggcaaggggcgtttcggagaggtgtggaggggaaaatggagaggggaggaggttgctgttaagattttttcttcgagggaggagcgatcatggttccgggaagctgagatttatcagaccgtcatgttgaggcacgaaaacatccttggctttattgctgctgacaataaagataacggcacatggacccaattgtggctcgtcagcgactaccacgagcacgggtcactctttgactatctgaatcggtatacagttacggtcgaagggatgattaagcttgccctcagtaccgccagcggcctagcgcatctccacatggaaattgttgggacgcagggaaagcctgcaatcgcacatcgggacctgaagtcgaagaatattcttgtaaaaaaaaacggtacttgctgcatcgccgatttagggctcgccgtgagacatgacagcgccacagatacaatcgatatcgcccccaaccacagagtcggaaccaaaagatacatggctcctgaggtgctagacgatagcatcaacatgaagcactttgagtcttttaaacgcgcagatatctacgctatggggctggtgttttgggagatcgcaagacgatgtagtattggcggcattcatgaggactaccagcttccctactatgatctcgtcccatcagacccaagcgtagaggagatgcgtaaggtggtatgtgaacaaaaattgcgccccaacatccccaaccggtggcagagttgcgaggcactcagggtgatggctaaaataatgagggaatgctggtatgcaaacggtgctgccaggctgaccgcactgcggatcaaaaagacattatctcagctgtcccagcaggaaggaataaagatgtag

SEQ ID NO: 26766 - DNA, 1398 bp, synthetic construct
  misc_feature 1..1398: note = Description of Artificial Sequence: Synthetic coding sequence
  source 1..1398: mol_type = other DNA
atggaggccgccgtggccgccccccggccccggctgctgctgctggttctggctgccgcggccgccgcagctgccgccctgctccctggtgccaccgccctgcagtgcttctgccacttatgcaccaaagataactttacctgcgtcactgacggtctctgcttcgtctcagtgactgaaacaactgacaaggtgattcataacagcatgtgcattgctgagatcgacttgattccacgcgatagaccctttgtgtgtgctccgtcttctaagaccggcagtgttaccactacttattgctgcaaccaggatcattgtaataagatagaactgccaactaccgtgaagagtagcccaggccttggccccgtagaactggccgccgtaatagccgggcccgtctgtttcgtctgcattagtctaatgctaatggtttacatctgtcacaatcggacagtgatacaccatcgggtcccgaacgaggaagatccaagcctggacagaccattcatcagcgagggtacaacactcaaggatctgatctacgacatgactacctccggatctggaagtggactcccgctgctggtccagcgcacaatcgcccgtacaattgtgctgcaagaatcaatcgggaaagggaggttcggagaagtttggcgcggaaagtggcggggggaagaagtcgcagtgaaaattttctcctccagggaagaacggtcatggtttcgggaggcagagatttatcagactgttatgttgaggcatgagaatattttaggcttcattgctgctgacaacaaagacaacggcacttggacgcagctatggttagtttctgattatcatgaacatgggagtctatttgattatctgaataggtatacagtgactgtggagggaatgatcaagcttgccttaagtacagcctccgggctggcacacctgcacatggagatcgtgggcacacaaggcaaacccgccatagcccctaatcaccgcgtgggcacaaagagatacatggctccagaagtgttagacgattctatcaacatgaagcattttgagtccttcaagagggcagatatctatgccatgggcctcgtattctgggagattgctcgtcgctgttctatcggaggaatacacgaagattaccagctgccctactatgacttggtgcctagtgatccgtcagtggaggaaatgcgtaaggtagtttgtgagcaaaagctgagaccgaacatacctaatcgctggcaaagctgcgaggccctgcgggtaatggcaaagatcatgcgagaatgctggtacgcgaatggcgccgcaagattaactgccctccggataaagaagacgctcagccaactgtcacagcaggaagggatcaagatgtag

SEQ ID NO: 26767 - DNA, 216 bp, synthetic construct
  misc_feature 1..216: note = Description of Artificial Sequence: Synthetic coding sequence
  source 1..216: mol_type = other DNA
atggaggccgccgtggccgccccccggccccggctgctgctggcctccacatcactccagtgtttttgtcacctttgcaccaaagataacttcacctgcgtgaccgatggactttgcttcgttagcgtgaccgaaacaacagataaagtgattcataattctatgtgcattgccgagattgaccttattcctagggaccggcccttcgtgtgctag

SEQ ID NO: 26768 - DNA, 1305 bp, synthetic construct
  misc_feature 1..1305: note = Description of Artificial Sequence: Synthetic coding sequence
  source 1..1305: mol_type = other DNA
atgtgcatcgccgagatcgacctgatcccccgggaccggcccttcgtgtgcgctcctagtagcaagacgggctcagtaactacaacttattgctgcaaccaagatcactgtaataagattgaactccctacgacagtaaagtcttctcctgggctgggaccagtggagctggctgccgtgattgctggccctgtctgttttgtgtgcatcagtcttatgttgatggtgtatatctgccacaatcgcacagttattcatcaccgcgttccaaacgaagaagacccctccttagacagacccttcatttccgaaggaaccactctgaaggatctgatctatgacatgacaaccagcgggagcggatccggactgccactgctggtgcagcggacaatagcacgcacaattgttttacaggagagtatcggcaagggcaggtttggggaggtgtggcgcggaaaatggaggggagaggaagtggcggttaaaattttctcctcacgtgaggagaggtcttggttcagagaagcagaaatctaccagaccgtaatgctgcgacatgaaaatattcttgggtttatcgccgccgataacaaagacaacggaacatggacacagttgtggctggtgtcagactatcacgagcatgggagcctgtttgactacctaaatcggtatactgtcactgtggaaggaatgatcaaactggctctgagcacagcctccggactcgcgcatttgcatatggaaattgttgggacacaagggaaaccagcaattgcgcatagagacctgaagtcgaagaatatcctggtcaagaagaacggtacatgctgcattgcagacctgggcctcgctgtgcgacatgacagcgcaacagacacgatcgacattgcaccgaatcacagggtcggtacgaagagatatatggcacctgaagtgctcgatgactcaatcaacatgaagcactttgagagcttcaaacgcgcagatatctacgcaatggggctggtcttctgggaaatcgcccggcgttgtagcatcggagggatccacgaggattatcaattaccttactatgatctcgtcccttctgacccttccgtggaagaaatgagaaaggtggtgtgtgagcagaagctccgacctaacattcctaacaggtggcagagctgcgaagctctccgggtgatggccaagatcatgcgcgaatgttggtacgctaatggggcggctcggctgacagctctcagaattaaaaagactctcagtcagctttcacagcaggagggcatcaaaatgtag

SEQ ID NO: 26769 - DNA, 411 bp, synthetic construct
  misc_feature 1..411: note = Description of Artificial Sequence: Synthetic coding sequence
  source 1..411: mol_type = other DNA
atgaaggacagcaaccggtgctgctgcggccagttcaccaaccagcacatcccgcccttaccctctgccacacctagtaaaaatgaagaagagtctaagcaagtcgagactcagccggaaaaatggagcgtggccaagcacacacagtcctaccctactgactcatacggggttctggagttccaggggggcggatactctaataaagcaatggtgcggaaagctttccgccacggggctacaagaatcaccgcctttatcgggggccaatctccgagcccgaaactgcagataccaggactgctgcacggctgcggatctattttcttggatatatccctgaaaaaccaggagatatacctctgcacttggctgctcgcaatgcgcctggggaactggacaccgctgtag

SEQ ID NO: 26770 - DNA, 4878 bp, synthetic construct
  misc_feature 1..4878: note = Description of Artificial Sequence: Synthetic coding sequence
  source 1..4878: mol_type = other DNA
atgggccagaagagctggatcgagaagaccttctgcaagcgggagtgtatatttgtaatccccagcatgaaggactctaacagatgttgctgtggtcagttcaccaatcaacatatcccaccactgcctagcgcgactccaagcaaaaacgaggaagaaagcaaacaggtcgagacgcaaccagagaaatggagtgtggccaaacacacacagtcctatccgactgacagttatggagtcttggaatttcagggagggggctattcaaataaagccatgtatatcagagtgtcctatgatacaaaacccgactccttgctgcatctgatggtgaaagactggcaactggaactgccaaaactgctgatttccgtgcacggcgggctgcagaacttcgaaatgcagcccaagctaaaacaggtgttcgggaaggggttgatcaaagccgcgatgaccaccggggcttggatctttacaggtggggtctccaccggggtcattagccatgtgggcgatgcccttaaagatcactcttccaagagtcgaggccgggtctgtgctatcggtatcgccccatggggaattgttgaaaacaaggaagatctggtgggcaaggatgtcactagagtctatcagaccatgtctaatcctttgtcaaagcttagcgttctcaataattcacacactcacttcatcctggcagacaacggcacactgggcaaatatggagctgaggtcaagctacgcaggttactggagaagcacattagtctacagaagatcaatacccggctcggccagggagtgccattagtgggtctggttgttgaaggcggacccaatgtggtatccatagtgttagagtatctacaggaggagcccccgatacccgtggtgatttgtgatggcagtgggcgagcctctgacattctctcctttgcccataagtattgtgaagagggagggataataaacgagagtctgcgagagcaattattggtgaccattcagaaaacctttaactataacaaagctcagagtcatcaacttttcgcgatcatcatggaatgtatgaagaaaaaggaactggttaccgtgttccgcatgggctctgagggacaacaggatatcgaaatggctattctcacggcactgctcaaagggacaaatgtttctgccccggatcaattatctctcgctctggcttggaatcgagtggacatagcacgctcgcagatctttgtgtttgggccacattggccacccctgggatctcttgccccacctactgactccaaggctacagaaaaggagaagaagcctcctatggccaccactaagggcggcagggggaaggggaaggggaagaaaaagggaaaagtgaaggaagaggtggaggaggagactgatccacggaagattgagttactcaactgggtgaacgccttagagcaagctatgctcgatgctctggtcttggaccgcgtcgactttgtcaagctgctcatcgagaatggagtgaacatgcagcatttcctaacaatccctagactggaggaactgtacaatactcgcttgggacctcctaacacactgcacctcttggtccgggacgttaaaaagtccaatctgcctccggattaccatattagcctcattgatattggacttgtgctcgagtacctgatgggcggcgcctaccggtgcaactacacccgaaagaatttcaggaccctctacaacaatctgtttgggccaaagcggcccaaagctctcaagctgcttggaatggaagacgacgagcctccagccaagggtaaaaagaagaagaagaaaaagaaggaagaggaaattgacatcgatgttgacgatcccgccgtgagcagattccagtacccctttcatgagctgatggtgtgggccgtactgatgaaacggcagaagatggctgttttcctgtggcaacggggggaagagtctatggccaaggctttggtagcgtgcaaactctataaagccatggcacatgaaagcagtgagagcgatctcgttgacgatattagtcaggacctggacaacaattccaaagatttcggtcagctcgcgctcgaacttctcgatcagtcttacaagcacgacgagcagatcgccatgaaattactgacctatgagctgaagaattggtccaattcaacctgtttgaaattggcagtggccgccaagcacagggatttcattgctcacacgtgttcccagatgttactgacggacatgtggatggggcgactcaggatgcggaagaatcccggcctgaaagtcattatgggtattttgctaccccccaccatcctgttcctggagtttcgcacctacgacgacttcagctaccagacctcgaaagagaacgaggacggcaaagaaaaggaggaggagaacactgatgcaaacgcagacgccgggtctagaaaaggggatgaggaaaatgaacacaagaagcagcggagcattccaatcggaaccaaaatttgtgagttctataatgcgccaatagtgaaattctggttctatacaattagctacctgggctacctgttgttgtttaactacgttatccttgttagaatggacggttggcctagcctacaggagtggatcgtgatctcctacatcgtgtctctggcattggagaaaatcagggagatactgatgagcgaacccggcaaactgtcgcagaagatcaaagtctggcttcaggagtattggaacatcacagatctcgtggctatatccacctttatgatcggagcaatactgcgtctgcagaatcagccttatatgggttatgggcgagtgatatattgcgtagatataattttctggtacattagagttctggacattttcggagttaataaatatcttggaccttatgtgatgatgatcgggaaaatgatgatcgatatgctttacttcgtcgtcatcatgttagtagttttgatgtccttcggagtcgctaggcaagccatcctgcaccccgaagagaagccttcatggaaattagcccggaacatcttctatatgccgtattggatgatctatggagaagtttttgctgaccagatcgacctttatgccatggagataaatcccccttgtggagaaaacctgtatgatgaggagggaaaacgcttgcctccttgcattcccggcgcctggcttactcccgccctgatggcctgttacctgcttgtagcgaatatcctgctcgtgaacctcctcattgccgtattcaacaataccttctttgaggtcaaaagcatctcaaatcaggtgtggaaattccagcggtatcaactgatcatgacgttccacgaccgccctgtccttccacctccaatgattattctgtcacatatctacatcattataatgcgcctgtccggaagatgccgaaagaagagggagggggatcaggaagagcgcgaccggggcttaaaactcttcctgtctgacgaggaactaaagagactgcacgagttcgaggagcagtgcgtccaggaacattttcgagagaaggaagacgaacagcaaagctccagcgacgaacggattcgggtgacctctgagcgcgtggagaatatgtctatgcgcctagaagagattaacgagcgcgaaacttttatgaaaacatcacttcagacagtggatctgaggctggcccaactggaagaactctcaaacaggatggtgaacgccctggagaacttagctggaatcgaccgaagtgatttgattcaagctcggagtagggctagtagcgagtgcgaggcgacttatctactcagacagtcaagcattaactccgctgacggctattcattatatcggtaccattttaatggcgaggagctactgttcgaagatacgagcctgtcaacctcccctgggacaggtgtgagaaagaaaacatgctcgttcagaataaaggaggaaaaagatgttaaaacccatctggtccccgagtgccagaactccctacacttatccctggggaccagtacttcagccacgcccgatggcagtcatctcgcagtggatgatctgaagaacgcggaggagagcaaattgggtccggacattggcatctccaaggaggacgacgagaggcagacagatagtaaaaaagaagagaccatctctccaagcctcaataagacagacgtcattcatggtcaggataagagtgatgtgcagaatactcagcttaccgtggagactaccaatatcgagggaacgatcagctatcccctggaggaaaccaaaattaccagatatttccccgatgagacaataaatgcctgtaaaacgatgaagtcccggagcttcgtttactctcggggtcgtaagctcgttggaggagtgaatcaggacgtggagtattcttctattacggaccaacagctcacaacagagtggcagtgccaggtccagaagatcacgagatctcatagcaccgacatcccgtacatcgtgtcggaggctgctgttcaagccgagcataaggagcagttcgctgacatgcaggatgagcatcacgtggccgaagccattcctcgcatccccaggctctcattgactattactgataggaacgggatggaaaatctcctgagcgtgaagccagatcaaacacttggcttcccttcattacgctccaagagtctgcatggccacccccgcaatgttaagtccatccagggaaagctggataggtcaggacatgcctctagtgtctctagtctggtcattgtttcaggaatgaccgctgaagaaaagaaggtgaaaaaggaaaaggcgtcaactgagacggaatgctag

SEQ ID NO: 26771 - DNA, 4812 bp, synthetic construct
  misc_feature 1..4812: note = Description of Artificial Sequence: Synthetic coding sequence
  source 1..4812: mol_type = other DNA
atcaagaccagcaagcggtgctgctgcggccagttcaccaaccagcatatcccacctctaccatcagccacgccgtccaagaatgaagaggaatctaagcaagtcgaaactcagccggaaaaatggtccgtcgcaaagcatactcaatcttatccaacagatagctacggcgtactggagttccagggaggaggctactcaaacaaagccatgtacatacgcgtgagctatgacactaaacctgattctctgctgcacctaatggtgaaggattggcaactggagcttcccaaattactgattagcgttcacggtgggctgcagaacttcgaaatgcagccaaagctgaagcaggttttcggcaaagggttgatcaaagccgccatgactactggagcatggattttcactggcggcgttagtactggcgtgatcagtcacgtgggagacgccctgaaagatcacagcagcaaaagtagagggcgagtttgcgcgattggcattgccccctgggggatcgttgagaataaggaagatctcgtgggcaaggatgtgactagggtttaccagaccatgtctaaccccctgagcaagctgtcagtacttaacaattcccatactcacttcattcttgccgataacggcacactgggcaaatacggcgctgaagtcaagttgcgtcgtctcctggaaaagcacatttcactgcagaaaatcaacacacggttggggcagggtgtgccactcgttggcttggtagttgaaggaggcccgaacgtcgtttcaattgtcctggagtatttgcaagaggagcccccaatccccgtggtgatctgcgacgggtcagggcgcgcctccgacatcttgtctttcgcccataagtattgtgaggagggcggaatcattaacgaatccctgcgggagcaattactggtaaccatccagaaaactttcaactacaacaaagctcaaagccaccagctgttcgccataatcatggaatgtatgaagaagaaagaattagtgaccgtgttccggatgggttcagaggggcagcaggacatcgaaatggcaattctcaccgcccttctgaaaggcactaatgtcagcgctccggatcaactctcattggctcttgcttggaaccgagtggatatcgcccgatctcagattttcgtcttcgggcctcattggcctcccctggggtcgctggccccgccaactgatagtaaagcaaccgagaaagagaaaaagcccccaatggccaccacaaaaggcgggcgcggaaagggtaagggaaagaaaaaggggaaggtgaaggaggaggtggaagaggagactgatccccggaaaattgagctcctgaattgggtgaacgctcttgagcaggctatgctcgacgcactggtcctggatcgagtcgactttgtgaagctcctaatcgagaacggggtgaatatgcagcacttcctgacaattcctcgtttggaagagctttacaacacccggctgggcccaccgaacactctgcacctcttggtccgcgatgttaaaaagagtaacctgccccccgactatcacatctctctgatcgatataggtctggtgctcgaatacctgatgggcggggcttatcgatgcaattatacacggaagaatttccgcaccctttataacaacctgtttggtcccaagcgtccaaaggccctgaaactcctgggtatggaagacgacgagcctcctgccaagggaaagaagaaaaagaaaaagaagaaggaagaagaaatcgatatagatgttgatgatcccgctgtgtcacgctttcagtatcctttccacgaactgatggtgtgggcagtgctgatgaaaagacagaagatggccgtgttcctctggcagcggggcgaggagtccatggccaaagccctggtggcttgcaaactctataaggcaatggctcacgagagcagcgagagtgatctggtggatgacatttcgcaggacctcgacaataactcgaaggattttgggcagctggccctggaactgctggaccagtcctacaaacatgacgaacagatcgctatgaagctattgacctatgaactcaaaaattggtccaattccacatgccttaaactggccgtggccgcgaagcatcgggacttcatcgcccatacctgcagtcagatgctgctcacagatatgtggatgggccgcctgcggatgcgaaagaatccaggcctaaaagttattatgggtattctgcttccgcccacaatcctcttcttggagttccgcacttatgacgacttctcgtatcagacctccaaggaaaatgaggacgggaaggaaaaagaggaggagaatacggatgctaatgccgatgctggatcacgcaagggggacgaggaaaatgagcataaaaaacagcgatccatcccgatcggaaccaagatttgtgagttttataacgcccccattgtgaagttttggttctacacaatctcttatttaggttacttgctgctatttaactatgttatactcgtgcgaatggacggatggccctctctacaggagtggatcgtgatctcctatattgtatcactggcccttgaaaagatccgcgaaattctcatgagcgagccaggtaagctttctcagaagatcaaagtatggttacaagagtactggaacatcaccgacctagtagccataagtacatttatgatcggggcaatcttgcgccttcagaaccaaccctacatgggctatggccgagtgatttactgcgtggacattatattctggtatatccgtgtgctcgacattttcggcgttaacaagtacctgggtccttatgtgatgatgattggcaagatgatgatagatatgctgtactttgttgtcatcatgctcgtagtcttgatgtcatttggcgtggccaggcaggcaatcctgcatcccgaggagaaacccagttggaagcttgctcggaatattttctatatgccgtactggatgatttacggggaggtctttgccgaccaaattgatctatacgcaatggagataaaccccccctgtggcgaaaacttatacgacgaagaaggtaaaagactcccgccatgtattcctggcgcctggctgactcccgctctgatggcttgttatctactcgttgctaacatacttttggtgaatctattaattgcggttttcaacaacaccttcttcgaagtgaagagtattagcaatcaggtgtggaagttccagaggtatcagctgatcatgacttttcacgaccggccagtactgccccctccgatgattattctgagccacatctacattattattatgagattatccggcaggtgtaggaaaaagcgggagggggaccaagaggaacgggatcgcgggcttaagctgttcctttcagatgaggagctcaagcgcctccacgagtttgaggagcaatgtgttcaagaacacttccgcgagaaggaagacgagcagcagtccagctctgacgagaggataagagtgacgtcggagcgggtcgagaatatgtctatgcgcctggaagagattaatgagagagaaacttttatgaagacgtcgttacagactgtggacttgcgcttggctcagttagaagaactgtccaaccgtatggtgaatgctctcgaaaatcttgccggaatcgataggtctgatttaattcaggcgaggagtagggcgagctcggaatgcgaggcgacatacttacttcgccagtcttccatcaacagcgcggacgggtattccctctaccggtatcacttcaacggagaggagttgctgtttgaggacacatctctgagtacctcaccaggtacaggcgtgcgtaaaaaaacgtgctctttccgtatcaaagaagaaaaggatgtcaaaacacatctggtacctgagtgccaaaatagcttacacctgtccttgggaacgtccaccagtgctacgccagatggatcccatctcgctgtggatgatctaaagaacgccgaggaatccaagctgggcccggatatcggaatatctaaagaagatgatgagaggcagacagatagtaagaaggaagagacaatctccccttcgctgaataaaaccgacgtgatccacgggcaggacaaaagcgatgtgcaaaacacccagcttactgtcgagactacaaacattgagggcacaatctcctacccccttgaggagacgaaaattacaaggtacttccccgatgagaccatcaatgcctgtaaaactatgaagagccgctcattcgtatattcccgggggaggaagctggtgggcggcgtgaatcaagacgttgaatactcctccattacagatcagcaactgaccacagagtggcaatgccaggtgcagaagatcacccgatcgcactcaacagatataccatatatcgttagcgaagccgccgtccaggccgaacataaggagcaatttgcggacatgcaggatgagcaccatgtcgcagaggctatcccgcgaatccctcgtttaagtcttaccatcacagataggaacggcatggagaatctgctttcggtaaagccggatcagacccttggcttcccttcgctgagatctaagtctttgcacggacatcctaggaatgtcaaaagcattcaaggaaagctcgaccgttctggacacgcctcttccgtgtctagtctagtgattgtgagcggtatgacagccgaagagaagaaagtgaaaaaggaaaaagcatcgaccgagaccgagtgctag

SEQ ID NO: 26772 - DNA, 4812 bp, synthetic construct
  misc_feature 1..4812: note = Description of Artificial Sequence: Synthetic coding sequence
  source 1..4812: mol_type = other DNA
atgaaggacagcaaccggtgctgctgcggccagttcaccaaccagcacatccctccccttccctctgccacaccgagcaaaaatgaggaagaaagtaaacaggttgaaacacagcccgaaaagtggagtgtcgctaaacatactcaatcctatccgaccgactcttatggcgttttggagttccagggtggcggctacagtaacaaggcgatgtatattcgcgtgagctacgatacaaagcccgatagcctgttgcacctcatggttaaagactggcagcttgagctcccgaaactgttgatcagcgtgcacggcggattacagaacttcgaaatgcagccaaaacttaagcaagtgtttgggaagggactgatcaaggcggctatgacaaccggtgcatggatctttaccgggggtgtgtctacaggcgtgatctctcacgtcggtgacgccctgaaagatcacagcagtaaaagcaggggtagagtttgcgccattggcatcgccccctggggaatcgtggaaaataaggaggacctggtgggaaaggatgtgacccgggtatatcagactatgtcaaatcccctgtctaagcttagcgtcctgaacaatagccacacacattttatattggccgacaacggtactctgggtaaatatggtgccgaggtgaaattgcgaaggttactagaaaaacacattagtcttcaaaaaattaacactcgcctgggccagggagttcctctagtgggcttggttgtggagggaggccccaatgtggtgagcatcgtgctggaatacttgcaggaagagccgccaattcctgtggtgatatgcgacgggtctggtcgagcatctgacatcctttccttcgctcacaaatactgcgaagaaggcggaatcattaatgagtcactgagagagcagctcttagtcactatacaaaagacgtttaattacaataaagcccagagccaccaattgttcgccattatcatggaatgcatgaaaaagaaagaactggttacagtgtttcggatgggatccgaaggtcagcaggatatcgaaatggcgattctcacggcgctcctgaaagggaccaacgtctcggccccggatcagctgtcgctggctcttgcttggaacagggtagatatagcaaggagtcaaatctttgtgttcggcccccattggccgccattgggctcactggcccctcctaccgacagtaaagccactgaaaaggagaaaaagccaccgatggcgactactaagggagggcgcgggaaaggaaagggtaagaagaaaggaaaagtgaaggaggaagtggaggaggaaactgaccccagaaagatcgaattattaaattgggtcaacgctctggaacaggcaatgctggatgctcttgtcctggatcgtgtcgacttcgtaaagttgctcattgagaatggggtgaatatgcagcacttccttacaatcccccgcctcgaggagctgtacaataccaggctggggcccccaaatacgctacatttgctcgtacgggacgtgaagaagtccaatctccccccagactatcacatttccctgatcgatatcggcttggttctggagtatttaatgggcggcgcctaccgctgcaattacaccagaaaaaatttccgtaccctctataataacttatttggacctaagcgccccaaggcactgaaactgctcgggatggaggatgacgagccgccagccaagggcaagaaaaaaaaaaagaagaagaaggaagaggagatcgacatagacgtggatgatcctgcagtgtctaggttccagtaccccttccatgaattaatggtctgggccgtgctcatgaagcggcagaaaatggctgtatttctgtggcagaggggggaagagtctatggcaaaggccctggtggcctgcaagctttataaagccatggcccacgagagctctgagtcagatctggtggatgatatttctcaggacctcgataataactccaaagatttcgggcagttggctcttgagttacttgaccagtcttacaagcatgatgagcagatcgccatgaagcttctcacatatgaactgaaaaactggtcgaattccacatgtcttaaactcgctgtagcagccaaacacagggactttatagcccatacatgctctcagatgctccttacagacatgtggatgggacggctgcgcatgcgcaaaaaccctggtctgaaggttatcatgggtatcctattgcctcctaccattctatttctcgagtttcgcacatatgatgacttcagctatcagacttcaaaagaaaatgaggacggaaaggagaaggaagaagaaaatacagatgcgaacgctgatgcaggttctaggaagggtgatgaagagaacgaacacaaaaagcagagatccatccctatcggaacaaagatctgcgagttttacaatgcacctattgtcaagttctggttttacaccatttcctaccttggctatttacttctgttcaattacgtgattctggtgcggatggacggatggccttcactacaagaatggattgtgatctcatacatcgtttcgctcgccctggagaagattagggagatcttgatgagtgagccaggcaaactgtcacagaagatcaaagtgtggctccaggagtactggaacattactgatcttgttgcaatctccacctttatgatcggggccatcctcaggttgcaaaaccagccttacatgggttacggacgcgtgatatactgcgtggatattatcttttggtatattcgggtgctcgatatcttcggggttaacaaatacctcggtccctatgtgatgatgatcgggaaaatgatgatagacatgttatactttgtggtcatcatgttggtggtacttatgtcgtttggcgtggctaggcaggccatcctccatcccgaggaaaagccctcctggaagcttgcgcgaaatattttttacatgccctactggatgatctatggtgaagtgtttgccgaccagatcgatctttacgctatggaaataaacccaccatgtggggaaaatttgtatgacgaggagggcaaacgcctgccaccatgcattccaggcgcttggctaacgccagctcttatggcatgttacctgctagtagcaaatatcttgctggtgaatctgctgattgcagtcttcaacaatacattcttcgaggtcaagtcaatttccaaccaagtgtggaaattccaacgctatcagctgattatgacattccacgacagaccagtcctgccaccgccaatgatcatactgtctcatatatacatcataatcatgcgactgagtggccgatgtaggaagaagagggaaggagaccaggaagagagggatcgcggactaaagctgtttttgtccgacgaagagttgaaaagattacatgagttcgaagaacagtgcgtgcaagagcactttcgggaaaaggaagatgaacaacaaagcagctctgacgaaagaatccgggtcacctctgagcgtgtcgagaacatgagcatgagactggaggaaattaatgagcgagaaaccttcatgaaaacgtctcttcagacagtggatctccggctggcccagctggaggaacttagcaatagaatggtcaacgctctggagaacctcgccgggatcgaccgaagcgacttgattcaagcgcggtcacgcgcctcttctgaatgcgaagccacctacctcctccggcagagcagtatcaatagtgccgacggatattctctgtataggtatcactttaatggcgaagagttgcttttcgaagacaccagcctgagtacttctccggggaccggtgtgcgaaaaaaaacttgttcatttcggattaaagaggaaaaggacgtcaaaacacacctggtgccagaatgtcagaatagcctgcacctatcattggggacctctacaagcgctacgccggacggctcccacctagccgtggatgatctgaaaaatgccgaagagtctaagctcggaccagatattggcatctccaaggaagatgacgagcgtcagactgactctaagaaagaggaaacaatctctcctagcctcaataagaccgacgtcatccacggccaagacaaaagcgatgtccagaatacccagctgactgttgagacaactaacatcgaaggcactattagctaccccctcgaggagacaaagatcacgagatactttccagatgaaacaatcaacgcctgcaagaccatgaaatctcgcagttttgtttactctaggggcagaaaactggtgggcggcgtgaaccaggatgtcgaatattcatctataaccgatcagcaattgaccaccgagtggcagtgccaagtccaaaaaatcaccagaagtcacagcacagatataccttacatcgtctctgaggctgctgtacaggctgagcataaagaacagttcgctgatatgcaagacgaacaccatgtcgccgaggccatcccccggatcccccgcttaagtctgaccattaccgaccggaatggcatggaaaatctactgagcgtgaagcctgaccagacgctgggatttccttcactaagatctaagtcacttcacgggcaccctagaaacgtgaaatcaatacagggcaagctagatcggagtggccacgcctcctccgtgtcaagcctggtaatcgtgagcgggatgacagcagaggagaagaaggtgaagaaagagaaggcttctaccgaaaccgaatgttag

SEQ ID NO: 26773 - DNA, 4929 bp, synthetic construct
  misc_feature 1..4929: note = Description of Artificial Sequence: Synthetic coding sequence
  source 1..4929: mol_type = other DNA
atgagcagcttcaagcggggcagcctgaagagcagcaccagcggctcgcagaagggccaaaagagctggatcgaaaagacgttttgcaagcgggagtgcatcttcgtcatcccatccatgaaagattctaatcgatgctgttgtgggcagttcacaaatcagcacatcccccctttgcccagcgcgaccccatcaaaaaacgaggaagaatccaagcaagttgagactcaaccagagaaatggagcgtcgcgaagcacacacagagctacccgacagactcctatggcgtgctcgaatttcagggggggggctattctaataaagctatgtatatccgggtcagctatgacacgaagcccgactctctcctgcatctgatggtgaaagattggcagctcgaactgcctaagctactcatttctgtgcatggcggcttacaaaacttcgagatgcagcccaaactcaagcaagttttcggtaaagggcttatcaaagcagccatgaccaccggggcctggatcttcactggtggtgtatccacaggcgtcattagtcacgtcggagatgctctgaaagaccattcttccaagtctaggggaagagtgtgtgcaattgggattgctccttggggaatcgtcgagaacaaggaggatcttgtggggaaggacgtcacaagggtgtatcagacaatgtccaatcccctgtccaagctgtccgtgcttaataatagccacacacatttcatcctggccgacaatggcactctgggcaagtatggtgctgaagtaaagctcagaaggctcctcgagaaacacattagcttgcaaaaaattaatacccgactggggcagggagtgccgcttgtgggactggtggtggagggcggacctaacgtagtgagtattgtgctggagtatctccaggaggagcctcctatcccagtggtaatttgcgatggatctgggagagctagcgacatcttgagctttgcccataagtactgcgaagaagggggtattatcaatgagtccttgcgggagcagctgctcgtaactatacagaaaacctttaactacaataaagcacagagccaccagttgttcgccatcatcatggagtgcatgaagaagaaggagctcgtgaccgtctttaggatgggctctgaagggcagcaggatatagagatggccatccttacagcattgcttaagggaactaacgtctctgcgccagaccagctctccctggcgctcgcctggaaccgcgtggacatcgctcggagccaaatcttcgtgttcggccctcactggccaccactggggtccctggccccccccaccgattctaaggccacagaaaaagaaaagaaacctcctatggcgacgactaaggggggcagaggtaaaggcaaggggaagaaaaaaggcaaagttaaagaggaagttgaggaagagaccgacccccggaaaattgagcttcttaactgggtcaacgcacttgaacaggcgatgctagatgccctcgttcttgatagagtggatttcgtgaagctgcttattgagaacggagtgaacatgcaacactttttaactatcccccggttggaggagctgtataataccagactcgggccccctaataccctgcacctcttggtccgggatgtgaaaaaaagcaacctgccaccagactaccatattagtttgattgatatcggactcgtgcttgaatatttgatgggcggagcgtatcgatgcaattatactagaaaaaattttcggaccctttacaacaatttgttcggccccaagcgccctaaggcccttaagctgcttggcatggaggatgatgagcctcctgctaaaggcaaaaaaaaaaaaaagaagaagaaagaagaggagatcgatatcgacgtggacgacccggccgtaagtcgatttcaatatcccttccatgaactgatggtgtgggctgttcttatgaaaaggcagaagatggcagtctttctttggcaaagaggggaagaatcaatggcaaaagctttggtcgcatgtaagctctacaaagccatggcacacgagtcctctgagtctgacctcgtggacgacatcagtcaagatttggacaacaattcgaaggactttgggcagctggccctcgagttactggaccaatcctataagcatgatgagcagattgcaatgaagcttttaacctacgagctgaagaattggtccaattccacctgtttgaaactggctgtagccgcaaaacatagagattttatagctcatacatgctcacaaatgctcttgacagatatgtggatgggtaggctgcggatgcggaaaaacccaggtctcaaagtgatcatggggattcttctgccacccaccatactgtttctggagttccgtacatacgacgatttcagctaccagacatctaaggaaaacgaggatggcaaggagaaggaggaagagaacacggatgcaaacgcagacgccgggtcgcggaagggggacgaagagaatgagcataagaaacaaaggtctattcctattggcactaaaatctgtgaattttataacgcacccatcgtcaagttctggttttatactataagttacctcgggtacctccttctattcaactacgtgattttggtgcggatggacggttggccctcactccaggagtggatcgtcatatcttacattgtctcacttgcactggaaaaaatcagagaaatcctcatgagtgagcctggaaaattatcccagaagatcaaggtctggctgcaagagtattggaacataactgacctagtggctataagcaccttcatgatcggcgccattcttcgtctgcaaaatcaaccatacatgggatacggaagggttatctactgcgtagacattattttctggtacatccgtgttttagacatcttcggcgtgaataaatacctcgggccatacgttatgatgatcggaaagatgatgatagacatgctgtatttcgtggttatcatgcttgtggtgctgatgtcctttggtgtggcacggcaggccatcctgcaccccgaggaaaaaccatcatggaaactggcaaggaacattttttacatgccctactggatgatctatggcgaagtgttcgcggatcagattgacttatacgccatggagatcaatcccccctgcggggagaatctttatgacgaggagggaaaacgcttacccccatgcataccaggagcttggctgaccccagccctcatggcctgctacttgctcgtggcgaacatcctcctcgtgaacctgttaatcgccgtgttcaacaacaccttctttgaagtgaagagtatctcgaatcaggtgtggaaatttcagaggtaccaattaattatgactttccacgacagacctgtgctgcctcctcctatgatcatactgagtcacatttatatcattatcatgcgattgagcggtcgttgccgaaagaagcgagaaggagaccaagaggagcgcgacaggggcttaaagttattcttatcagacgaagagttgaagaggttgcatgagttcgaggaacaatgcgtccaagagcattttcgtgagaaggaggacgaacagcagtcctcttcagatgagcgtattagagtcacaagcgagagggtggaaaacatgtccatgagattggaggagattaacgagcgagaaacttttatgaagacaagtcttcagactgtggatctgagactggcacagttagaagaactgagtaacaggatggtgaatgccctagagaacctggccggaatagatcgtagtgatctcatccaggcccgctcgagggcttccagcgagtgtgaggccacgtatctgctccggcagagtagcatcaatagcgctgatggctattctctctatagatatcattttaatggagaagaactgctgtttgaagacactagcctgtctaccagtcccggcactggcgttcgtaaaaaaacctgtagtttccgtatcaaggaggagaaggacgtgaaaactcacttggtgccggagtgccagaactctctgcacctatcactgggtaccagtacctctgctacaccagacggaagtcacttagcggtcgacgacctgaaaaacgctgaagagagtaagctgggccctgacatcggcatatccaaggaagacgacgaaaggcagacagattcgaagaaggaagaaaccatcagcccatccctcaataagaccgatgtcatccacggccaggataaatccgacgtgcagaacacgcagctgactgtggagacaacaaatatcgaaggaacaattagctacccgctcgaagagacaaaaattactcgatacttcccagacgagacgatcaatgcctgtaaaactatgaaatcaaggtcgttcgtgtacagcagagggagaaagctggtcggtggcgtaaatcaggatgtcgagtactccagtatcacagatcagcagttgaccacagaatggcagtgccaagttcagaaaatcactcgcagccacagcaccgatataccgtacatcgtctccgaggctgctgtccaggccgagcataaggagcagtttgccgacatgcaggatgaacaccatgttgcagaggccatccccagaatccctaggctaagcttaacaattaccgacagaaacggtatggaaaatctgctgtccgtcaagcccgaccaaactcttgggtttccctcactgagatctaagtcactgcacggacatccaagaaacgtcaagtcaatccaaggtaaactggatcgttccggtcatgcctccagcgtttctagtttggtcattgtctcggggatgacagctgaggagaaaaaggtgaagaaggagaaggcttccaccgaaactgagtgttag

SEQ ID NO: 26774 - DNA, 4173 bp, synthetic construct
  misc_feature 1..4173: note = Description of Artificial Sequence: Synthetic coding sequence
  source 1..4173: mol_type = other DNA
atgaaggacagcaaccggtgctgctgcggccagttcaccaaccagcatatccccccacttccttccgcaacaccgagcaaaaatgaggaggaatctaaacaggtcgagactcagcctgaaaagtggtctgtcgccaagcacacccagtcctaccctacagacagctatggcgttcttgaatttcagggtgggggttacagcaataaagctatgtacattcgagtctcctatgacaccaagccggactccctactacatctgatggtgaaggattggcagctcgaacttccaaaactgctcatctcagtacatggaggattgcagaactttgagatgcagcccaagctgaagcaggtctttggcaaggggttaatcaaggcagccatgactacgggagcctggatcttcactgggggggtgtcaactggcgtgataagtcacgtcggggacgcattaaaagaccatagctcgaagtcccggggcagagtgtgtgcaatcggcatcgctccctggggcatcgtagagaataaagaagatctcgttggtaaagatgtgaccagagtttaccagaccatgtcaaatcccctcagcaaactgagtgtgctgaacaattcgcacacacatttcattctggccgataacggtacgcttggaaagtacggcgccgaggtcaaactaagacgactgctggagaagcacattagcctgcagaagattaatacaaggctgggtcagggtgtgcctctggtggggttggtggtggaaggagggcccaacgtagtaagcatcgtcctcgaatatctgcaggaagagccacccattcccgttgtgatctgcgatggcagcggtagagcatctgatattctgtccttcgctcacaaatattgtgaggaagggggcatcatcaatgaaagcctaagagagcagctcctcgtcacaattcagaagactttcaactataataaggcacagagccaccagctctttgctatcatcatggaatgcatgaaaaaaaaggagttagtgaccgtgtttcgtatggggagtgagggccagcaggatattgaaatggctatactaaccgctctccttaaggggaccaacgtatcagctcccgaccagctgagtctcgctctggcctggaacagggtggatattgcgcggtcacagattttcgtgttcggcccccattggcctcccctcggcagtctcgctccaccaacagacagcaaggccaccgagaaggagaagaagccccccatggccactacaaagggcggccgcgggaaaggcaaggggaagaagaagggtaaagtgaaggaggaggtagaagaggagacggaccctcgaaagattgagttgctgaattgggttaatgccctggagcaggccatgctggatgccctggtcctggaccgcgtcgattttgtcaaactgttgatcgagaacggggtaaatatgcagcactttctgaccatcccaaggcttgaggagttgtataatacgaggctgggcccccctaataccttacatcttctggtaagggacgtgaagaaaagcaacctcccaccagactatcatattagcctgatcgacataggccttgtcctggagtatctgatgggtggggcctacaggtgcaactacacccggaaaaattttcggaccttatacaataatctgtttggacctaaaaggccaaaggctcttaagctgctggggatggaggacgatgagcctcctgccaagggcaaaaagaagaagaaaaagaagaaggaagaggagatcgatatcgacgttgatgatcccgcggtgagcagatttcagtatccctttcatgagctcatggtgtgggccgttctcatgaagagacaaaagatggctgtgttcttgtggcagagaggggaggagtctatggctaaggccttggtcgcatgtaagttgtacaaggccatggcgcacgaaagcagcgagagcgatcttgtggatgatatttcgcaggatctcgacaacaacagcaaggacttcgggcagctcgccttagagctgcttgaccagtcatataaacacgatgaacaaatagcgatgaaactgttgacatacgaactcaaaaattggtccaactccacttgcttaaaattggcagtcgccgccaaacatagggactttatagcacatacctgtagccaaatgctgctgaccgacatgtggatggggaggctcaggatgcggaagaatccaggattgaaggtgatcatgggcattttgcttccacctaccatcctgtttctggagtttagaacatacgacgatttcagttatcagacatccaaggagaacgaggacggcaaagagaaggaagaggaaaacaccgacgccaacgctgacgccggtagtagaaagggtgacgaggaaaacgagcacaaaaagcagcggagtatccccatcggaaccaagatctgtgagttttataacgctcctatcgtgaaattttggttttataccatatcctaccttggctacctgctgctttttaattacgtgatactggtgcggatggacgggtggccaagccttcaagaatggatagtcatctcatacattgtgtctttggcactagaaaagatcagagaaatcttaatgtccgagcctggaaaactctcccaaaaaatcaaagtgtggctgcaggagtattggaatattactgacctggtggctatttctacattcatgattggagcgattttgcgcctgcagaaccagccttacatgggctatggcagagttatctactgcgttgatataatcttctggtacatccgcgttctggacattttcggggtgaacaagtatctgggaccttatgtaatgatgatcggtaaaatgatgatagatatgctgtattttgtggtgatcatgctcgtggtgcttatgtcattcggtgtggcccggcaggccatacttcatcccgaagaaaagccctcatggaaattagccagaaacatcttttacatgccttattggatgatttacggtgaggtgtttgcggatcagatagacctgtacgctatggagatcaaccccccttgcggagaaaacctgtacgacgaggaaggcaagcgtctccctccatgtattccgggggcgtggctgacgcccgctttgatggcatgctatctcctggtcgcaaacatcctgctcgtgaatcttctcatagctgtctttaacaatacttttttcgaggtaaaaagcatttcaaatcaagtgtggaagttccagagatatcagctcatcatgacttttcatgaccgccctgtgctgccacctccaatgattatcctctcccacatttatatcattatcatgcgattgtccggccggtgcaggaaaaagagggagggagaccaggaggaacgagaccgaggcttgaaactgttcctgtctgatgaagagcttaaaaggctgcatgagttcgaagagcagtgcgtgcaggagcactttcgggagaaggaagatgagcagcagtcttcaagcgacgaacggataagggtgaccagcgaaagagtcgagaacatgagcatgcggcttgaagagatcaacgaaagggaaacctttatgaaaacctcccttcagactgtcgatctgaggctggctcaactggaggagctctctaataggatggtgaatgcccttgagaacctggctggcatcgataggagtgacttaatccaagctagatccagggcgagctccgagtgcgaagccacgtatttgctgcggcagtcttctattaattctgcggatggttacagcctatataggtatcacttcaatggtgaagaactcctgtttgaagacaccagtctctctacttcccccggtaccggcgtgagaaagaagacatgcagctttagaataaaggaagaaaaggatgtgaagacacacctcgtgcccgaatgtcagaacagcctgcatctgtccctgggtacgagcacctctgccacaccggatggcagccaccttgctgtggacgacctgaagaatgctgaagagagcaagctgggccccgacatcgggatctcaaaagaagatgatgagcggcagactgatagcaaaaaggaggagactatttctccatccctcaataagactgatgtgatccatgggcagtag

SEQ ID NO: 26775 - DNA, 4584 bp, synthetic construct
  misc_feature 1..4584: note = Description of Artificial Sequence: Synthetic coding sequence
  source 1..4584: mol_type = other DNA
atgtacatccgggtgagctacgacaccaagcccgacagcctgctgcacctgatggtgaaggattggcagctcgagctgccgaagctgttaatcagcgttcacggagggctacagaattttgaaatgcagccgaaacttaaacaggtctttggaaaaggtcttatcaaagccgccatgaccaccggagcctggattttcactgggggagtcagtaccggcgtcatttcccacgtgggagatgccctgaaggaccactcatcaaagagccggggccgggtctgtgctatcgggattgcaccttgggggattgtggagaataaggaagacttagtcggtaaggacgtgacacgagtgtaccagacaatgtcaaaccccttgagcaagctgtcagtgctgaacaatagtcacacacacttcatcttggccgataacggaacattgggtaaatacggagccgaggtgaagctcagacgcctgctggagaagcatatttccctacaaaaaattaatacccgtttgggtcaaggagtacccctcgtgggtcttgtcgtggagggcggccctaacgtcgtctccattgtccttgagtacttgcaggaggaacctcccatcccggtagtcatctgcgatggctctggccgggcatctgatatcctgagctttgctcataagatcattaatgaatcactgagagagcaactgttggtgaccattcagaaaaccttcaattacaataaggcccagtcacatcagctgttcgctataatcatggaatgtatgaagaagaaagaactggtgacagtattccgcatgggctctgaggggcagcaggatatagagatggctatcttgacagctcttctgaaaggcacaaacgtttccgcacctgatcaactcagcctcgcgctcgcctggaatagggtcgacatcgcacgttctcaaatattcgtgtttgggccccactggccacctctggggagcttagcacctccgacggacagcaaggctacagagaaggaaaagaaaccccctatggccacaaccaagggcggccgtggaaagggaaagggtaaaaagaaagggaaagtgaaagaggaggtcgaggaggagactgatccacggaagatcgaattgcttaactgggtgaacgctttggagcaggccatgctggacgctcttgtgctggaccgggtggattttgtcaagctcctgatcgagaatggcgtgaatatgcagcatttcctgacaattccccgacttgaggagctgtacaacacccggctcggaccacccaataccttacacctgctggtgcgggacgttaagaagtccaatctgccaccagattaccacataagtctgattgacatcgggcttgtgctggaatatctgatgggcggggcctatcgatgcaattatacacgcaagaacttcaggactctttataacaatctgttcggacctaagcgtcccaaggctctcaagctgctcggtatggaagacgatgaaccgccagccaagggtaagaagaaaaagaagaagaaaaaggaagaagagattgacatcgatgtcgatgacccggccgtgtcaaggttccagtacccattccatgagctgatggtgtgggccgttctcatgaagcggcagaaaatggcagttttcctctggcagcgtggggaggaaagtatggctaaggccttggtggcctgcaagctgtacaaggcaatggcgcatgaatcctcagagagcgacttagttgacgacatcagtcaggacctagataacaactcaaaggattttgggcagttagctctggaactgctcgatcagagctataagcacgacgagcagatcgccatgaaactcctaacttacgaactgaaaaactggtctaactctacctgccttaagctagcagtcgccgctaagcaccgagactttatcgcccacacttgcagtcagatgctccttaccgatatgtggatgggtagactgcggatgagaaaaaaccccgggctcaaggtcattatgggcatcctactaccaccgaccatcttgttcctcgagttccgcacttacgatgattttagctaccagaccagtaaagagaacgaagatggcaaggaaaaagaggaagaaaacaccgacgccaatgctgacgcgggctccagaaagggtgacgaggagaatgagcacaaaaaacagagatcaattccaattgggacaaaaatttgcgagttttacaacgccccgatcgtaaagttctggttttacacaatctcctacttgggctatctcctcctctttaactacgtgatactggtcaggatggacggctggcctagcttacaggagtggatcgttatctcctatatagtgagtcttgccttagagaaaattcgcgaaatcctgatgtctgaaccagggaagcttagccaaaagatcaaagtctggctccaggaatattggaatatcacagatctggttgctatcagcactttcatgattggcgctatcctccggctccagaaccagccatacatgggctacggacgcgtgatttattgtgttgatataattttttggtatattcgagttctagatattttcggtgttaataaataccttggcccttatgtaatgatgattggaaaaatgatgatagacatgctatacttcgtagtgatcatgctggtcgttctgatgtcttttggtgtcgcccgccaggccatcttgcacccagaggagaagccctcatggaaactggctcggaatatattttatatgccatactggatgatttatggtgaagtttttgctgatcaaatcgatctgtatgctatggagattaatcctccctgtggagaaaatctatacgacgaggagggtaagcgtctgcctccctgtattccaggtgcttggctgactccagcactcatggcgtgttatcttctagtggcaaacatactgcttgtaaacctgctcattgcggtgtttaataataccttctttgaagtgaagagcatcagcaaccaggtctggaagttccaacggtaccagttgataatgacgttccatgatagaccagtgctgcccccacccatgataattctctctcatatctacatcatcattatgcgcctgagcgggcgttgccgcaaaaaaagggagggcgaccaagaggaacgtgacagaggcctgaagctgtttctgtcagacgaggaactgaagagactccacgagttcgaggaacaatgcgtgcaggagcatttcagagagaaggaagacgaacaacagtcgtcctctgacgaaagaatacgtgtgactagcgagcgggttgagaatatgtctatgcgtctggaggagataaatgaacgggagacattcatgaaaactagcctgcagaccgttgacttaaggctagcccagctggaagagctctccaacagaatggtgaacgccctggagaatctcgctggcatagacagatcggacttaatccaggcccgctcacgcgcaagttctgagtgtgaggcaacttatctgttgcggcaatcatccatcaatagtgctgacggatattcactgtaccgataccatttcaatggcgaagaactcctgtttgaggataccagtctttctacaagccctggaaccggggttcgcaagaagacatgcagctttcggatcaaggaggagaaggacgtgaagacccacctagtccccgagtgtcagaattccctgcatttgagtctgggcactagcacttcggccaccccagatggatcacacttagccgtcgacgatctcaagaacgccgaggagagtaagctcggaccagatattggcatttcgaaggaggacgatgaaaggcaaacagatagcaaaaaggaggagacaatctctccaagtttgaataagaccgacgtgatccatggacaggataaatctgacgtgcaaaacactcagctgacagtggagaccactaacatcgaaggcactattagttaccccctcgaggagacaaagattactagatatttcccagacgagacaatcaatgcctgcaagacaatgaagtctcgcagtttcgtttatagccggggcagaaagctggtaggtggggtgaatcaggatgtagagtactcctctataacggaccagcagcttactactgagtggcagtgtcaggtccagaagattacaaggagccacagtacggacatcccatacattgtgagtgaggcggccgtgcaagccgaacacaaggagcagttcgccgatatgcaagatgaacaccacgtggctgaggcaatcccccgcattccacggcttagcctgacaataaccgaccgtaatggaatggaaaacttgttgagcgtcaagccggaccaaacacttgggttcccgtccctcaggtctaaatcgctgcatggccaccccaggaatgttaagagcatccagggaaagttggacagatctggccatgcaagtagcgtctcatccttggtaatcgtgtccggaatgacagcagaagagaagaaggtgaaaaaagagaaggctagtactgaaactgagtgctag

SEQ ID NO: 26776 - DNA, 1479 bp, synthetic construct
  misc_feature 1..1479: note = Description of Artificial Sequence: Synthetic coding sequence
  source 1..1479: mol_type = other DNA
atggccctgaacagcggcagcccccccgccatcggcccctactacgagaatcatggctaccagcctgagaatccctacccagcgcagcctactgtggtccccactgtttacgaagtgcaccctgcacagtactacccaagcccagttccccagtacgctccacgggtcctgacacaagctagcaaccccgtcgtgtgcacccagcccaaaagtccctcgggcacagtgtgcacgagtaagacaaagaaggcgctgtgcataacactgacactcgggactttccttgtcggcgccgctctggccgcggggttactgtggaaatttatggggtcaaaatgtagtaattccggcatcgagtgtgatagcagcgggacatgtataaatccgagcaactggtgcgacggcgtgtcacactgtccaggaggagaagacgagaacagatgtgttcggctgtatggacctaatttcatccttcaggtatattcgtcccagcggaagagctggcaccccgtctgccaggacgactggaatgaaaactacggacgcgctgcatgtcgcgacatgggctataaaaataatttctactcctcccagggaatcgtggacgacagtggatccactagcttcatgaaactgaacacttccgcaggaaacgtcgacatatataagaagctgtatcatagcgatgcttgtagctcaaaagccgtcgtcagcctgagatgtattgcgtgtggagtcaacttgaactcctctcgacaaagcagaatagtgggcggggagtccgccttgccaggcgcttggccatggcaggtgagcctgcatgtacagaacgtccatgtgtgcggcgggagcataattacccctgagtggattgtgactgcagcccattgcgtggagaagcccttgaacaacccctggcactggacagcttttgcgggtattctgcgtcagtcctttatgttctacggggctgggtaccaggtggagaaagtcatatcccaccccaactacgacagtaaaaccaaaaacaacgatattgccctgatgaagttacaaaagcctttgacctttaatgatttggtgaagccagtatgtctcccaaatcccggcatgatgttgcagcccgagcagctgtgttggatttctggctggggggccaccgaagagaagggcaagacctccgaagtcttgaatgctgcaaaggtcctgctgatcgaaacccagcggtgcaactctcggtatgtttacgataacctaattactccagcaatgatatgtgccggcttcctgcaggggaatgtggactcttgccagggagattccggaggaccactagtcacctccaagaacaatatatggtggctgataggcgatacctcctgggggagtgggtgcgcaaaagcctaccgacccggcgtgtacgggaatgttatggtctttaccgactggatctaccgccagatgagagcggatggctag

SEQ ID NO: 26777 - DNA, 1590 bp, synthetic construct
  misc_feature 1..1590: note = Description of Artificial Sequence: Synthetic coding sequence
  source 1..1590: mol_type = other DNA
atgccccccgccccccccggcggcgagagcggctgcgaggagcggggcgcagcaggacatattgagcatagtaggtacttgtccctgctggacgccgtcgataacagtaaaatggcacttaactcaggctcccctcccgcaattgggccttattatgagaatcacggctaccagcccgaaaatccgtatccggcacaaccaacagtggtaccaacggtgtatgaggttcaccctgcccagtattatccatcccctgtcccacaatacgccccacgggttttgacccaggctagcaatccggtggtctgcacccagcccaagtcaccttccggtacagtgtgtacatcaaaaaccaagaaagctctgtgcattactcttaccctgggcacctttctggtgggcgccgctctcgcggccggcctgctctggaagttcatgggttccaaatgctctaatagtggcattgaatgcgacagtagtgggacttgtatcaatcccagcaattggtgcgatggggtctcccattgccccgggggcgaagacgagaatcggtgtgtacgcctgtatggtcctaatttcatcctccaagtctacagtagtcagaggaagagttggcaccctgtgtgtcaggatgactggaacgagaattatgggcgggcagcatgccgcgatatgggctacaaaaataacttttattcctctcaaggcatcgtggacgatagcgggtctacgagcttcatgaaactcaatacttcagccgggaatgtggacatctacaaaaaattgtaccatagtgacgcgtgcagtagtaaggcagtggtgtcactgcggtgtatcgcctgtggggttaatttaaactcaagccgccaaagccggattgtaggaggggagagcgcattgcccggggcctggccatggcaggtaagcctgcatgttcagaacgtgcatgtgtgcgggggtagcattatcacccccgagtggattgttactgctgcccactgcgtggagaagccccttaacaatccttggcactggacagccttcgccggaatacttagacagtcctttatgttctacggtgctgggtaccaagtggaaaaggtgatctcacaccccaattatgactccaagactaagaacaacgacattgcacttatgaaactgcagaagcccctgacattcaacgatctagtaaaacctgtctgcctcccaaaccccggcatgatgttgcagcccgagcagctgtgctggattagtggctggggggcaaccgaggaaaagggcaaaacctccgaagtgctgaacgctgccaaagtgctgctgattgagacccagcggtgtaatagtcggtatgtgtatgacaacctgattacgccggcaatgatctgtgccggatttctccagggtaatgtcgattcatgccagggcgattccggcggcccactggtaactagtaagaacaacatttggtggcttattggagacacctcttgggggtctgggtgtgccaaggcataccgccccggagtttatgggaacgtaatggtcttcaccgattggatctatcgacagatgagagccgacggctag

SEQ ID NO: 26778 - DNA, 1470 bp, synthetic construct
  misc_feature 1..1470: note = Description of Artificial Sequence: Synthetic coding sequence
  source 1..1470: mol_type = other DNA
atggccctgaacagcggcagcccccccgccatcggcccctactacgaaaatcacgggtatcaacctgaaaatccataccccgcacagccaactgtggttcccaccgtatatgaagtgcatcccgcccagtattatccctcacctgtgccccagtatgctcctcgggtgttaactcaagcctcaaatccagtggtttgcacacaaccaaagtctccctccggcactgtatgtacatccaagacaaagaaagcactgtgcattacattaaccctggggacctttcttgtgggagcggctcttgccgctggcctgctttggaaatttatgggatccaaatgcagtaactcaggaatcgagtgcgattcttccggaacctgcattaacccctccaactggtgtgatggcgtgtcccattgtccagggggggaagacgagaatagatgtgtgaggctgtatggacctaactttattctccaggtgtacagcagtcagcgtaagtcctggcaccccgtgtgtcaggatgactggaacgaaaactatggtcgagcggcctgcagagatatggggtacaagaacaacttctattccagccagggcattgttgatgatagtggttccaccagctttatgaaactgaacacgtcggctggcaacgtggacatctacaaaaagctgtatcacagtgacgcatgtagcagcaaggcagtggtgagcttaagatgtatcgcctgcggcgtgaaccttaacagtagtaggcagtctcgcatcgttgggggcgagtcagcgctccctggagcttggccttggcaggtctcactgcatgtgcagaacgtccatgtctgcggcgggtcgatcatcacacctgagtggattgtgaccgcagctcattgcgtggagaaaccactcaataatccttggcattggactgccttcgcaggcattctaaggcagtctttcatgttctatggtgcagggtaccaggtggagaaagtgatctctcacccaaattacgactccaaaacgaagaacaacgacatcgcactgatgaagctgcaaaaacctttgacgttcaacgatttggttaagcccgtgtgcctgcccaatccgggaatgatgttgcagccagagcagctgtgctggatctctggatggggagctaccgaggagaaggggaagacttctgaggtcctgaacgctgcaaaagtgctgcttattgaaactcaaaggtgcaactctcgatacgtttatgacaatttgattacccccgctatgatttgcgccggctttctccagggcaatgtcgattcgtgtcagggagattctggaggacccctggtcacgtcaaagaacaacatctggtggctgatcggggatacgtcgtggggttcaggctgtgctaaagcttatcgcccgggcgtgtatggaaacgttatggttttcacagactggatatataggcaaatgcgctag

SEQ ID NO: 26779 - DNA, 240 bp, synthetic construct
  misc_feature 1..240: note = Description of Artificial Sequence: Synthetic coding sequence
  source 1..240: mol_type = other DNA
atggccctgaacagcggcagcccccccgccatcggcccctactacgaaaaccacgggtaccaacccgagaatccttatcctgctcaacccacggtggtccccacagtgtatgaagtccatccagctcagtattatcctagtcccgtgccacagtacgcccctcgggtgctgacacaagcaagtaaccccgtggtttgcacacagcctaaatctccctccggtacggtatgcacaagctag

SEQ ID NO: 26780 - DNA, 1479 bp, synthetic construct
  misc_feature 1..1479: note = Description of Artificial Sequence: Synthetic coding sequence
  source 1..1479: mol_type = other DNA
atggccctgaacagcggcagcccccccgccatcggcccctactacgagaatcacggttatcaacctgagaacccataccccgcacaacccactgtggtgccaaccgtgtatgaggtgcatcctgctcagtactacccctctccggtgccacagtatgctcccagggtgctaacacaggcaagcaatcccgtggtctgtacacagcctaagtctcctagcggaacagtgtgcaccagtaagactaaaaaggctctgtgcatcacactgactctcggcacctttttggtgggtgccgccctcgccgctggcctgctgtggaagtttatggggtcgaagtgctctaacagtggcatagagtgcgattcctcgggcacatgcattaatcctagtaattggtgtgacggcgtgagccactgccccgggggtgaagatgagaacaggtgtgtccgcttatacggtccgaattttatcctacaagtgtatagtagtcagcgtaagagttggcatcccgtgtgccaggacgactggaatgaaaattacggcagggccgcatgtagggatatggggtacaaaaataatttctactcatctcagggaattgtggacgattccgggtcgacctccttcatgaagctgaacaccagtgctggcaacgtcgatatatacaagaagttgtaccactctgacgcctgttcatccaaggcagttgtctctttgcgctgcattgcctgcggcgtcaatcttaactcctcacgccagtcaaggattgtgggaggagaatctgcattgcccggcgcgtggccttggcaggtctccctgcatgtgcagaacgtgcatgtgtgtggcggatctatcatcactcctgaatggattgtgacggcagcacattgcgtggagaaaccccttaataacccgtggcattggacagcattcgccggaatcttgcgtcagtcattcatgttctacggcgccggctaccaggtggaaaaggtgatcagccaccccaattacgacagcaaaactaagaacaatgacatcgccctcatgaagcttcagaagcccctcactttcaacgacctggttaagcctgtctgtttgcccaacccagggatgatgctgcagcctgagcaattgtgttggatctctggctggggtgcaaccgaggagaagggcaagacctctgaggtgttaaacgccgcgaaagtacttttgatagaaactcaaagatgtaacagcaggtacgtctacgataatctcattacgcccgccatgatctgcgcggggtttctccagggtaatgtcgattcatgccagggcgacagcggcggccctctggtgacgtccaagaataatatctggtggttgataggcgacacttcatggggatctgggtgcgccaaggcgtacagaccaggtgtgtacggcaacgttatggtgttcactgactggatctatcggcagatgagagcggatggctag

SEQ ID NO: 26781 - DNA, 717 bp, synthetic construct
  misc_feature 1..717: note = Description of Artificial Sequence: Synthetic coding sequence
  source 1..717: mol_type = other DNA
atgtacgcccccggcggcgccggcctgcccggcggccggcggcggagatcaccgggaggcagtgcactacccaagcagccggaaaggagtttggcaagtgctctcccaggggctctgtcaatcactgccctctgtaccgcactggctgagcccgcatggctacacatccacggcggcacatgttccaggcaggaattgggggtctctgacgttttggggtatgtgcaccccgacctgctcaaagacttctgcatgaacccccaaactgtccttctgctgagagtgattgccgctttttgtttcctcggcatcttgtgttcactctccgcatttctgctggatgtctttggcccaaaacacccagctctgaaaattacgcggaggtatgcattcgctcacatcctcacagtgctgcagtgcgcaaccgtgataggatttagctattgggcttccgagctgattctggcccagcagcagcagcacaaaaagtatcacggttcacaggtgtacgttacgttcgccgtgtcgttctatctcgtggccggtgcgggtggcgctagtatactggccacagctgcgaacctgctgcgacactatccaaccgaagaggaggagcaggccctggaactgctgagcgaaatggaggaaaatgagccctatccagcagagtatgaagtgattaaccagtttcaaccaccgcctgcgtacaccccctag

SEQ ID NO: 26782 - DNA, 717 bp, synthetic construct
  misc_feature 1..717: note = Description of Artificial Sequence: Synthetic coding sequence
  source 1..717: mol_type = other DNA
atgtacgcccccggcggcgccggcctgcccggcggccggcggcggcgcagtcctggcggatccgcacttcctaagcaacctgagaggagcctcgcatccgcactgcctggagctctctctatcaccgccctctgcactgctctggccgagcccgcatggctacatattcacggtggaacctgctctcgtcaggagctgggagtgtccgatgtacttggttatgtgcatccagatctgcttaaagacttttgtatgaaccctcaaaccgtattgctcctgcgggtgattgctgcattctgctttcttgggattctgtgttccttgtctgcctttttactggatgtgttcggaccgaaacatcccgcacttaaaatcacacgcaggtacgcatttgcccacatcctgaccgtgctgcagtgtgccactgttataggttttagctactgggcaagcgagctgattcttgctcagcaacagcaacataaaaagtatcatggcagccaagtgtatgtcacattcgccgtttccttctacctggtggcgggggcggggggtgcttctatactcgccaccgccgccaacctcctgaggcactatccgactgaggaagaagaacaagcactcgaactgctcagtgagatggaagaaaacgagccataccctgcagaatatgaagttataaatcaatttcaacccccgccagcatacaccccatag

SEQ ID NO: 26783 - DNA, 3075 bp, synthetic construct
  misc_feature 1..3075: note = Description of Artificial Sequence: Synthetic coding sequence
  source 1..3075: mol_type = other DNA
atgtgcgcccggatggccggccggaccaccgccgccccccggggcccatatggcccttggctgtgcctccttgtggcactcgcccttgatgtggttcgtgtggattgcggtcaggcgccgcttgatccagtttatttgccggcggccttggagttgctggacgcccctgaacacttcagggtgcagcaggtgggacactatcccccagctaacagctctctgtccagcaggagcgagacctttctccttctacaaccctggcctagggcgcagcccctgctgcgagcgtcctaccccccctttgccacccagcaggtcgtgccacctcgagtcacagagcctcaccagcggccagtgccctgggacgtgcgagctgtgtccgttgaggcggctgtcaccccagccgaaccctacgccagggtgctcttccatctgaagggccaagactggcccccgggatccgggtccttgccttgcgcacggttacacgcaacacaccccgccggaacagctcaccaggcatgcaggtttcagccaagtctgggtgcttgcgtggtcgagttggaactgccaagccactggttcagccaagccagcactacaagggccgaactggcttacactctggaacctgccgctgaaggacctggaggttgcggatccggtgaagagaacgaccctggagagcaagcgcttcctgtcgggggagtggaactgagaccagctgatcctccgcagtaccaggaagttccacttgatgaggcagttaccttgcgtgtgcccgatatgcccgtccggccaggacagctcttcagcgccacattgctcctgagacacaattttaccgcttctctgctaacactgcgtattaaagttaagaaaggtcttcacgttaccgctgccaggcccgcccagccaaccctctggaccgccaagctggataggtttaaaggcagccgacatcacacaacattgatcacctgccacagagcaggtctgactgagccagactctagctcaccattagaactcagcgagtttctgtgggtggacttcgtggtggagaattccactggcggcggtgtggcagtcacacggccggtgacttggcaattagagtacccgggtcaggctcccgaagccgaaaaagataagatggtgtgggagatcctcgtgtccgagagagatattcgggcacttattcctctggctaaagctgaggaactggtgaatactgctcccctgacaggcgtgccccagcatgtgccagtcaggttagtcacagttgatggaggaggggccctggtcgaggtgactgagcatgttggatgtgagagcgcaaatacccaggtactccaagtttcagaggcttgcgatgccgtgttcgtggccggaaaagagtcaaggggcgctagaggggttcgagtggatttttggtggcgcaggctgcgtgcttcccttcgtctgaccgtgtgggcccctctactccccctccgcattgagttgactgacactactcttgagcaggtcagggggtggcgggtgccaggccctgcagagggcccagccgaacccgccgccgaagcctcggatgaggctgaacgtcgggccaggggttgtcacctgcaataccagagggccggtgtgaggttcctggcaccattcgctgctcatcctctggacggaggtcggcggcttacccatctactgggaccagattggttgttggacgtaagccacctcgtagcccctcatgccagggtgttggattcacgggtagcctcactggagggcggacgggtcgttgttggccgcgaacctggtgtgactagcattgaagtccggagccctctcagtgattccattctgggggagcaggccctagccgtgaccgacgataaagtatccgtccttgaacttagggtgcagccagtgatgggaatttcccttactttaagcagaggaactgctcacccaggagaggttacagccacctgttgggcccagtctgcgttacctgcacctaaacaggaggtcgctctgtctctctggctgtccttttctgaccacactgtggcccccgctgaactttatgatagaagggacttgggcctgagtgtgtcagctgaagaaccaggagccatactgcccgcagaggagcagggggcccagctcggcgttgttgtttctggggcaggggccgagggactacctttacacgttgctttacatccaccggagccgtgtcgccgcggcaggcatcgggtgcctctggcttcaggaaccgcgtggctgggcttacctcccgcatccactcccgcccccgctctgccatcctctccagcctggtccccacccgctacagaggccactatgggcggaaagcggcaggtcgcgggaagcgttggggggaacacgggagtgagaggcaaattcgaacgggccgaggaagaggctcgcaaggaggaaacggaagctagggaagaagaagaggaggaagaggaggagatggttccggctccacagcacgtcacggagctggaactcggaatgtacgcactgctcggagtattttgtgtggctatctttatcttcctagtgaacggggtggtgttcgtgctgaggtaccagcgtaaagagccccctgatagcgccaccgatccaacatcaccacagcctcacaattgggtgtggctggggacggatcaagaggagctgtcacgccagttggaccgtcagagtcccgggccaccgaagggcgagggcagttgtccatgtgagtcagggggggggggagaagcccccactttggctcctggacctccgggcggaacaacatccagctccagcacccttgccagaaaagaagccggcggaagacgcaagagggtcgagttcgtaaccttcgctccagcccccccggctcaatctccggaggaacctgtaggtgctccagccgtgcagtcaatactggtggcgggcgaggaggatattcgatgggtgtgtgaagatatgggtctgaaagaccccgaagaactgcgcaattatatggagcgcatcagaggcagtagctag

SEQ ID NO: 26784 - DNA, 3072 bp, synthetic construct
  misc_feature 1..3072: note = Description of Artificial Sequence: Synthetic coding sequence
  source 1..3072: mol_type = other DNA
atgtgcgcccggatggccggccggaccaccgccgccccccggggcccttacggaccttggttatgtctcttagtggcccttgctctggatgtcgtcagagtcgattgtggtcaagctccactggatcctgtgtatttgccagcggctttggagctactggacgcaccggagcattttcgtgttcagcaagttggacattatccgcctgctaactcatcattatcaagccgatccgagaccttcttattactgcagccttggccaagagcacagccactgctgcgggctagctatccccctttcgctacccaacaggttgtcccccccagagttactgagccacaccagcgacctgtgccatgggatgtgcgagctgtgagtgtcgaagccgccgtgacacccgctgaaccctatgcaagagtcttgtttcacctgaagggacaggactggccacccggctcagggtcactcccttgtgccaggctgcatgccacgcaccctgctggcaccgcccaccaggcttgtaggtttcaaccctcgctaggcgcctgtgtggtggaactcgagctccccagccattggttctcgcaggcatccaccaccagggccgagctcgcttataccctggaacccgctgcagagggccccggcggctgtggttccggagaagagaatgacccgggggagcaggcccttcccgtgggtggggtcgaactcagaccggcagatcctcctcaataccaagaggttccccttgacgaggcagtgaccttgagagtacccgatatgcctgtaaggccgggccagctgttttccgcgaccctcctgctccgccataattttaccgcatctctgctcaccttgcggattaaggtaaaaaaagggctacatgttacagcagcaaggccagcccagccaaccctgtggaccgcaaaactggacagatttaagggaagtcggcatcacaccaccttgattacctgtcacagagctggtctgactgaaccggactcatcaccccttgagctgtctgagtttttgtgggtagatttcgttgttgaaaactccacgggtggcggcgtcgcagtgacgcgccccgtcacgtggcagctcgagtatccaggtcaggcgcccgaagccgaaaaagacaaaatggtgtgggagattctggtgagtgagcgtgacatccgagctttgataccattggcgaaggcggaagagcttgtgaataccgccccactaactggcgtcccccagcatgtgccagtgcgactggtcacagtggatggcggtggcgccctggtcgaagttaccgaacatgtgggatgtgagagcgctaacacgcaggtactccaagtgagcgaggcctgcgacgctgtgttcgtggcgggaaaggaatctagaggagcccgcggcgtgagggtagacttctggtggcgccgcctgagagcaagcttaagactgacagtttgggcccccctgcttcctttgcgaattgagctgacagatacgacccttgagcaagtgagaggatggcgcgtgcctggtcctgctgaggggcctgcggaacccgccgctgaggcctctgatgaagccgagagacgggcgagaggctgccaccttcagtaccagcgggcaggtgtcagatttctggcgccattcgctgcccatcccctggacggcggtcgccggctaacccacctgctgggccccgactggctgctcgacgtgtctcatttggtggccccacatgctcgcgtcctggattccagagtggcgagccttgaggggggcagggtggttgtgggcagagagcccggtgtcacatccattgaagtacgctcacctctgagtgattccatcctgggagagcaggctctggccgttacagatgataaagtatctgtcctggagctacgggtgcagcccgtgatggggatctctcttaccttgagtaggggcacagcacacccaggcgaggtcactgcaacctgctgggcccagtcagcgctgcccgccccgaagcaggaagtggccctttcgttgtggttatcattttctgaccataccgtggcacctgctgaactgtacgaccgcagggacctgggtctcagcgtttcggccgaagagcccggagctatcctgcccgcagaggagcaaggtgcccagctcggcgtggtggtgtcaggagccggggccgaaggtctcccactccatgtggcccttcaccctcctgaaccctgccggagaggaaggcaccgagtacctctggcctccggcaccgcttggctagggctcccccccgcctcaacacctgcaccggctttaccgtcctcgcccgcgtggtcacctcctgcaaccgaggctaccatgggcgggaagagacaggttgctgggagcgtaggaggtaacacaggagtcaggggaaaatttgaaagagcggaggaagaggcacggaaggaagaaacagaagctcgtgaagaggaggaggaggaggaggaggaaatggtgcccgccccacagcacgtgaccgaactggaactaggtatgtacgcactgctcggagtattctgtgtcgcaattttcatatttctggtgaatggcgttgtttttgttcttaggtatcaaaggaaggagcctcctgacagcgctaccgatcctacgagcccccagccccacaattgggtttggctggggactgatcaggaagaactttcccgtcagttagatcgacagagccctggtccccccaagggggagggatcttgcccatgcgagtccggaggggggggcgaagccccgacacttgcgccaggcccacccggcggcacgacttctagcagttctactcttgctcgcaaggaagctggcgggcggcgcaaaagagttgagttcgtgactttcgcgccagcaccacccgctcagtcccccgaagagcctgtaggggcccccgccgtgcaatcaatcttggtcgctggggaagaggatatccgctgggtgtgcgaagatatgggtctgaaagaccctgaggaactccggaactatatggaaagaatcaggggctcatcctag

SEQ ID NO: 26785 - DNA, 1026 bp, synthetic construct
  misc_feature 1..1026: note = Description of Artificial Sequence: Synthetic coding sequence
  source 1..1026: mol_type = other DNA
atgctgcccgagcagctgtacttcctgcagagcccccccgaggaggaaccagagtatcaccccgatgccagcgctcaggagctgaatgtccgcgagtcggacgtccgcgtgtgtgacgagtcgagctgtaaatatggcggggtctgtaaagaagatggggatggcctcaagtgcgcctgccagttccaatgccacacaaattacattcctgtgtgcggttctaatggcgatacctatcagaacgagtgttttctgcgccgtgccgcctgcaagcatcagaaggagataacagtgattgcaagagggccatgttatagcgacaatggcagcggatccggcgagggagaagaagagggctctggcgcggaggtccataggaagcactcaaagtgcggtccttgtaagtacaaagccgaatgtgatgaagatgccgagaatgtcggctgtgtgtgcaacatcgactgcagcggctattcatttaatcctgtgtgcgcaagtgacgggagctcttataacaacccatgttttgtgcgagaggcctcctgcattaaacaggagcagatcgatatcagacatcttgggcattgtactgatactgacgatacttctcttctgggcaagaaggatgatgggctgcaatacagaccagacgttaaggacgcttcggaccagcgggaagacgtgtatattggcaatcacatgccatgtccagagaatctgaatggatactgtatccacgggaagtgcgagttcatctactcaacccagaaggcttcttgtaggtgtgagtccggctacactggacagcattgcgagaaaaccgacttctccattctgtatgtggtccccagccgccagaagttaactcacgtgctgattgccgcgattattggtgcagtgcagatcgctattatcgtcgctatcgtaatgtgcataaccaggaagtgtcccaaaaataaccgaggccgccgacagaaacagaatctggggcactttacctctgacaccagtagccgaatggtgtag

SEQ ID NO: 26786 - DNA, 1143 bp, synthetic construct
  misc_feature 1..1143: note = Description of Artificial Sequence: Synthetic coding sequence
  source 1..1143: mol_type = other DNA
atgggcgccgccgccgccgaggcccccctgcggctgcccgccgccccgcccctcgctttttgctgttatacaagtgtgctattgcttttcgccttcagccttccaggcagccgcgccagcaatcagcctcccggaggagggggtggcagcgggggagattgtcctgggggaaagggaaagtccatcaattgcagtgagctgaatgtgcgggagtctgacgtgcgagtgtgcgacgaatcctcctgcaaatatggcggcgtgtgcaaagaggatggggacggcctaaagtgcgcatgtcagttccagtgccatacaaattatatacctgtgtgtggttctaacggcgatacatatcagaacgaatgttttcttagaagggcggcgtgtaaacaccagaaggagatcactgtgatcgcaaggggtccttgctactctgacaacggctcaggctcgggcgaaggtgaggaggagggttcgggcgctgaggtccaccgtaagcatagcaagtgtggaccctgtaagtacaaagccgaatgcgatgaagatgcagagaacgtgggttgcgtgtgtaacatagactgttcggggtacagctttaaccctgtctgcgcctctgatggctcttcgtataacaacccctgtttcgtgcgggaggcatcctgcattaagcaggaacagatcgacatcagacatttaggccattgtactgatacagatgacacatctctgttggggaagaaagacgatggcctgcagtaccggccggacgtgaaggacgccagtgaccagagggaggacgtttatattggaaaccacatgccctgtcctgaaaatcttaatggctactgcatccacgggaagtgcgaattcatctattcgactcaaaaggcgagttgccgttgcgagtccggctatacaggtcagcattgtgagaagactgactttagtattctgtatgtggtgccatctaggcaaaaactgacccacgtgctgatcgctgccatcattggcgcggtgcaaattgccatcatagtggccatcgttatgtgcattacccgaaagtgtcctaagaataacagggggcggaggcaaaagcagaacttgggacatttcacttccgataccagctccagaatggtctag

SEQ ID NO: 26787 - DNA, 393 bp, synthetic construct
  misc_feature 1..393: note = Description of Artificial Sequence: Synthetic coding sequence
  source 1..393: mol_type = other DNA
atgcaggagcggaccggcgccgccaccgcccggcgggagagcctgccccaggctaataatcccgagcagctttgcaagcagcgatgcatcaacgaggcctcatggactatgaaacgtgtgctgagttgcgttcccgaaccaactgttgttatggcggcgagggccctctgtatgctgggtttagtcctggccctgttgtcctcaagcagtgccgaggaatatgtcggcctatctgccaatcagtgcgctgtgccagcgaaggatagggttgactgtggttacccacacgttactcccaaagaatgcaataaccgagggtgttgtttcgattctagaataccgggcgtcccttggtgcttcaaacccctccaagaggctgagtgcaccttttag

SEQ ID NO: 26788 - DNA, 285 bp, synthetic construct
  misc_feature 1..285: note = Description of Artificial Sequence: Synthetic coding sequence
  source 1..285: mol_type = other DNA
atgaagcgggtgctgagctgcgtgcccgagcccaccgtggtgatggctgctagggcattgtgcatgctgggcctggtgctggcccttttgtcctccagcagcgccgaagaatacgtggggttatctgccaaccagtgtgcagtgcccgctaaggatcgcgttgactgcgggtaccctcatgtaactcccaaagaatgtaacaatcgcggctgttgttttgactccagaatcccaggcgtaccctggtgctttaagccgctccaggaggccgaatgtacattctag

SEQ ID NO: 26789 - DNA, 1497 bp, synthetic construct
  misc_feature 1..1497: note = Description of Artificial Sequence: Synthetic coding sequence
  source 1..1497: mol_type = other DNA
atggccctgcccaccctgcccagctactggtgcagccagcagcggttgaaccagcagctcgcgcgtcagcgagagcaggaggctagactcagacagcagtgggagcaaaacagccggtactttcgcatgagtgacatatgctccagcaaacaggctgaatggtctagtaagacttcttatcaacgttcgatgcatgcctaccagcgcgagaagatgaaggaggaaaagaggcgctccctggaggctcggagagagaaacttcgacagctgatgcaggaagagcaagatctgctcgcccgggaactggaagagctacggctgagcatgaatcttcaagaacgtaggatccgtgagcaacacgggaagctcaaaagcgcaaaggaagaacagaggaaactcatcgcggagcaactactctatgagcactggaaaaagaataatcctaaattgagagagatggagctcgaccttcaccagaagcacgtggttaattcgtgggaaatgcagaaggaggagaaaaagcagcaggaggctacagctgagcaggagaataagcgctatgagaacgaatacgaacgggcccgtcgggaggctttggagcgcatgaaagcagaggaggaaaggcggcagctcgaagacaaactgcaggcagaagctctcctgcaacagatggaagaactgaagctgaaagaagtggaagctacgaagctcaagaaggaacaggaaaacttgctgaaacagcgctgggagctggaacggctggaagaggaacgcaaacagatggaagctttccggcagaaagcagaactggggcgcttcctgagacaccagtataacgctcagctgagcagaagaacccagcagatccaggaagagcttgaggccgaccggagaattctccaggccctgctggagaaagaagacgagtcccagcgtctacatctggcccgccgggagcaggtcatggccgatgtcgcatggatgaaacaagccatagaagagcagctgcagttggagagagccagagaggccgaacttcagatgctgctgagggaggaggccaaggaaatgtgggaaaagcgtgaggcggaatgggctcgggagagatctgctagggatagacttatgtcggaagtgctgacaggccgtcaacagcaaattcaagagaaaattgagcaaaaccgccgcgcgcaagaagaatctctgaagcacagagagcagctgataaggaacctcgaagaagttcgcgagctggcaaggcgcgagaaagaggaatccgagaagctgaagtctgcgcgcaagcaagaactcgaagcacaggtggcggagaggcgcctgcaagcgtgggaggcagaccagcaggaggaggaggaagaagaggaagcccgacgagtcgaacagctgtccgacgctttacttcagcaggaagcagaaacgatggcagaacagggctacaggcctaagccttacgggcacccaaaaattgcctggaattag

SEQ ID NO: 26790 - DNA, 1497 bp, synthetic construct
  misc_feature 1..1497: note = Description of Artificial Sequence: Synthetic coding sequence
  source 1..1497: mol_type = other DNA
atggccctgcccaccctgcccagctactggtgcagccagcagcggctgaatcagcagctggcccggcagagggagcaagaagctcgcctgaggcagcagtgggaacaaaattccagatactttaggatgtcagacatatgcagtagtaaacaggcagaatggtccagtaaaacgtcctatcaacggagtatgcacgcctaccagcgggagaaaatgaaagaagagaagagaaggtccctggaagccaggagggagaagcttcggcagctaatgcaggaggaacaggatctccttgcccgggagttagaagaattgcggctttccatgaacctgcaggaaaggcggatcagggagcagcatggaaaactgaaatcagccaaggaggagcagcgtaagttgatagccgaacagctcctttatgagcattggaagaagaacaacccaaagctgcgcgagatggagctcgacctacaccagaaacatgtggtcaattcctgggaaatgcagaaggaagagaagaagcagcaggaggcaactgcggaacaagagaacaagaggtatgaaaacgagtacgagagggcccggagggaggccctcgagagaatgaaagccgaagaggaaagaaggcagctggaggataagctccaggcagaagctctattgcagcaaatggaggaactgaaactcaaagaagtagaagccacaaaactgaagaaagagcaagaaaatctcctgaaacagaggtgggagctagaacgacttgaggaggaaagaaaacaaatggaagcctttcgccagaaagccgagctcggaagattcttgagacaccagtataatgcccaactttctaggagaacgcagcagatccaagaggaacttgaagcagatcgcagaattctacaagcgttacttgaaaaggaggatgaatcccaacgcctacacctggcgagacgtgagcaggtaatggcggatgtcgcatggatgaaacaagctattgaagaacagctccagcttgaaagagcccgggaagctgaactccagatgctccttcgggaagaggccaaggagatgtgggaaaagcgcgaggcagagtgggcgagagagcggtctgcacgcgatcgactcatgtcagaggtgctcactggcagacagcagcagatacaagagaagattgaacaaaatcgccgcgcacaggaagagtccctaaagcacagggagcagctaatcaggaacctggaagaggtccgtgagctggcccgacgagagaaggaggaaagtgagaagttgaaaagcgcaagaaagcaggagctggaggcccaagtcgccgagcggcgattacaggcgtgggaggctgaccagcaagaggaagaggaggaggaagaggccaggagagtggaacaattatccgatgcactgctccagcaggaggctgagaccatggccgagcagggctacaggcctaaaccctacggtcacccaaagattgcttggaactag

SEQ ID NO: 26791 - DNA, 525 bp, synthetic construct
  misc_feature 1..525: note = Description of Artificial Sequence: Synthetic coding sequence
  source 1..525: mol_type = other DNA
atggccctgcccaccctgcccagctactggtgcagccagcagcggctgaaccagcagttggcgagacagcgcgagcaagaggccagattaagacagcaatgggaacagaatagccgctattttagaatgagcgacatctgtagttcgaagcaggctgaatggtccagtaagacgtcatatcagcggtctatgcatgcgtaccaacgagagaaaatgaaggaggagaagcggaggagtttagaagctcgaagggaaaagctgagacagctcatgcaggaagagcaggacttgttggctcgcgagttggaggagttacggctgtcaatgaacctgcaagagcgccggataagggaacagcatgggaagctgaagtcagcgaaagaagaacagcgtaagttgattgcagaacaattgttgtacgagcattggaagaagaacaatcccaaattgcgcgagatggagctggacctccatcagaagcacgtggtgaattcctgggaaatgcaaaaagaggagaaaaaatag

SEQ ID NO: 26792 - DNA, 663 bp, synthetic construct
  misc_feature 1..663: note = Description of Artificial Sequence: Synthetic coding sequence
  source 1..663: mol_type = other DNA
atggccctgcccaccctgcccagctactggtgcagccagcagcggttaaatcagcagttggcaaggcagcgcgagcaggaggccagactgcggcagcagtgggagcagaactctcgatatttccgcatgagcgatatttgcagcagcaaacaggctgagtggtcgagtaagacaagctaccagaggagtatgcatgcctatcagagagagaagatgaaagaggagaaacggcgctccctggaggcccggagggaaaagctgcgccagctgatgcaggaggagcaggacctgttggcacgcgagttggaagaactcaggctgtccatgaacctgcaggaacgacgcatccgggagcagcacggcaaactgaagagcgccaaagaggaacaaagaaagctgattgccgagcagcttctttatgagcattggaaaaaaaataatcccaaactgagggagatggagcttgacctgcatcagaaacacgttgtgaatagttgggaaatgcagaaggaggagaagaagcagcaggaggcgacggctgagcaggaaaataagagatatgagaatgagtatgaaagggcccgcagagaagcactggaacggatgaaggccgaggaagaacggaggctatcgaggaccgacggccacaagcggaacccctag

SEQ ID NO: 26793 - DNA, 1497 bp, synthetic construct
  misc_feature 1..1497: note = Description of Artificial Sequence: Synthetic coding sequence
  source 1..1497: mol_type = other DNA
atggccctgcccaccctgcccagctactggtgcagccagcagcggcttaatcagcagttagccaggcagcgggagcaggaagcaaggttaagacaacagtgggagcagaatagtcggtactttaggatgagtgatatatgttcctccaagcaagccgagtggtcctccaaaaccagctaccagcgtagtatgcacgcttaccagcgagaaaagatgaaggaggagaagaggcgaagtctcgaggctagacgtgagaagcttagacagctgatgcaggaggagcaggacctactggcccgggagttggaggagctgcgactgtcaatgaacctgcaggaacgcaggatccgggagcaacatgggaaattaaagtcagcgaaggaggaacagaggaaactgattgccgaacagctgctgtacgagcattggaaaaaaaacaacccaaagttgcgcgaaatggagctagacctgcaccagaagcacgtggtgaactcatgggagatgcagaaggaagagaaaaaacagcaggaggccaccgctgagcaagaaaacaagagatatgaaaacgaatacgagcgcgcacgacgggaggccctagagagaatgaaagcagaagaggagaggcgccaattggaagacaaactgcaggccgaggccctactacagcagatggaagagttgaagttgaaggaagttgaggccacaaaactaaagaaggagcaggaaaatctcctgaaacaacgttgggaactcgagaggctggaggaggagcggaagcaaatggaggctttcagacagaaggctgaactggggcgattcttacgccatcagtataatgcccagctgtctagacgaacacagcaaatacaggaggagttagaggcagaccgcagaattctgcaggcgctcctggagaaggaagacgaatcacagcgcctgcatctggcccggcgggagcaggttatggcggacgttgcctggatgaagcaggctattgaggaacagctgcagttggaaagggcccgggaagccgaattgcaaatgcttttacgagaggaagcgaaagaaatgtgggaaaaaagggaggctgagtgggcgagagaaaggtcagctcgagacaggttaatgtcagaagttctcaccgggaggcagcagcagatccaggaaaagatagaacagaaccgccgcgcccaagaagagtcactgaagcaccgcgaacagctcattcgaaatctcgaggaagtgagagagcttgccagaagagagaaagaagagtctgaaaaacttaaatctgcccggaagcaggagttggaagctcaggtggcagagcgtcgactgcaggcgtgggaggctgaccagcaggaagaggaggaagaggaagaagcaagaagagttgagcagctgagtgacgctctgttgcagcaggaggctgaaaccatggctgagcaggggtacagaccaaagccatatggacacccaaagatcgcatggaattag

SEQ ID NO: 26794 - DNA, 3090 bp, synthetic construct
  misc_feature 1..3090: note = Description of Artificial Sequence: Synthetic coding sequence
  source 1..3090: mol_type = other DNA
atgcagaccaacgagggcgaggtgagcgaggagagcagcagcaaggtagagcaggaagatttcgtgatggaggggcacggcaaaacgcccccgcccggagaagagtcaaagcaggagaaggagcaagagagggaagaacagctgatggaggataaaaaacgcaagaaggaggataaaaaaaagaaagaagctacacagaaggtcaccgaacagaaaaccaaggtcccagaggttaccaaaccatccctgagccagcccactgcagcatcaccaattggaagctcaccctcccctcctgtcaatggtggcaataatgccaaaagggtggctgtccccaacggccagccgccatcagccgctaggtacatgccccgtgaagtgccacctaggtttcgctgccagcaggaccataaggtgctgttgaaaaggggccagcctccgcccccttcatgcatgctactgggaggtggagcaggccccccaccatgcacggctccaggagccaacccgaataatgcccaagtaaccggggcgttactccagagtgaatctggcacagccccagtatggagtaagagcacgccccctgcccccgataacgggacaagtgcatggggcgaacctaacgagagtagccccggctggggcgagatggacgatacaggagcctcgactaccggctggggcaacacccccgccaacgctccaaatgccatgaagcccaacagtaagagcatgcaagacggttggggtgagtcggacggtcccgtgacaggcgccaggcacccatcctgggaggaggaggaagatggaggggtatggaacactaccgggagtcagggtagtgcttcttctcacaactccgcttcttgggggcagggaggcaaaaaacagatgaaatgttcgctgaagggcggaaacaatgattcctggatgaatcccttggcaaaacaattcagtaacatgggccttttaagccaaaccgaagacaaccccagttccaagatggacctctctgtgggaagccttagcgataaaaaatttgatgttgataagcgagctatgaatttaggcgatttcaatgatatcatgcggaaagataggtctgggttccgccccccaaactccaaagacatgggtaccactgacagtgggccctattttgagaagggagggagccacggcttgtttggcaactctacagcacaatctcggggccttcatacccctgtgcagcctctgaactctagccccagcctacgggcccaggtgcctcctcagttcattagtcctcaggtgagtgccagtatgttgaagcagttcccaaattcgggactgtcccccggtttgtttaatgtgggaccacaattgagtcctcagcaaatagcgatgctcagccagctgccccagattccccagttccagttggcctgccagctgctgctccagcagcagcaacagcagcagttactgcagaaccagagaaagattagtcaggccgtgcggcaacagcaggaacaacagctggccagaatggtgagtgccttacagcagcagcagcagcagcaacaacgacagccgggaatgaaacacagtcccagccatcctgtcggacctaagcctcacctggataacatggtccccaacgccttgaatgtggggctgcccgacctgcaaaccaaggggcccattccgggatatggctccgggttcagctccggcgggatggactatggcatggtcggaggtaaagaagccggaactgaaagccgcttcaaacaatggacctccatgatggaggggctaccctctgtggctacacaggaggccaatatgcacaaaaatggtgccattgtggcccccggcaagactcgtggaggcagtccgtacaaccagttcgatatcatccctggggacactttggggggacacactggtccagccggggacagctggctgcctgcaaagtctccccccactaataaaattggcagcaagtcatccaatgctagctggccgccagagtttcaaccgggggtgccatggaaaggtatacagaacatcgacccagaatcggatccttatgttactcctggaagtgtccttggcggcaccgctacttccccaatcgtcgacacagaccaccagctgctccgggataacaccaccggctccaactcttcgttgaacacatctctgccaagccctggcgcgtggccatacagtgctagtgataattcctttacaaatgttcatagcactagcgctaaatttcctgattacaagagcacttggtcacctgatcctattggccataaccctacccatctgagcaacaaaatgtggaaaaaccacatctccagtcgcaacacaacgcccctgcctagaccaccccccggactcaccaaccccaaaccttcatccccctggagtagcaccgctcctaggtcagttagaggctgggggacccaggactcaaggctggccagtgcttctacttggtccgatggcggatctgtaagaccgtcatactggcttgtgcttcataatctcacacctcaaatagatggttctacactcaggacaatctgtatgcagcacggaccgctcttaacattccatctcaacctcacccagggcaccgccctgatccgctactcaaccaagcaagaggcagctaaagcccagactgcccttcacatgtgcgtccttgggaacacaacgatacttgcagagttcgcgactgacgatgaggtaagtcgttttctagctcaggcccagccccctactccagccgccactcccagcgcccctgcagccggttggcaaagtctggagaccggccagaatcagtccgaccctgtgggtcccgccctcaatctattcggggggtctaccgggctgggccagtggtccagctctgccggcggcagttcaggagcagatctcgccggcgccagcctgtgggggcccccaaactactcctctagtttgtggggagtgccaactgtcgaagacccccatcggatgggcagccctgcacccctgctgccaggggatcttctaggcggaggttctgattcgatatag

SEQ ID NO: 26795 - DNA, 5172 bp, synthetic construct
  misc_feature 1..5172: note = Description of Artificial Sequence: Synthetic coding sequence
  source 1..5172: mol_type = other DNA
atgcgggagaaggagcaggagcgggaggagcagctgatggaggacaagaagcgcaagaaggaagacaagaaaaagaaagaggctactcagaaggtcactgaacaaaaaaccaaggtgccagaggtaaccaagccttccctgagtcaacctactgcagccagcccaatagggagcagcccgtcccctccagtaaacggtggaaacaacgcaaagcgggtggccgttcccaacgggcagccaccaagcgccgcacggtatatgcctagggaggtgccccctcgcttccgatgtcagcaggaccacaaagtgttgctgaaacggggccagccaccaccaccttcctgtatgctcctgggcggcggagcgggacctccaccatgcacagccccgggtgcaaatcctaataatgcgcaggtcactggagccctgttgcagtccgagagcgggacggccccagattcaactcttggaggcgccgctgcatctaattacgctaacagcacatggggaagcggagcctctagcaataacggcaccagtccgaacccaattcatatttgggataaagtcattgttgatggatcagatatggaggagtggccttgtatcgctagcaaggacactgaatcttcatccgaaaatacaaccgacaacaactcagcctccaaccctggcagtgagaagtcaaccctccccgggtcaaccacttcaaacaagggcaagggatcccagtgtcagagcgcttccagcggcaacgaatgcaatctcggagtgtggaaaagtgatccaaaggctaagagtgtgcagagtagcaattcgactactgaaaacaataacggtctgggaaattggagaaatgtgagtgggcaggataggatcgggccaggatctgggttcagcaactttaacccgaattctaatccatctgcctggcccgcattagttcaggagggaacctctcgaaagggggccctggagacagacaattcaaattcctctgcacaggtttcaaccgtgggccagaccagtcgtgaacagcaatcgaagatggaaaatgccggagtgaatttcgtggtatcaggcagagagcaagcccagattcacaacacagacgggcctaagaacggaaatacaaactccctgaatctatccagccccaaccccatggagaataaaggcatgccctttggcatgggactgggtaacacctcaagatccacagacgcaccaagtcagagcaccggggacagaaagaccggcagtgtcggaagctggggggcagctaggggacctagcggtacagacacagtgtccgggcagagtaatagtgggaacaatggtaataacggtaaggagcgcgaggattcctggaaaggagctagcgtccagaaatctactggcagcaagaatgacagctgggataataacaaccgtagcaccggtggctcttggaattttggcccacaggattctaacgacaacaagtggggggaaggaaataagatgacctcaggtgtctctcaaggcgagtggaaacaaccaaccgggagcgatgagctcaagatcggggaatggtctggacctaaccagcctaattcctctacaggtgcatgggataaccaaaagggtcaccccctgcccgagaatcagggcaatgcgcaagctccttgctggggcagatccagctctagtacgggctctgaagtcgggggacaatccaccggctctaaccataaggctggttcctccgattctcacaactccggcagacgctcatatcgcccaacgcacccagactgccaagcagtgttgcaaacactgcttagccgcaccgatctggatcctcgcgtcctgagcaacactgggtggggacagactcagataaaacaggacactgtatgggacatcgaagaggtgccgcgcccagaaggaaaaagcgacaagggcaccgagggatgggagagcgcagccacacagacgaagaatagtggagggtggggcgacgctccgtcccagtccaatcagatgaaatccggttggggggagttgagcgccagcaccgaatggaaggatcctaaaaacacaggcggctggaatgattataagaacaataacagcagtaattggggagggggacgcccggatgagaaaacaccttcatcctggaatgaaaatccctcaaaggaccagggatggggcggcggcagacagcccaaccaggggtggtcctccggtaaaaacggatggggggaagaagtcgaccagactaagaactcaaattgggagagctcagccagcaaaccagtgagcgggtggggggagggggggcagaacgaaattgggacttggggcaacggagggaacgcctcgctggcctctaaaggggggtgggaagactgcaaacgttccccagcctggaacgagaccgggcgtcagcctaactcttggaacaaacagcatcagcaacagcagcccccccagcaacctcccccaccgcagcccgaagcctccggcagctggggaggtcctcccccaccacctcccggtaacgttaggccgagcaatagctcatggtcttcaggtccacagcctgcaactccaaaggatgaagagcccagcggatgggaagaaccatctccacagagcatcagtcgaaaaatggatatagatgatggcacaagtgcttggggcgaccctaactcttataactacaagaacgtgaatctttgggacaagaatagccagggagggcccgcaccacgtgagcccaacctcccgactccgatgacatctaagagtgcgtcggactctaagagcatgcaggacgggtggggagagagcgacggcccagtgacaggagcaagacacccatcctgggaggaggaagaggacgggggggtctggaatactacaggatctcagggatcggccagcagccacaatagcgcgagctgggggcagggaggcaaaaaacaaatgaagtgctccctcaagggaggtaataatgattcttggatgaatccactcgccaagcaattctccaacatggggttgctctcgcaaaccgaagataatccatcatcaaagatggatctgtctgttggatccctcagtgacaagaagtttgacgtcgataagagagcaatgaatttgggcgattttaacgacataatgcggaaggaccgatccggattcaggcctccaaattctaaagatatgggcacgactgactctggcccctattttgagaaaggggggagccacggactctttggcaattctacagcacagtcccgcggtctgcacacacctgtgcagcccctcaatagttcgccatcacttagagcacaggtgccgccccaattcatatccccacaggtctctgctagtatgctgaagcagtttccaaattctggccttagccctggtctctttaacgtcggcccacagctttccccacaacagatagccatgctcagccagttgccccagatcccgcagtttcagctcgcgtgtcaactgctcctgcagcagcagcagcagcaacaactcttacagaaccagaggaagatatcccaggcagtaagacagcagcaagaacagcagctcgcccgaatggtttcagcactccagcagcagcagcaacagcagcagaggcagccaggtatgaaacacagtccaagccaccccgtcggacccaagcctcacctggacaatatggtccctaacgccctcaatgtgggtctccccgatctgcaaacgaaaggaccaattccaggctatggatcaggtttcagctctggtgggatggactatgggatggtaggtgggaaagaagcgggaacagaatctaggtttaagcagtggacctcaatgatggaaggactgccaagtgtggctactcaggaagctaacatgcacaaaaatggcgccattgtggcccccggaaagacacgaggaggttcaccttataatcagtttgatattatacccggcgatactctcggaggccacacagggccggccggggacagttggttgcccgccaaatcacccccaaccaataaaatcggatctaagagttcaaacgccagctggccccccgagtttcagcccggtgtgccttggaaaggaatccagaacatcgatccagaaagcgatccctacgtcactccaggctcagtgctgggaggaacggcaacttcccctattgtcgacacggatcatcagttactccgtgataacacgaccggcagcaactcatcactgaatacatctttgccaagcccaggggcctggccctactctgcctccgacaactcattcaccaacgttcatagtaccagtgctaaattccccgattataaaagcacttggtcaccagacccaattggccataatcccacgcacctgtccaacaagatgtggaagaatcatatcagctctcggaatacaacccctctgccgcggccaccccctggcctgaccaatccaaaaccctcatcgccttggagttcgacagcgcctcgcagcgtcagaggctggggcacccaagactctagactcgcctccgcctctacgtggagtgatggcggatcagtgagaccctcttactggctggtcctgcacaaccttacaccccagatcgatggcagcacccttagaactatctgtatgcaacacggtcctcttctgactttccacctgaatttgactcaggggaccgccctgattcggtatagtacaaagcaggaagccgcgaaggcacagaccgcgctccacatgtgcgttttaggcaacaccaccatcttggccgaattcgctacagatgacgaggtgtcgcgattcctcgcccaggctcagccacccacccctgccgcaacccccagtgcgcccgctgccgggtggcagtctttggagaccggtcagaaccaatcggaccctgtgggcccggccctcaatttgtttggtggctctactggcctcggacaatggtctagctccgcagggggaagctccggcgcggatttggccggcgcaagtttatggggcccccccaactactcttcctctttgtggggcgttcccaccgtggaagacccacataggatgggttcacccgcacctctgctgcctggggacctcttaggtggaggatcagactccatctag

SEQ ID NO: 26796 - DNA, 5172 bp, synthetic construct
  misc_feature 1..5172: note = Description of Artificial Sequence: Synthetic coding sequence
  source 1..5172: mol_type = other DNA
atgcgggagaaggagcaggagcgggaggagcagctgatggaggacaaaaagaggaaaaaggaagataaaaagaagaaggaagccacacagaagcatagtaaccagaagaccgccatgcccgaggtgaccaaaccatctctgagccagccaacagcggcctcccctattggaagcagccccagtcctcccgttaatggcggtaacaatgctaaaagagtggcagtccccaatggacagccaccttcagcagctaggtacatgccaagggaggtacccccccggtttaggtgccagcaggaccacaaggtattgctaaaaagaggacagcctccgccaccctcctgcatgctgttgggaggtggggctggccctcctccatgcacagcccccggagccaatcccaacaatgcacaagtgactggggccctattgcagtctgagagcgggactgctcccgattccaccttaggcggcgctgctgcgagtaactatgctaacagcacttggggctcaggagcctcgagcaataatgggacttctcccaacccaatccacatctgggataaagtcatcgtggatggttccgatatggaagaatggccctgtattgcaagcaaagacactgaatcaagttctgaaaataccacagacaataacagcgccagtaaccctggatctgaaaagtccacattgcctggaagcacgacgtccaataaggggaagggatcccagtgtcaaagcgccagctccggcaacgagtgcaatctcggcgtctggaaaagtgatccaaaagccaaatccgttcagagcagtaacagcaccaccgagaataacaacggactgggaaactggaggaacgtctccggtcaggatcggatcggtcccggaagtggcttctctaactttaatccgaatagcaatccatcagcatggccagcattagtccaggaaggaactagccgcaaaggagcccttgagaccgacaatagtaactcctcagcccaagtaagtactgtgggccagacctcccgagagcaacagagtaaaatggagaacgctggcgtcaattttgtggtgtcaggaagagaacaggctcagatacataatacagacggccccaaaaatggaaacaccaactctttgaacctaagttctcccaatcctatggaaaataagggcatgccatttggcatggggctggggaatacctctagaagcactgacgcacctagtcagagcactggggatagaaagacagggagcgtcggctcgtggggggcagctcgagggcccagcggtaccgacaccgtgtctggacagtccaacagcggaaataatggcaacaacgggaaggaacgggaggacagttggaaaggagcttcagtccagaaaagcactgggtctaaaaacgattcatgggataacaataatcggtcaaccggcggcagctggaacttcggcccccaagattctaatgataataaatggggcgaagggaataaaatgacatcgggagtgtctcagggtgaatggaaacaacccaccggttcggacgaactgaaaattggcgaatggtcaggacccaaccagcccaactcatccactggagcttgggataaccagaagggacatccccttccagaaaatcaggggaacgcacaggccccatgctggggaagaagctctagttccactggttctgaggtgggagggcaatccactggttctaaccataaagcggggagcagcgacagccacaatagcggtcggcgttcctatcgcccaacccaccccgattgccaggcagtgctgcagaccttattgagccggacagacctggatccgcgagtgctcagcaatactggctggggacagacacaaataaagcaggataccgtatgggatatcgaagaggtgcccaggcctgagggaaagtccgacaaggggaccgagggctgggaatccgcagccacccagaccaaaaactccgggggttggggggatgcaccctcacagtcgaaccagatgaagtctggctggggtgaactgagcgcctccacggagtggaaggatccaaagaataccggagggtggaatgactacaagaacaacaattctagcaactggggtggcggccgtcccgacgagaaaacccccagttcttggaacgaaaatccgagtaaagatcagggttggggcggaggcagacagccgaaccaggggtggtcttccggcaagaatggctggggcgaggaggtggatcagaccaagaattcaaattgggaatcctcagcaagtaagccggtgtctggctggggcgaagggggtcagaacgagattggcacctggggcaacggcggaaatgcctctctggcctcgaaggggggctgggaggactgtaagcggagccccgcctggaatgaaacaggaagacaacccaacagttggaataagcagcaccagcagcagcagccgcctcagcagccgcctcccccccaaccagaggcttcggggtcatgggggggtcctcctcctccaccacccgggaacgtaagaccatctaacagtagttggtcctccggcccacaacccgctaccccaaaagatgaggagcccagcggttgggaagagccctcaccccagtcaataagcagaaaaatggatatcgatgatggcactagcgcctggggggacccaaacagctataattacaaaaacgttaacttgtgggataagaactctcaggggggccctgcaccgcgtgagcctaatctgccaacccctatgacgagtaaatcagcttcagatagcaagagcatgcaggatgggtggggtgaatccgatggccctgttacaggggctagacacccttcctgggaagaagaggaggatggaggagtctggaataccacaggttcccaaggttctgctagttcccataactccgcgagctgggggcagggagggaaaaagcagatgaaatgcagccttaaggggggtaacaacgatagctggatgaaccctctagccaagcagttcagcaatatgggtttgctctcccagacagaagataatcccagtagcaaaatggatctgtcagtgggctccctgagtgataaaaagttcgacgtggataagcgagcgatgaacttaggcgactttaacgacatcatgcgaaaagacaggagcggattccggccccccaactccaaagacatgggtaccaccgatagcggaccctatttcgaaaaggggggatcccatggcttgttcgggaactccacggctcagagccggggcctgcacacccctgtgcaacctttaaactcaagcccttcacttagggctcaagtgccaccccagtttatttcacctcaagtgtccgcatcaatgcttaaacagttcccgaattcaggcttatccccggggctgtttaacgtgggtccccagttgtcccctcagcagatagcaatgctctctcagttaccacagattccccagttccagctggcgtgccagctattactgcagcagcagcaacagcaacagcttctccagaaccagcgaaaaattagccaggcagtccggcaacagcaggaacaacagttggcgcgcatggtgtccgccttgcaacagcaacagcagcagcaacagcggcagccaggaatgaagcattctccttcgcaccccgtgggtcctaagccccacttagataatatggtacccaacgcactgaacgtcgggttgcctgacctgcaaacgaaaggtcctattccgggttacggcagtgggttttcctctgggggaatggattatggcatggtggggggcaaggaggcaggcacagaatcaagatttaagcaatggacttctatgatggaggggctccccagcgtggccacccaggaagccaatatgcacaagaatggggccatcgtcgcgccgggtaaaacgagaggcggcagtccatacaatcaattcgatatcatcccgggagacacgctgggagggcacaccggccccgccggcgattcttggctacccgctaagtctcctccgaccaataaaatcggctcgaaatcttctaatgcttcatggccccccgagttccagcccggggtgccttggaaggggattcagaacatagatcctgagagcgatccctacgtgacgcccgggtctgtgctgggcggaaccgccactagtccgatcgtggataccgaccatcagctcctgcgcgataacacaacaggctcaaacagctcgctgaatacatcactcccttctcccggggcatggccttactccgcttctgacaattccttcaccaatgttcacagtacaagtgccaagttccccgactataagagtacctggtcccccgatcctatcggccacaaccccacccacctaagtaacaagatgtggaagaatcacattagcagtagaaatactacccccctgcccagacccccaccaggactgaccaaccctaagccctcctcgccttggagtagcacagcccctcggtccgtgcgtgggtggggaacacaagatagccgactcgcaagtgcttccacatggtctgacggaggctcagtgcggccttcctattggttggtgctgcataatctgactccgcaaattgatgggtcaactctgcgaactatatgtatgcagcacgggcccttgctcacctttcacctgaacctaactcaaggaacggcactcatccgctactctacaaaacaggaggccgctaaggcccagacggctctacatatgtgcgtcctggggaataccactatactagccgaatttgccacggatgacgaagtgtcacggtttcttgcacaagcccagccccccacaccagctgctacccccagcgcgcctgcagcaggctggcagtcactggaaaccggccaaaaccagtctgacccagttggacccgcactgaatcttttcgggggtagcacgggactgggtcagtggtcaagcagtgccggtggtagctctggagctgacctggctggcgccagtctatggggaccgccaaactatagttctagtctgtggggagtacccacagtcgaggatccccaccgcatggggagtcctgccccacttctccctggggaccttctcgggggcggctcggattcaatctag

SEQ ID NO: 26797 - DNA, 3090 bp, synthetic construct
  misc_feature 1..3090: note = Description of Artificial Sequence: Synthetic coding sequence
  source 1..3090: mol_type = other DNA
atgcagaccaacgagggcgaggtgagcgaggagagcagcagcaaggtagagcaggaggatttcgtgatggagggtcacggcaaaactcctccaccaggggaagagagcaagcaggaaaaagagcaggagcgagaagagcagctgatggaagacaagaagcgaaagaaagaggataagaaaaaaaaggaggcgacacagaaagtcactgaacagaagaccaaggtgccagaagtgaccaagcccagcctaagtcagcccaccgccgccagccctattgggagctcaccttctcccccggtgaacggtggcaacaatgctaaacgtgtcgccgttcccaacggtcagccaccttccgccgcccgctacatgccccgcgaagtgccaccccggttccgctgtcagcaagatcacaaagtgctgttgaagcgaggtcagcccccccccccctcctgcatgctccttggaggaggagccggacctccaccttgcacagctcccggcgccaaccccaacaatgcccaagtaaccggtgctctgttgcagtctgagtctggcactgccccagtgtggtccaagtccacacccccagcccctgacaacgggacctctgcttggggagaacctaatgaatcttcacccgggtggggggaaatggatgacactggagcttcaacaactgggtggggcaataccccagctaacgcacccaacgccatgaagccgaactctaaaagtatgcaagacgggtggggagagagtgacggaccagttactggcgccaggcatccaagttgggaagaggaggaggatgggggcgtctggaacactacggggtcacaaggttccgcttcctcccataactccgcgagttgggggcagggtggaaaaaagcagatgaaatgttcgctgaaaggtggtaataatgattcctggatgaatcctttagcaaagcagttctctaatatggggctgctgtctcagaccgaggacaaccctagtagcaaaatggacctctctgttggcagcctctctgacaaaaagttcgacgtagacaaacgggcgatgaatctcggtgactttaacgacataatgcggaaagacagaagcggctttcgtccaccaaatagcaaagatatgggtactacagacagcggcccctatttcgagaaaggagggtcacacggtctgtttggcaacagcaccgcacagtcaagaggtctccatacaccagtgcaaccgctgaattcatccccatcacttcgggcgcaggtaccaccccagttcattagccctcaggtgagtgcaagcatgcttaagcagttccccaacagcgggcttagcccaggcctttttaacgtgggtccccaactttctccccagcagatcgctatgctaagtcagctgccccagatcccacaatttcagttggcctgccaactcctgttacaacagcaacagcagcagcagctgctccaaaatcaacgaaaaattagccaagctgtaagacagcagcaggaacaacagctggccagaatggtttccgccctgcagcagcaacaacagcagcagcagagacagcccggaatgaagcactctcccagccatccggtagggccgaagcctcacttagataatatggttccgaacgccttaaacgtgggtttgcccgacctgcagacaaaagggcccataccaggctacggctcgggtttcagctcaggagggatggattatggaatggtaggggggaaggaggctggtaccgagtcgcgtttcaagcaatggaccagtatgatggagggtctgccctctgtcgccactcaggaagccaatatgcacaaaaacggcgcaatcgttgcgcccgggaaaacgagaggaggtagcccatacaatcagtttgacattattcctggagataccctgggaggccacaccggcccggctggcgactcttggctcccagccaagagcccacctacgaataaaattggctcgaaaagctcaaacgcatcatggccgcccgaattccagcctggtgtgccatggaagggtattcagaatatcgaccctgagtctgatccttacgttactcccggaagcgttctggggggaacagccacatctcccatcgtggacacggatcaccagctcctaagggataacaccactggctctaactcctcactgaacacttcgcttccaagccccggcgcatggccctacagtgccagcgacaatagttttactaacgtgcacagtacaagtgctaagtttccagactacaagtctacatggtcaccagatccgatcggccacaaccccacccacttatcaaacaagatgtggaagaaccacatttcttcccgtaacacaacaccgttgccacggcccccaccaggactgactaacccaaagcccagtagcccatggtcgagtaccgctccgaggtccgtacgaggttgggggacccaagactctaggctggctagcgcctcaacgtggagcgatggcggctctgtgcgtccttcctactggcttgtgcttcacaatctgacacctcagatagacgggtcaaccctgcggacgatctgtatgcagcatggcccattactgactttccatctgaatcttacccaggggaccgctcttatccggtatagcaccaagcaggaagctgcaaaggcgcagaccgctctacacatgtgtgtgctgggcaatacaaccatcttagccgaatttgccacagacgatgaagttagcagattcctagcacaagcacagcctcccacccctgccgcgacacccagtgcaccggccgcaggctggcagtctcttgagaccgggcagaaccagagtgatccagtagggcccgccctcaacttgtttggcggatctaccgggctaggccagtggagcagctccgctggcggatccagcggcgccgatttggccggagcctctctctgggggccgcccaattactcctcttctttatggggagttccgacagttgaggacccccaccgcatgggttcacccgcacctctgctacctggagatttgttgggaggaggttcagacagcatatag

SEQ ID NO: 26798 - DNA, 114 bp, synthetic construct
  misc_feature 1..114: note = Description of Artificial Sequence: Synthetic coding sequence
  source 1..114: mol_type = other DNA
atgcagaccaacgagggcgaggtgagcgaggagagcagcagcaaggtagaacaggaggactttgtcatggaaggacatggtaaaacgccacctccaggggaagagtcaaaatag

SEQ ID NO: 26799 - DNA, 5502 bp, synthetic construct
  misc_feature 1..5502: note = Description of Artificial Sequence: Synthetic coding sequence
  source 1..5502: mol_type = other DNA
atgcgggagaaggagcaggagcgggaggagcagctgatggaggacaagaagaggaagaaggaagataagaagaaaaaggaagccacccaaaaagtcacagaacaaaagaccaaggtgcccgaagtgaccaagccaagcttgtcacagccgactgccgcctcgccaattggcagctcaccttcacctcccgtcaacggcggaaacaatgccaagcgtgtggccgtcccgaacggacagcctccgtctgcggcccgttacatgcccagagaggtgcccccccggtttcgctgtcaacaggatcacaaagtcctactcaaacgcgggcagccacccccgcccagctgtatgctgctaggaggtggtgccggtccccccccttgcacggcccccggcgctaacccaaacaatgcccaagtaacgggtgccctcttgcagagcgaaagtgggacggcacctgactccacacttggaggcgcagcagcctccaattacgccaattcgacctggggatcaggagcatcaagtaacaacggcacctctcccaaccctatccatatttgggataaggtgattgtcgatgggtctgacatggaggaatggccctgcatcgcatccaaagacacagaatcgagtagtgagaataccacagacaacaattccgcctcaaatcccggaagtgagaagtctacactgccgggaagcactacgtcaaataaagggaaaggaagccagtgtcagtcggcaagtagcggcaacgagtgtaatttgggcgtctggaagagcgatccaaaggccaaatccgtgcagagctctaacagcactactgaaaacaacaatggcttaggtaactggcgcaacgtgtctggacaagatcggatcggaccgggaagcggctttagcaactttaaccctaactcaaatccttcggcttggcccgctctagtgcaggagggcacatcccgaaagggagccctggaaaccgataatagtaacagttcggcgcaggtgtctacagtgggacagacttctcgcgagcagcagtccaagatggaaaacgcaggggtcaacttcgtggtgtctggacgtgagcaggcgcagattcacaatacagacgggccaaagaacggcaatacaaacagcttaaatctcagctccccaaacccaatggagaacaaagggatgcccttcgggatgggactcgggaacacgagtagatccacagatgccccctcgcagagcactggagatagaaagacaggctctgtgggaagctggggagctgctcggggcccctctggcaccgataccgtctctggtcagtccaactccggcaacaatgggaacaacggtaaagagagagaagacagctggaaaggggcctctgtacagaaaagtacgggcagcaagaatgattcatgggataataataaccgaagcacgggcggctcgtggaacttcggtccacaggatagtaatgacaacaagtggggcgagggaaataagatgacctctggggtctctcagggggagtggaagcagcctaccggatctgatgagctaaagattggggaatggagtggccccaaccagcctaacagctcaacaggcgcctgggacaaccagaagggacaccctctgcccgaaaaccagggtaatgctcaggctccctgttggggcagaagcagctccagcactggctctgaggtcggaggccagtcgaccgggagcaaccacaaagcgggcagttccgactctcacaatagcgggagaagatcctaccggccaactcaccctgactgtcaggccgtgctacaaacattgctgtcacgtacggacttggacccaagagtgctatcaaacacaggctggggacagactcagatcaagcaagatacggtctgggacattgaggaggttcctaggcccgagggcaaaagcgacaaaggcaccgaggggtgggagtcagctgcaacacagacaaagaacagcggcggatggggcgatgcaccatctcagtccaaccagatgaaaagcggatggggggaactcagtgcgtccaccgagtggaaggatcctaaaaacactggtggttggaatgactataagaacaacaattcctccaattggggcggcggaaggcctgatgagaagacccctagtagctggaatgagaacccatccaaggatcagggatggggcgggggaaggcagcctaatcagggctggtcaagcggcaaaaatggttggggagaggaggtggaccaaaccaagaattctaactgggagagctctgcgtcgaagccagtcagcggctggggagagggaggacagaacgagatcggcacttggggaaacggcgggaacgccagcctggccagcaagggggggtgggaagactgtaaacgttcacccgcgtggaatgagaccggcagacagcccaactcctggaataagcaacaccagcagcaacagcccccacaacagcctcctcccccccagcctgaggcgagcggcagctggggcggccctccccctcctcctcctggcaacgtgagaccatccaattcaagttggtcgtcggggcctcagcccgccacccctaaagacgaggagccaagtggctgggaagagccctcaccacaaagcattagcagaaagatggatattgacgacggtacatctgcatggggcgacccaaactcatacaactataagaacgtcaacttatgggacaagaacagccagggtggtcctgcgccccgcgagcctaacctgccaactccaatgacaagcaaaagcgcctctgtgtggagcaaaagcacacctccagcgccagacaacggcactagcgcatggggagagcccaacgaatccagtcctggttggggtgaaatggacgataccggggcaagcaccaccggctggggaaatacaccagccaatgcccctaatgctatgaagcccaacagtaagtcaatgcaggatggatggggcgaatccgacggaccagtcacaggagcacggcatccaagttgggaagaagaagaggatggaggtgtctggaatactaccggctcacagggttcagccagtagccacaatagtgcatcttggggccagggcgggaagaagcagatgaaatgctccttaaagggcggaaataacgactcctggatgaatcccctggccaaacaattctccaatatggggctcctttcccagaccgaagacaatccgtcatctaagatggacctgtctgtggggagcctgtccgataaaaaattcgatgtagataaaagagcaatgaatctgggggattttaatgacattatgaggaaagatagatcaggtttcaggccaccgaattccaaagatatgggcactaccgattctggcccctactttgagaagcttaccctgccgttcagtaaccaggacggatgtcttggcgacgaagctccttgttcccccttttcaccttcaccgagctacaaattatccccaagcgggtctaccctccctaacgtctccttaggcgccatcgggactggtctgaatcctcagaattttgctgcgaggcagggaggctcacacggcctgttcggaaattccactgcccagtccagaggcctccacaccccagtgcagcctcttaattctagcccctccctgcgagctcaagtgccaccgcagttcatctctcctcaggtctctgccagtatgctgaagcagtttcctaacagcggattgagccccgggctatttaacgtcggcccccagttgtctcctcagcagatcgccatgctgtctcagctccctcaaatacctcagttccagctggcctgccaactactcctgcagcagcagcaacaacagcagctgttgcagaaccagcgaaagatatctcaggcagtacggcagcaacaggaacaacagttggcccgtatggtgtccgctctccaacagcagcagcagcagcagcagcgacaacctggcatgaagcactctccgtctcatccggtaggaccaaaacctcacctggataatatggtgccaaatgctctaaacgtaggcttgcctgacctgcaaaccaagggcccaatccccggatacggtagcggttttagttctggcggcatggactacggcatggtcggtggcaaggaggcaggaacagaatcccgcttcaaacaatggaccagcatgatggaaggactcccatcagtggctacgcaagaggccaatatgcataagaatggtgctattgtcgcgcccggcaagacaagaggcggtagcccatacaatcaattcgacattatacccggggacactttgggcggacacaccggtcccgcaggcgatagttggttgcccgcaaagtcacccccaaccaataaaatcggatcaaaatcatcaaacgcaagctggcctcctgagttccagccaggggtgccttggaaagggatccagaacatcgaccccgaatctgacccttatgtgaccccagggtctgttctgggcggaacagccaccagccccatagtcgacacagatcaccagctgctgagagacaacactacgggctctaactcttcactaaacacctcgctgccaagtccaggtgcctggccttattctgcctctgacaacagcttcaccaatgtccatagcacttccgcgaagttccctgactataagagcacatggtccccggatccgatcggccataatccaacacacttaagtaataagatgtggaagaatcatattagctcgcgcaacacgacgccgctcccccgccctccccctggtctaaccaatcccaaaccttcctccccgtggtcgtcaactgctccacgatctgtgcgtggctggggtacacaggactcgagactggcctccgcgagtacttggagtgacggcggctccgtgaggccctcctattggctagtgctacataacttaacccctcagattgatggctcaactctcagaaccatctgtatgcagcacgggccactgctgacctttcatctgaatcttacccaagggaccgccttgataagatactcaacaaaacaggaggctgctaaagcccaaaccgctcttcacatgtgtgtcttagggaataccacgattttagccgagttcgccacagatgacgaggtctcacggtttttagctcaggcgcaaccacccacccccgctgccactccatccgcgccggctgcaggttggcaatccctagaaactggccaaaaccagtccgatcctgtgggacccgctttaaatctgtttggaggatccacaggactgggacaatggtcctcctccgccggaggcagctcaggggctgacctggcaggcgccagtctgtggggcccccccaactattcctctagcttatggggggtgccaacggtggaagatccgcataggatgggcagtcctgcaccactgttgcccggcgatttactggggggcggatccgatagtatttag

SEQ ID NO: 26800 - DNA, 3153 bp, synthetic construct
  misc_feature 1..3153: note = Description of Artificial Sequence: Synthetic coding sequence
  source 1..3153: mol_type = other DNA
atggaggtggccgtggagaaggccgtggccgccgccgccgccgccagtgcagctgccagcggcggtccatctgctgcgccgtcaggcgaaaatgaagctgagagtcgccagggtcctgactcagagagaggcggcgaagcggccagactgaatctcctggatacatgcgccgtttgccatcagaacatccagtccagggccccaaagttacttccctgcctgcattccttctgtcagcggtgcctccccgcaccccagcggtacttgatgctgccagccccaatgctgggcagcgccgagacacccccacccgtgccagcccccggcagccctgtatccggttccagcccttttgccactcaggtgggtgtgataagatgcccagtgtgctcgcaggagtgcgctgaaaggcatattattgataacttcttcgtcaaagacacgacagaggtgcccagctccacggtggaaaagtcgaaccaagtttgcacctcgtgtgaagacaatgctgaagcgaatggattctgcgtggagtgtgttgagtggctatgcaaaacctgcattcgcgcccaccagcgcgtgaaatttaccaaggaccacaccgtgagacaaaaggaagaagtttcccccgaggccgttggcgtgacctcgcagcgtcctgtcttctgccctttccacaaaaaagagcagttgaagctctactgcgaaacatgcgacaaattgacctgtagagattgccagttgctggaacacaaggagcaccggtatcagttcatcgaggaagcctttcaaaaccagaaggtcattatcgataccctgatcacaaaactgatggagaaaacgaagtacattaaatttactggtaaccagattcagaatcgaatcatcgaggtgaaccagaaccagaagcaggtggaacaggatatcaaggtagcaatattcaccttgatggtcgaaatcaacaaaaaggggaaagctcttctgcatcagcttgagtccttagcgaaagatcatagaatgaaactgatgcagcagcagcaagaagtcgccggactgagcaagcaactcgaacatgttatgcatttctccaagtgggcagtcagtagcggcagttctacagcactgctctattctaaacgcctcattacttatcggcttagacacctgctgcgagccagatgcgatgctagccccgtgactaataacaccattcaatttcattgcgatcccagtttctgggcacagaacattatcaacctgggcagcttggttattgaggataaggagagtcaacctcagatgcccaaacagaaccctgtggttgagcagaactcccaaccacctagtggcctatccagcaaccagctgagcaagttcccaacccagatcagtctcgcacagctgagactccagcatatgcaacagcaggtgatggctcagcggcaacaagtccagagaagacccgctccggtggggctgcccaaccctagaatgcagggtcctattcagcagccttctatcagtcatcagcagccaccgcctcggctaattaatttccaaaaccactcccctaaaccaaatggacccgtacttccgccccacccccagcagttgagatacccccccaaccagaacatacctcgccaggccattaaacccaacccgctacagatggcttttctggcccagcaggcaatcaaacagtggcagattagcagcggacagggcacaccatctactacaaatagcacaagttcaacgcccagctcccccacaataacgagcgccgctgggtacgacggcaaggcgtttggctctccgatgatcgacctgtcttccccagtgggtggaagttataacttgcccagcctgcctgacattgattgtagcagcacaatcatgctcgataacatcgttagaaaggacactaacattgaccacggccaaccacggccaccatccaacaggactgttcagtccccaaactcatcggtgcctagccctgggttggcaggcccggtcaccatgacttcagtacacccccccataagaagtccctctgcctccagtgtcggcagtagaggatcgtctgggtcctcctccaaacccgccggggccgattccacacataaagtccctgtggttatgctggagccaattagaattaagcaagagaactcaggtccgcctgaaaattacgactttcctgtcgtgattgtcaagcaagaatcagatgaggagagtcggcctcagaatgcaaactaccccaggtcaattctaacatccctcctcctgaactcctctcagagttccaccagcgaagagacagtgctccgatccgatgcgcccgattccaccggtgaccagccgggactgcatcaggacaattcttcaaacggcaagtccgagtggctggacccatcccagaaatcccccctgcatgtcggtgagaccaggaaggaagacgatccgaatgaggattggtgcgctgtgtgccagaacgggggagaactgctgtgctgtgaaaagtgtcctaaagtcttccatctgagctgccacgtacccacattgaccaatttcccaagtggggagtggatatgcaccttctgtagggatctgtcaaaacctgaagtagaatatgattgtgacgccccctcacataactctgaaaagaaaaaaaccgaagggcttgtgaaactcacacctatcgataaaaggaaatgtgagagactgttgctctttctatactgccacgaaatgagcctggcatttcaagatcctgtgccactgactgttcccgactactacaaaatcattaagaatcctatggacctctcaactattaagaagcgattacaggaggattattctatgtattcgaaacctgaagacttcgtggctgacttccgtttgatctttcaaaactgcgccgagtttaacgaaccagactctgaggtcgctaacgccggaattaagctcgaaaactacttcgaagaactgctcaaaaatctatacccggagaaaaggtttcccaagcctgagttccgaaacgaaagtgaggacaataagtttagcgatgacagcgatgatgattttgtgcaacccagaaaaaaacgcctgaaaagtatcgaggaaaggcagctccttaagtag

SEQ ID NO: 26801 - DNA, 1650 bp, synthetic construct
  misc_feature 1..1650: note = Description of Artificial Sequence: Synthetic coding sequence
  source 1..1650: mol_type = other DNA
atggagggcccccggagcgccgcctgccgggcccggcccgccaccagccctggggccgtcgacttgacagccccacccccacccccactgttgcgcattctgaacagcagggctgcacctgcaactcgcacgtttgcggacctatgccgctcattgttgcaacccgaatcaagagtgttatgtcgtctgcagccagtgaattgttacccaccagccgcttctaccaagttgtgccccgtgggggtcatccggtgcccagtgtgctcacaggagtgcgccgaaagacatatcatagataacttctttgtaaaggacactaccgaggtgccatcttctacagtcgaaaaatcaaaccaggtgtgcacatcatgcgaggacaatgccgaggcaaatggcttttgtgtggaatgcgttgagtggctgtgtaaaacttgcatcagggcacaccaaagggtgaagttcacaaaggatcatacagtgcgtcagaaggaggaagtgagtcctgaggccgtcggcgtgaccagtcagagacctgttttttgtccatttcacaaaaaagagcagcttaaactatactgtgagacctgtgataaactcacttgccgagactgtcaattattggaacacaaggaacatagataccagtttatcgaagaggctttccagaaccaaaaagtcattatagataccttaattaccaagctgatggagaaaacaaagtatatcaagtttaccggtaaccagattcagaacagaatcatcgaggtgaaccagaaccaaaagcaagttgaacaggacatcaaagtggccatattcactctcatggtagagatcaataagaagggcaaagccctgctccatcagctggaatccctcgcaaaggatcaccgcatgaaacttatgcaacaacagcaggaagtggctgggctcagtaaacagctggagcatgtcatgcatttctcgaagtgggccgtgagcagcggaagcagtacagccctcctgtatagtaaacgtctgatcacctatcgactacggcatttgctcagagctcgctgtgatgcttctcccgttacaaataatactatccaatttcactgcgacccgtctttctgggcccagaatatcattaatctggggagcctcgtcatagaagacaaggaatctcagccccagatgccgaagcagaaccctgtagtggagcagaattcccagccaccctccgggctatccagcaatcagctttccaaattccccacccagattagtcttgcccagttgcgcctgcagcatatgcagcaacagcagccacccccacgactgatcaacttccagaaccatagtcccaaaccgaatggacccgttctgccaccccacccccaacaactaaggtacccgcccaatcagaacattccaagacaggccatcaaaccaaatcccctccagatggcgtttctcgctcagcaggcaataaagcaatggcaaattagctcaggtcaaggtacacccagtaccacacagaacatcaacactgcggcttgtactgtgttcgacgtacgcgtgcttcaccacatcccgtattgggcactaaacataagctcctccgaaagagactccttcctgtggttttctagcgtgtataacctggaatag

SEQ ID NO: 26802 - DNA, 3051 bp, synthetic construct
  misc_feature 1..3051: note = Description of Artificial Sequence: Synthetic coding sequence
  source 1..3051: mol_type = other DNA
atggaggtggccgtggagaaggccgtggccgccgccgccgccgcctcagcagcggccagtgggggaccctcggccgccccttcgggagagaacgaggcagagtcccgtcagggccccgattccgagcgggggggggaagccgccaggctaaacctgctcgacacctgcgccgtgtgtcatcagaacatccaatctcgagccccaaagctgctgccctgtctccattctttctgccagcgctgcctacccgcacctcaacggtacctcatgctccctgcaccgatgctgggttcagccgagacccctccgcccgtcccggccccaggatctccagtgtcaggctctagcccattcgctacacaagtgggcgttatcaggtgtcctgtttgctcccaggagtgcgcggaacgtcatatcatcgacaacttcttcgtgaaagatacgaccgaagtcccaagtagcacagtggagaaaagcaaccaggtctgtaccagctgtgaagacaacgctgaggcaaatggattctgtgtcgagtgcgtagaatggctgtgcaaaacatgcatcagagcacaccaacgggtgaaatttaccaaagatcacacagtgcgtcagaaggaagaagtgagtcctgaagccgtgggtgtaacaagccagagacctgttttttgccctttccacaaaaaagaacagctcaagctgtattgcgagacctgcgacaaattgacttgcagagactgtcaattactggagcacaaggaacaccgctatcagttcattgaggaggctttccagaaccagaaggtgataattgacactctgattaccaagttgatggagaagactaagtacatcaaattcaccggcaaccaaatccagaataggattattgaggtgaaccaaaaccaaaaacaggtagagcaagatatcaaggtggccatcttcaccctgatggttgagattaacaaaaagggtaaggccctgttgcaccagctggagtctctagctaaggaccatcggatgaagcttatgcagcagcagcaagaagtggcgggcctcagcaaacagctggaacacgtaatgcatttttcaaagtgggctgtcagttcaggatcgagcacggccctcctgtatagtaagagacttatcacataccgcctccggcatctgcttcgcgcaaggtgtgacgcatcccccgtgaccaacaacaccattcagtttcactgcgatccttctttctgggcacaaaacattattaacctgggctctctggtgatcgaagataaggaatcgcaacctcagatgccaaagcagaacccagtggttgaacagaacagccaacctccttccggacttagtagcaatcagctgtctaagttcccgactcagataagtctcgcccagctcaggttacaacatatgcaacagcagcagcccccgcctcgtctcatcaatttccagaatcactctccaaagccaaatggccccgtgttgcctcctcaccctcaacagctgaggtacccacctaatcagaatatccccagacaggccataaaacctaatcccttacagatggcatttctggcccagcaagcaatcaagcagtggcaaattagctccggccaaggcaccccaagcactacaaattccacttcctccacgccttccagcccgaccatcacttcagctgccggatatgacggaaaagcatttggctcgcctatgattgatctgtctagccctgttggaggaagctacaacctaccctcgctgcccgacattgactgctctagcacaatcatgctggacaacatcgtgagaaaggatactaatattgaccatggtcagccaaggccacccagcaacagaacagtgcagagcccaaactccagtgtcccaagccctggccttgccggcccagttactatgactagcgtacatccacccatcagatcacctagcgcctcctctgtaggaagcaggggttcctctgggtcgtcatcaaagcctgccggagctgacagcacacacaaggtgcctgtggtgatgttagaacctatcaggatcaaacaggagaacagcggaccccctgaaaactacgacttcccagtcgttattgttaagcaggaatccgacgaagagtcccgccctcagaacgccaattacccaaggtccattttgacctccctgctgttgaattcctcacagtccagtaccagcgaggagacagtcctgagatcggacgcccctgattcaacaggagatcagccgggcttgcatcaagacaattccagcaatggaaaatcagaatggctggacccatctcagaaatccccattgcacgtcggcgaaactcgtaaagaagacgacccgaacgaagactggtgcgctgtatgtcagaatggcggcgagctgttgtgttgtgagaagtgccccaaggtgttccacctttcatgtcatgtccccactctgaccaattttccctctggagagtggatctgcactttctgccgggacttgagcaagcctgaagttgagtacgattgcgacgctccctcccacaactcggagaaaaagaaaacagaggggttagtgaaactcacacctattgataagagaaagtgtgaaaggctgctgctgtttctttactgtcacgagatgagtctggcctttcaggatcccgtgcctctcacagtgccggattactataagattatcaagaaccctatggacctctccactatcaaaaaaagactccaagaggactattctatgtattctaagccagaagattttgtggccgactttcgactcatattccagaattgcgctgagtttaatgaacccgactcagaagtcgctaatgctggaattaagctcgaaaactactttgaagagctcctaaaaaacctctaccccgagaagcgattccctaagcccgagtttcgtaacgagtctgaggacaacaaattctcagacgactccgacgacgacttcgtgcagccacgtaagaaacggttaaaaagcatcgaagaaaggcagctgcttaagtag

SEQ ID NO: 26803 - DNA, 2886 bp, synthetic construct
  misc_feature 1..2886: note = Description of Artificial Sequence: Synthetic coding sequence
  source 1..2886: mol_type = other DNA
atgctgcccgcccccatgctgggcagcgccgagacccccccccccgttcccgcccccggaagtccagtctctggaagttcaccctttgctacccaggtcggcgttatccggtgcccggtctgtagccaagagtgtgcagaaaggcacattatagataacttcttcgtaaaggacacaaccgaagtcccgagctctacggtagagaaaagcaaccaagtttgcacatcatgtgaggataacgctgaagcgaacggattttgcgtggaatgcgttgagtggttgtgtaagacctgcatccgggcccaccaacgtgtcaagttcactaaggatcatacagtgagacagaaagaggaggtgagtcccgaagccgtgggggtcacgagtcagaggcccgtcttttgtccttttcataagaaagaacagctgaaattgtactgtgagacttgtgacaagctgacttgcagggactgccagttgctggagcacaaggagcaccggtaccagtttatagaggaggcctttcagaatcagaaggtcatcatagacacacttataaccaagctgatggagaaaaccaagtacataaaatttacaggcaaccagatccagaataggattatcgaggtcaaccagaatcagaagcaagtggaacaggacattaaagtcgccatcttcaccctcatggtcgagattaataagaagggaaaggcgctgctgcaccagctcgaatccctggcaaaggaccatcggatgaaactgatgcaacaacagcaggaagtggctggactaagtaaacagcttgaacacgtaatgcacttttccaaatgggctgtcagcagcggcagctctacagcactgctatactcgaaacggctcattacctaccggctgagacatctcctgcgggcccggtgcgatgcctctcccgtgaccaacaatacaatccagttccactgtgatccatccttctgggcacagaacataataaatttgggcagtctagtgatcgaggataaagagtctcagccacagatgccaaagcagaaccctgtggtcgaacagaattctcagccaccctctggactgagctcaaatcagctcagtaaatttcctacgcagatatcgctggctcagctgagactacagcacatgcagcagcaggtaatggctcaaagacagcaggtgcaacggcgcccagctcccgtgggactgcctaatcctcgaatgcaaggccctattcagcagccctccatttcacaccagcagcccccacctcgtttgataaattttcagaaccactcaccgaagcctaacggccccgttctgccgccgcacccgcagcaactccgctatcccccgaaccaaaacattccccggcaagcgatcaaaccgaacccacttcagatggcatttttggcacagcaggctatcaagcagtggcaaatttcgagcggacagggaacaccgtctacgaccaatagcactagttctacccccagcagcccaacgattacaagtgctgctggctatgacggcaaagccttcggctcccctatgattgacctcagttctcccgtagggggtagctacaatttaccatcccttcccgatatcgattgttcttcaaccattatgctggacaacatcgtgcgcaaggacacaaatatcgaccatggccagcctcgaccgccaagtaaccgcaccgtgcagtctcccaattcttccgtgccttcgcccggccttgccggacccgtgacgatgacatccgttcaccctccgataaggtctcctagtgccagcagcgtgggctcccgaggctcctctggctcttctagtaagccagccggagctgattctactcataaggtgcccgtggtcatgctcgagcccatcaggatcaagcaggaaaactcaggacctccagaaaattacgacttcccagtggttatcgtcaagcaggagagcgacgaagagtcaagacctcaaaacgccaactatcctcgcagcattctaactagtctcctgctgaattcatcgcagtcctctacctcggaggagactgtccttaggtctgacgcgccagacagcactggagatcagccaggcctccatcaggacaattccagcaatgggaagtccgagtggctggaccctagccaaaagtcccccttgcatgttggcgagacacgcaaggaggacgatcctaatgaggactggtgtgcagtgtgtcagaacggcggagaattgctctgctgtgagaagtgtcctaaggttttccacttatcctgccacgttcccaccctgacaaatttcccctccggcgagtggatatgtactttttgtcgggatctatcaaaacccgaagtcgagtatgattgcgatgcccccagccacaacagcgagaaaaagaagacagaaggacttgtgaaacttaccccgattgacaagcgaaagtgtgaacgcctactgctgtttctgtattgtcacgaaatgtccctcgccttccaggatccagtgccgttgactgtcccagattattacaagatcattaaaaatccaatggatttgtccaccatcaagaaaagacttcaggaggactactcaatgtactcaaagccagaagatttcgtggctgactttcggttaatcttccagaactgcgctgagttcaatgagccagactcagaagtggctaacgccggcattaaactcgagaactatttcgaggaactcctaaaaaatctttaccctgagaaaaggttccctaagccagagtttcgcaatgaaagcgaagacaataaatttagtgacgatagcgatgatgactttgtccagccccggaaaaaaaggttaaaatcaatcgaagagaggcagctgcttaaatag

SEQ ID NO: 26804 - DNA, 1692 bp, synthetic construct
  misc_feature 1..1692: note = Description of Artificial Sequence: Synthetic coding sequence
  source 1..1692: mol_type = other DNA
atgggcctgcaggcctgcctgctgggcctgttcgccctgatcctgagcggcaaatgttcctattccccagagcccgaccagcgtcgcaccctcccccccggctgggtgtccctgggaagggctgatcccgaagaggagctcagcctgacattcgccttaagacagcagaacgtggaacggctctctgaattggttcaggcagtcagcgacccatcctcaccccagtacggcaaatacctgacccttgaaaacgttgctgatctcgtgagaccctctcctctgacccttcacacagttcagaaatggctgctagcagcgggcgcccagaaatgccatagtgtgatcactcaagacttcctgacctgctggctgtcaatccgtcaggccgaactactgcttcccggtgcagagtttcaccactacgtgggcggccccacagaaactcacgtagtgcgctccccccacccataccaactgccccaggcactcgctccacacgttgactttgtcggaggcctacaccgtttccctcccacctcgagtttgcgccagaggcctgagccccaggtgacggggaccgtaggcttgcacttaggggtgactccaagtgtgatcagaaaacgttacaatcttacgagccaggacgtgggttccggcacctccaataactcacaggcctgcgctcagttcctggagcagtattttcatgatagtgatctggcccaatttatgaggctatttgggggcaactttgcccatcaggcttctgtggcaagagtggtcggccaacagggacgcggtcgggcgggaatagaggcctctcttgatgtgcagtatctcatgtcagctggtgccaacatctcaacttgggtttacagcagccccggacgtcatgaaggccaggagccttttcttcagtggctcatgctgttaagcaacgagtccgcactcccccacgtgcacacagttagctatggcgacgacgaagatagcttatcctccgcgtatattcagcgcgtcaatacagagctgatgaaggccgccgcgagggggctgaccctgctcttcgcttccggagacagcggggccgggtgctggtccgtgtccggcagacaccaattcaggcctacattcccagccagtagtccctatgtaacaactgtgggcgggacatcctttcaggaacccttcttgattactaatgaaatcgtggattacattagcggcggaggcttttcgaacgttttccctagacctagctaccaggaggaggccgttacaaaattcctgtcttctagcccccatctgcccccgagctcatattttaatgctagtggccgggcttatcctgacgtggcagccctgtcagacggatattgggttgtctcaaatcgagtgcccattccatgggtttccggtaccagtgcatctacccctgtgttcggagggattttgtcactgataaatgaacaccgcatcctgtctggccgaccacccctggggttcttaaaccctaggctgtatcaacagcatggagcgggcctgtttgacgtcaccagggggtgccacgaaagctgtctggacgaggaagtggagggacaggggttttgtagcggacccggctgggatccagtgacgggatgggggacccccaacttccctgccctgttgaagactctgctgaacccttag

SEQ ID NO: 26805 - DNA, 1041 bp, synthetic construct
  misc_feature 1..1041: note = Description of Artificial Sequence: Synthetic coding sequence
  source 1..1041: mol_type = other DNA
atgggcctgcaggcctgcctgctgggcctgttcgccctgatcctgagtggcaagtgttcttacagccctgagccagatcaaaggaggaccttgcctcccgggtgggtctccctgggacgagcagatcctgaggaggaactgagtttgacattcgcactgcggcagcagaatgtggagcgtctgagcgaactggttcaggccgtgagtgatcccagtagcccacagtacgggaagtatcttactctggagaatgtggctgatcttgttaggccctcacctcttaccttacacaccgtgcagaagtggctactggccgctggagcccagaaatgccattcagtgatcacccaggactttcttacctgctggctgtctattagacaggccgagctcctgttacccggcgctgagtttcaccattatgttggcggaccgaccgagacacatgtagtgagatctcctcatccctaccagctaccgcatattttagaagtgccatacgtgacaaccgtcggtggtaccagctttcaggagccgtttctgatcaccaatgaaatcgttgactacattagtggcgggggcttcagcaacgtcttccctcgcccctcctatcaggaagaagcagtgacaaagtttctctcctcaagcccccacctgccaccatcctcctactttaacgctagcggtagagcctatcccgatgttgctgctctgagtgatggctactgggtggtgtccaaccgggtgcccatcccatgggtctctggtacttccgcctccacccccgtgtttggcggcatcctgtcactgatcaacgagcatcgcatcttaagtggcaggcctccactcggatttcttaacccccggctatatcagcagcacggcgccgggctcttcgatgttacgcgcggctgtcatgaatcttgtctggacgaggaggtagaagggcaagggttctgttctggaccagggtgggacccagtcacagggtggggcacccctaatttcccagcactgttgaagaccctgctgaatccttag

SEQ ID NO: 26806 - DNA, 3495 bp, synthetic construct
  misc_feature 1..3495: note = Description of Artificial Sequence: Synthetic coding sequence
  source 1..3495: mol_type = other DNA
atggcccagcaggccaacgtgggcgagctgctggccatgctggactcccccatgttgggggtacgggatgatgtcacagctgtatttaaagagaatttaaacagtgaccgcggtccaatgctggtgaacacactcgttgactactacctggagactagctctcaaccggccctacatatcctgaccaccctccaagaaccacacgacaagcatctactggatcggatcaacgaatatgtgggaaaagccgccaccaggctgagtattctgagtctcttggggcacgtcatcagactgcagccttcttggaaacataaactgagtcaggcacctctgctcccgagcctcttgaagtgtctgaaaatggataccgatgtggtcgtgcttactaccggtgtcctagtgctgattacgatgttacctatgattcctcagtcaggtaagcaacacttgcttgatttctttgacatttttggaagactgtcctcctggtgcctaaagaaacccggtcacgtcgcagaggtgtaccttgtccacctgcacgctagcgtgtacgccctctttcatagactgtatggtatgtacccttgcaactttgtgtccttcttgcgctctcattattcgatgaaagaaaatttagaaacctttgaggaggtagtcaagcccatgatggagcacgttcgaatacatcctgaattggtgactggatctaaggatcacgagttggaccccagaagatggaaaagactggaaacccatgatgtggtcatcgaatgcgccaagattagccttgacccaacagaggcctcatatgaggacggctattccgtaagccaccagatttccgcaaggttcccacaccgatctgccgacgtgactacctccccatacgccgacacacagaactcgtacggctgtgctacatctactccatatagcaccagtagactcatgctgctgaacatgcccggtcaacttccccagacacttagttccccctctacccgcttgattaccgagcccccacaagccaccctatggagcccatcgatggtgtgtggaatgaccacgccccccacctcccctggcaacgtccctcctgacttaagccacccttattcaaaagtcttcggaacaactgctggcggaaaaggaacgcccttgggcacacctgcaactagtccccccccagcccccctctgccactctgatgactacgtgcacatctcgctcccccaagccaccgtgacacccccaagaaaggaagaacggatggattcagctagaccatgtctgcacaggcagcatcacctactgaacgaccgcggaagcgaagaaccacctgggagcaaaggatccgtaaccctcagcgatctgcctggctttcttggagacctggcttctgaagaggactcaatagagaaggataaggaggaagcagccatctcaagagagctaagcgagatcacgacagctgaagcagagccagtcgtcccacgtggcggcttcgacagtcctttctacagagactcactacccggatcccagagaaagacacattccgctgcaagttcatcacagggtgctagtgtcaacccagaacctctccactccagtctggacaagcttggccctgacacccctaagcaagccttcactcctattgacctgccttgcggtagcgccgatgaaagccccgcgggggaccgggagtgccagacctctctggagacatcgatctttactcccagcccctgtaagattccccctccaacacgcgtcggatttggatctgggcagccaccgccttacgaccatctgttcgaggttgctctgcctaagaccgcacaccattttgtcattcggaagactgaggagttgctgaaaaaggctaagggcaatactgaagaggacggggtaccttctacgtccccaatggaggtgttggataggttgattcaacagggggcggacgcacatagtaaggagcttaacaagctcccactgcctagcaagtcagtggattggacacacttcggcgggtctcctccttctgatgaaatacggacgctcagagatcagttgctgttattgcataaccagctgttgtatgaacgctttaagcgccagcagcacgctctcagaaatagacggctccttcgtaaggtcataaaggccgctgctctcgaggaacacaatgcagccatgaaggatcagttgaagctccaagagaaggatattcagatgtggaaggttagtctgcaaaaggagcaagcacgctacaaccagctgcaggagcagcgagataccatggtgactaagttgcactctcagattcggcagctgcaacacgatagagaagagttttataaccagtcccaggagctgcagacaaagctggaggactgccgtaacatgattgcggaactgcgtattgagttgaaaaaagcaaataacaaggtgtgtcacaccgaactgctgttatctcaggtttctcagaaactatctaacagtgagtcagtgcagcagcagatggaattcctaaatcggcagctgctagtgcttggagaagtgaacgaactctatctggagcagctgcagaacaaacacagcgacaccaccaaggaagtagaaatgatgaaagcggcttatagaaaggaattggagaaaaacagaagccacgtcttgcaacagactcagcggctcgatacctcccaaaaaagaatactggagcttgagtcccatctcgcgaagaaggaccacctgcttctcgaacagaaaaagtacctcgaggatgtaaagctgcaagcaagaggacaactacaagctgctgagagccggtatgaggcgcagaagcggattacacaggtctttgaattggaaatcctagatttgtatggacgcctcgaaaaggatggcctgctgaaaaaactggaggaagaaaaggctgaagcagcggaagcggctgaggagcgtctcgattgctgcaatgatgggtgctctgattccatggtgggccacaacgaagaggcttcgggccacaatggcgagacaaagaccccccgcccaagttcagcacggggctcaagtggctctcggggtggggggggatcaagctccagttcgtctgagctgtctactcccgaaaaacctccacaccagagggctggcccgttttcttcaaggtgggagactacaatgggagaggcgagtgcttctattcccaccacagtcggaagtctgccaagcagtaaaagcttccttggcatgaaggcgcgtgaactattccgtaataaatcagaatctcagtgtgatgaagatggcatgacatctagcctcagtgaaagcctgaagactgagctgggcaaagatcttggcgtggaggccaagatccctctcaacctggatggcccacacccatcaccccccacgcctgactcagtggggcagctgcacattatggactataatgagacacaccacgaacactcttag

SEQ ID NO: 26807 - DNA, 1101 bp, synthetic construct
  misc_feature 1..1101: note = Description of Artificial Sequence: Synthetic coding sequence
  source 1..1101: mol_type = other DNA
atggcccagcaggccaacgtgggcgagctgctggccatgctggactctccaatgctgggcgtgcgcgatgatgttacagctgtgtttaaggaaaacctcaacagtgacagaggtcccatgctggtaaacactcttgtcgactactatctggaaacaagcagccagcctgctctgcacatcctgacgacgctgcaggaaccccacgataaacatctcctcgatcgaattaacgagtatgtagggaaagctgccacccggttgtctatattgtctttgttgggccatgtgattagacttcagccatcttggaagcacaaactctctcaagcccccttgctcccctcattgcttaaatgcttgaagatggatacagatgtcgtggtgctaacaactggtgttcttgtgctgattaccatgctgcctatgatcccccagtccggcaaacagcatctgttggactttttcgatattttcggacgcctcagctcttggtgtctcaaaaagccagggcacgtggctgaggtatacttagtgcacctgcacgcctctgtgtacgcgttgttccatcgtttatacgggatgtacccgtgcaacttcgtgagtttcctccgatctcattacagtatgaaggagaatctggagacctttgaggaagtggtaaaaccaatgatggagcatgtgaggattcatcccgagctcgtgaccgggtctaaggaccatgagctggatcctcgccggtggaaacgccttgaaacccacgatgtggttatcgagtgcgcaaaaatctctctggaccctacagaggcttcctacgaagatggttacagcgtcagccatcaaatctccgcccgattcccccacaggtcagcagacgtcacaacaagcccttatgccgacacgcaaaactcttatgggtgcgctacctccaccccctacagcacaagccggttaatgcttctgaacatgccggggcagctgccgcagacactgtcctcccctagtactaggttaattacggaaccaccccaggtatggtgccagcttgtgtgtctgttatcaccactgctgagtggcgaggccgatcctctcggacagatttag

SEQ ID NO: 26808 - DNA, 954 bp, synthetic construct
  misc_feature 1..954: note = Description of Artificial Sequence: Synthetic coding sequence
  source 1..954: mol_type = other DNA
atggacaccgacgtggtggtgctgaccaccggcgtgctggtgctgattacaatgctgcctatgatcccacagtccggcaagcaacacctgctggactttttcgatatcttcggacggctaagcagctggtgcctcaaaaaacccggacacgttgccgaggtctacctcgtgcacttgcacgcctctgtgtacgccctcttccacaggctgtatggcatgtatccatgtaatttcgtctcctttctgcgctcccactattctatgaaggaaaacctggaaacttttgaggaggtggtcaagccgatgatggagcatgtgcgcatccaccccgaattagtaaccgggtccaaagaccacgaactggacccccgaagatggaagcggttggagacacatgatgtcgtgatcgaatgtgcaaaaatttcactggaccctaccgaggcgtcttatgaggatgggtacagcgtctcacaccagatatcggcccgctttccacaccgctccgctgatgtgaccacctctccctatgcagatactcagaattcgtacggctgtgccaccagtactccctacagcactagcagattgatgctgctgaatatgccaggacagctgcctcaaacactgtctagcccatcaacacggttgatcaccgaacccccgcaagcgacgttatggagcccatccatggtttgtgggatgaccacaccaccgacatcacctggcaatgtaccgcctgatctgtcccacccttactctaaggtcttcggtacaacggccggcggaaagggtacccctctgggtacgccggctacgtcgccccctcctgcccccagcgtaattcggatgacaacatgtaccttccactcaccccgccctcagtcccaccctccaggtcgtaagagggagtggattttacaggatcacgtgtatacggataacactattttctag

SEQ ID NO: 26809 - DNA, 3495 bp, synthetic construct
  misc_feature 1..3495: note = Description of Artificial Sequence: Synthetic coding sequence
  source 1..3495: mol_type = other DNA
atggcccagcaggccaacgtgggcgagctgctggccatgctggactcacctatgctgggtgtcagagatgacgtaaccgctgtatttaaggagaatctgaacagtgaccggggcccgatgctggtgaacactctggtagattactatctagagacgtcctcgcagcccgccctgcatattttgaccacactccaagaaccccacgacaagcatctgttggataggattaatgaatatgtcggtaaagctgctacacgcctctccatcctgagccttctcgggcacgtgatcagactgcagccgagttggaaacataaattatcgcaagccccattgctgcccagtcttctgaagtgtctcaagatggataccgacgtggttgtgcttacaactggagtactagtgctcattacgatgctgcccatgattccgcagtccgggaaacagcaccttttggatttttttgatatttttggccgcttgagctcctggtgccttaagaaacccggccatgtggctgaggtttacctggtgcacctgcatgcttcagtctacgccctgttccaccgcctgtatggaatgtatccttgcaatttcgtgagttttctgcgcagccattactctatgaaagaaaacctcgagactttcgaagaagtcgtgaaacctatgatggagcacgtgcgaatacaccccgaactggtcacaggaagcaaggatcacgagctggaccctcgcaggtggaagcgactggagacacacgacgttgtgatcgagtgtgccaagatctcacttgatccaactgaagcttcctacgaagatggctattccgtgtctcatcagattagcgcccgtttcccccataggtctgccgacgtgaccacatccccatatgctgatactcagaactcctatgggtgtgccacttccaccccctattctacgagtcgacttatgctcttgaacatgcctggtcagctcccccagacactgtcatccccttctacccgcctgattaccgaaccaccgcaggctaccctttggtcaccgtcaatggtatgtggcatgaccactcccccaacgtctccaggtaatgtgccaccagatctctcgcacccgtattccaaagtctttggcacaacggcaggtggaaaaggaacgccactcggcactccagcaacgagccctccacccgcacccctgtgccactcagatgactacgtgcatatcagcttgccccaggcaacagtaactcccccacggaaggaggaaaggatggatagtgctaggccctgcctccaccgccagcaccacctgctcaacgacagaggaagtgaggagcccccagggtctaaaggaagtgtgactctgtcggacttgccaggctttttaggggatttggcgtccgaagaagactcaatcgagaaggataaagaagaggcagcgatctcccgagagctctctgaaattaccactgcagaggctgagcccgtggtccctcggggcgggttcgattcgcctttttaccgcgattcgcttcctgggtctcaacgtaagacacattctgcagcctcatcctctcagggcgcaagcgtcaacccagagccattacattctagcctcgataagctgggacctgacacaccaaaacaggcgtttactcccatcgacctcccctgtggtagcgctgatgagtcacccgctggggacagggagtgtcaaacatctctggagacttcaatcttcacaccctcaccctgtaagatccctcctcccaccagggttggctttgggagcggtcagcctccaccgtatgaccacctgttcgaagtcgccttgccaaagactgcgcaccacttcgtcatcagaaagaccgaagagctactaaagaaggccaaagggaataccgaggaggacggcgttccatctacatccccaatggaagtcctggataggctgatccagcagggagccgacgcccactccaaggagctgaataagcttccgcttccctccaagtccgtggattggacacacttcggcggatctcctccctccgacgagattagaacccttcgcgatcaattgctgctgctacacaaccaacttctgtacgagaggtttaagcgacagcaacacgctctaaggaataggcgccttctgagaaaagtgatcaaggccgctgccttggaggaacataacgcagccatgaaggaccagctcaagcttcaagaaaaggacattcagatgtggaaggtcagcctccagaaggagcaggcaagatacaaccagttgcaggagcaacgcgacacgatggtgactaaactacactcacagatacggcagctccagcacgaccgagaagagttttacaatcaatcacaggagctgcagactaagctcgaagattgcaggaacatgatagctgagctgagaattgagctgaaaaaggccaacaataaagtatgtcacacagaactgctcctctcgcaagtcagccaaaagttaagcaacagcgaatcagtgcaacagcaaatggaattcctgaaccggcagctgctggtcttaggagaggttaatgagctctacctggaacagttgcagaataagcattccgatacaaccaaggaagtggagatgatgaaggcggcataccggaaagagttggagaagaatcgctctcatgtccttcagcagacccagaggcttgacaccagccaaaaaagaattcttgaactggagtcccacttggctaaaaaggaccatttattgctggaacagaagaaatacttagaggacgttaagctgcaggcgcgcggacaactgcaggccgctgagtcaagatacgaggctcagaaaaggatcacacaagtgttcgagctggaaatactggatctctacggtcggcttgagaaggacgggcttctgaaaaagttggaggaagagaaggcggaagccgcagaagccgccgaggaaaggttggactgttgtaacgacggatgttcggatagcatggtaggccacaacgaagaggcatcagggcacaacggcgagactaaaacccctcgcccttccagtgcacgcggctccagtggctcccgggggggtggtggatccagtagcagctcttccgagctgtcaacaccagaaaaaccgccacaccagagagccggccctttcagcagccgctgggaaaccaccatgggtgaggcgtcggctagtatacccaccacggtagggagcctgccgtccagcaagtccttcctgggcatgaaggctagagagctgttcaggaacaaatctgagtcccaatgcgatgaagatgggatgaccagttcactgagcgagtcactaaaaactgagctcggcaaggacctgggggttgaagccaaaatccccctgaatctcgacggacctcatccaagtcctcctacccccgattctgtcggtcagctccacatcatggattacaatgagacccaccacgagcattcctag

SEQ ID NO: 26810 - DNA, 849 bp, synthetic construct
  misc_feature 1..849: note = Description of Artificial Sequence: Synthetic coding sequence
  source 1..849: mol_type = other DNA
atggacaccgacgtggtggtgctgaccaccggcgtgctggtgctgatcacaatgttaccgatgattcctcaaagcggaaagcaacatctcctcgacttttttgatatattcggtcgattgtccagttggtgcctgaagaaaccgggccatgtggctgaggtgtacctcgtacatctgcacgctagcgtgtacgcactcttccatagattgtatggcatgtatccctgtaacttcgtgtcattcctccgctcccactatagcatgaaagaaaacttggagacattcgaagaggtggtcaaacctatgatggagcacgtacggatacacccagagctcgttactgggtcaaaggaccatgaattagaccctcgcagatggaagcggctggagacccacgatgtggtgattgaatgcgcaaagattagcttggatcccacggaggccagttacgaggatgggtacagcgtgtcccatcagatctccgcaaggtttcctcaccgttctgccgacgtgactacctctccctatgctgacactcaaaactcgtacgggtgcgctaccagcactccctatagcaccagcaggctgatgctcctgaatatgccaggtcatctggctaccacagtcagacctagacccccaggccccgccgcccccggcgcggtagttgaggccgaagtggtggaggctgctgcagctgccgctgcctcctttctgcctcaacgaaatcctcacacaagaggccaggcccattccgccgtcggtgggcgccggctgtgggaaaagagattgccagcttccccgcctctgtgggcacactttccggttcaaaaggccagctgggtgtag

SEQ ID NO: 26811 - DNA, 3342 bp, synthetic construct
  misc_feature 1..3342: note = Description of Artificial Sequence: Synthetic coding sequence
  source 1..3342: mol_type = other DNA
atggcccagcaggccaacgtgggcgagctgctggccatgctggacagtcccatgctgggcgtgcgcgacgacgtcacagccgtatttaaagaaaatcttaattcagaccgcggtcccatgctcgtcaacactttggtggattattatctggaaacgagtagccagcctgccctgcacattttgaccaccttgcaggagccccacgataagatggataccgatgtggtggtgctcactactggcgtgctagtgctgatcactatgctcccaatgattccacagtcaggaaagcagcacctgctcgacttcttcgatatttttgggcggctatcaagctggtgcttaaaaaagcctggccacgtggcggaggtatatctggttcacttacacgctagcgtgtacgcactctttcaccggctctacggaatgtacccttgtaatttcgtgtctttcctgagatcacactactctatgaaagaaaacctggaaacgtttgaggaggtggttaagcccatgatggagcatgtgcggatccaccccgagctggtgacaggttccaaagatcacgaactggaccctagacgctggaagcggctcgagacccatgacgttgtcattgaatgcgcaaaaattagtctcgatccaaccgaagccagctacgaggacggttattcagtttcgcaccaaattagcgccaggttcccgcaccggagtgccgacgttactacgtctccttatgccgacacccagaactcatacggatgtgccacgagcaccccatacagcacaagtcggctgatgcttctaaacatgcccgggcagcttccccagacgctctcaagcccttcaacacggttgatcacagaacctccccaggctacactctggtctccatcaatggtttgtggaatgaccacccccccgacaagccccggcaacgtcccccctgatttgagtcatccttactcaaaggtgtttggaacaactgctggaggcaaaggtacccccctggggacgccagcaacaagtccgccccccgccccactatgtcattcagacgactacgtgcacatatcccttcctcaggccacagtcactccaccaaggaaagaggagagaatggacagcgcccgcccatgcctgcaccgccagcaccacctgttgaacgaccgcggaagcgaagagccacccgggagcaagggctcagtgacactttcagacctcccagggttcttaggggaccttgcgagcgaggaggactccatcgaaaaggacaaggaggaagccgctatcagccgggaattgagcgaaatcacaacggccgaggcagagccggtagtcccccggggaggatttgattcgcctttttaccgagattcacttccggggtctcagcggaagacccactccgcggcttcctcaagccagggcgccagcgtgaatccagagccattacactcctctcttgataagctgggcccggatacccctaagcaggccttcactcccatcgacctgccttgcggaagcgcggacgaaagcccagctggagaccgggagtgtcagactagcctggagacttctattttcacccccagcccatgcaaaataccgccgcctacccgtgtcggctttggctccggccagcccccaccatatgatcatctctttgaagtggccctgccgaaaactgcacatcacttcgtgatccgtaagacagaagaactgctcaaaaaggccaaggggaacactgaggaggacggggtgccctctacttcccctatggaggtcctggacagacttattcagcagggggcagatgctcactccaaggaacttaacaagctgccattaccaagtaaaagcgtggactggacccatttcgggggtagccccccctctgatgagatcagaacattgagggaccaattgctgttgctccataatcaactcttgtacgaaagatttaaacgccagcagcacgccctaaggaacaggagactgctgaggaaggtgataaaggctgccgcgttagaggaacataatgctgcgatgaaggatcagctcaaattgcaggagaaggatattcagatgtggaaggtgtctttacaaaaagagcaagccagatataatcagctccaagagcagcgagataccatggtgacaaaattacattcccagataaggcagctgcagcacgaccgagaggaattttacaaccagagtcaagaactacagacgaaacttgaagattgccggaacatgattgccgaactgagaatagagctgaaaaaagctaacaataaagtctgtcacaccgagcttcttttgtcgcaggtcagccagaagctgagtaacagtgaatcggtgcagcagcaaatggaatttcttaataggcagttattggtgcttggtgaggtgaacgaactttatctggagcagctccagaacaaacactctgatactacaaaagaagtcgaaatgatgaaagccgcttacagaaaggaacttgagaagaatcggagtcatgtgctccagcagactcagagactggacacgagtcagaaaagaatactagagcttgaaagtcatctggcaaagaaggatcaccttctattggaacagaagaagtaccttgaagatgtgaaacttcaggctcgcggacagttgcaggccgcagagtcccggtacgaagcccaaaaacgcattacgcaggtatttgagctggagatcctcgacctgtacggtagacttgaaaaggatggcctgcttaagaaactggaggaggaaaaagcagaggcagctgaagccgctgaagagcggctcgattgttgcaacgacggatgttccgatagtatggtaggacacaatgaggaagccagcggacataacggggaaactaaaaccccccgacccagcagcgctcggggaagctccgggtcccgcggtggcggcggatccagctcatctagttccgaactgagtacaccagaaaagccaccacatcagagggccggcccctttagctcacggtgggagacaaccatgggtgaagctagcgcgagtattcccactacagtgggctctctgcctagcagcaagtcattcctgggtatgaaggcaagggaactctttagaaataagagcgagtctcagtgcgatgaagacgggatgacctcatcactgtccgagtctctcaaaaccgagctgggtaaagatctgggggttgaggccaagatccctctgaacctggacggacctcatccctcaccacccacacccgactcagttgggcagctccacatcatggattacaacgagacccaccatgagcactcttag

SEQ ID NO: 26812 - DNA, 2397 bp, synthetic construct
  misc_feature 1..2397: note = Description of Artificial Sequence: Synthetic coding sequence
  source 1..2397: mol_type = other DNA
atggccctgcacagcccccagtacatcttcggcgacttcagccccgatgaattcaatcagttcttcgtgacccctcgttcctcggttgagctacctccctactccgggacagtcctctgtgggacccaggccgtagacaaactccctgacggacaggaatatcagcgcattgagttcggcgtcgacgaggtgattgagccaagcgacacactgccaaggacaccctcctatagcatttctagcaccttaaacccgcaggcccctgaatttattctcggctgtacagcttccaagattacccctgatgggattaccaaagaggcatcttatgggtctatcgattgccagtacccaggaagcgccctagccctggatggttcgtcaaatgtggaggcagaggtgcttgagaatgacggcgttagcggagggctcggccagcgtgaacgcaagaaaaaaaaaaaaagacctcctggctattattcgtatctcaaggacggcggcgacgactcaattagcacagaggccctcgtgaacggccatgctaactctgccgtaccaaacagcgtttctgccgaagacgccgaattcatgggcgacatgccccctagcgtaaccccccggacatgcaattctccccagaactctaccgattccgtttccgacatcgtccccgatagcccattcccgggagcactgggctcggacacaagaacagcaggccagccagaggggggccccggtgccgactttggccagtcttgtttccctgctgaggctggacgcgacacactgagcaggaccgcgggtgcacagccttgcgtgggcaccgacaccacggagaacctgggcgtggccaatgggcaaatcctggagtcttcaggcgaaggaacggctactaatggtgtggagctccacacaactgagagcatcgacctggaccccaccaagcctgaatctgccagcccccctgccgacgggacaggaagcgcctctggtacccttccagttagccaacccaagtcctgggctagcctgtttcacgattcgaagccttcatcctctagtcccgtggcctacgtggaaacaaaatactcaccaccagccatcagcccactggtgagcgagaagcaggtcgaggtcaaagagggtctggtgccagtgagtgaagaccccgtcgcaataaaaatcgctgagcttctggagaacgttactttgatccacaaacccgtgagcttgcagccaaggggcctgattaataaaggcaactggtgttatatcaacgccacgctgcaggccttggtggcgtgccctcctatgtaccacctgatgaaattcattcctttgtatagcaaggtgcagcgaccttgtacttctacacctatgattgatagtttcgtgaggctgatgaacgagttcaccaacatgcctgtccctcccaaaccacgacaggcattaggggacaagattgtgagagatatcaggcccggcgctgccttcgagcccacctacatatatcggctgctgaccgtcaataaatctagcctgtccgaaaaaggcagacaggaggatgctgaggagtacctgggcttcatcctaaacgggctgcatgaggagatgctaaatctcaagaaactactatcaccaagcaatgaaaaactaacgatatcgaatggtccaaaaaatcactccgtgaacgaggaggagcaagaggagcagggcgagggatccgaggatgagtgggagcaggtcggccccagaaataagacatcagtgactcgacaagctgacttcgtccaaacaccaattaccggtatattcggtggccacatccgctctgtcgtatatcagcagtcgtctaaggagagtgcgactctgcagcctttcttcacattgcagttggatatccagtctgataaaatccgaacggtgcaggacgccctagaaagtttggtcgcgagggagtctgtccaaggttacacaaccaaaacgaagcaggaagttgaaatatctcgccgggtgacactggaaaaactgcccccagtgcttgtactgcaccttaagcgcttcgtctatgaaaagactggcggatgtcagaaactgattaaaaacattgagtaccccgtggatcttgaaatcagcaaagagttactgtctcctggggtcaaaaacaagaattttaaatgtcaccgcacataccggctgttcgccgtcgtgtaccaccatggtaacagcgcaactgggggacattatacgaccgatgtgtttcagattggtctcaacggctggctgcggatcgacgaccagacagttaaggttattaatcaataccaagttgttaagccgacggccgagcggaccgcctacttgctctattaccgccgcgtggacctcctctag

SEQ ID NO: 26813 - DNA, 5355 bp, synthetic construct
  misc_feature 1..5355: note = Description of Artificial Sequence: Synthetic coding sequence
  source 1..5355: mol_type = other DNA
atggccaagcccaccagcaaggacagcggcctgaaggagaagttcaaaatattactcgggttgggaaccccacgtcctaatccccgctcagccgaggggaagcagactgagttcattatcaccgccgaaatcttgcgcgaactcagcatggaatgcggcttaaataatcggattcggatgatcggccagatttgcgaggtagccaaaactaaaaagtttgaggagcacgccgtcgaagctctgtggaaggccgtcgccgatctactccaacccgagcgtcctttagaagcaagacacgctgtgttggcccttctaaaggcaatcgtccagggacagggcgagcgcctgggggtgctgcgggccctgttctttaaagttatcaaagattacccctccaacgaggatctgcatgagaggctggaggtattcaaggcactgaccgacaacggacgccatatcacctacctggaagaggagcttgccgacttcgtgcttcagtggatggacgtgggactgtcatccgaatttttgctcgtgctggtgaatctggtgaaattcaatagttgctatctggacgaatatatcgcccggatggtgcagatgatctgccttctgtgtgtgaggacagcttcaagtgtcgacatcgaggtttcactgcaggtccttgatgctgtggtgtgttataactgtcttcccgcggagtctctgcctttgttcatcgtcaccttgtgccgtacaattaatgtgaaggaactttgcgaaccctgctggaagcttatgagaaatttactcggcacccacttgggacactccgccatctacaacatgtgtcatctcatggaagatcgggcttacatggaggacgcacccctgttaagaggagctgtgttcttcgtcggcatggccctttggggagcccaccggctctatagtttgcgcaactctcccacctcagtcctcccatccttctaccaggctatggcatgcccaaatgaagtcgtgtcgtacgagattgttctctctatcaccagactgatcaaaaagtatagaaaggaactccaagtggtggcttgggacattctgctgaacattatcgagagactcctgcagcaactacaaaccttggattccccagagctgaggaccatcgtgcacgacttgctgaccactgtagaggagctatgtgatcaaaatgaattccacggctcccaagagcggtactttgagctcgtcgagcgttgcgccgaccagagacctgagagctctctgttaaatctgattagctacagagcccaatcaatccacccagcgaaggatgggtggatccaaaacctgcaggccctcatggaaaggtttttccgttcggagtccaggggcgcagtgaggattaaagtattggacgtcctgtctttcgtgctcctgattaaccgtcagttctacgaagaggagctgattaactccgtcgtaattagccagttgtctcacattccggaagataaggatcaccaagtacggaagctagcaacccagctcttggtcgatctcgctgagggttgccacactcatcactttaatagtctccttgatatcatcgaaaaggtgatggcgcgatccctttctccgcctcccgaactggaggaaagggacgtcgccgcctacagcgcatcacttgaagacgtcaaaactgcagtcctggggcttcttgtaattctccagactaagctgtacacgctgcctgcttcgcacgctacgagagtgtacgaaatgttggtatcccacattcagctccactataaacattcctatacgctgcccattgcctcctcaattcgactgcaggctttcgattttctgctgctcctgagagctgactctctccacaggctcgggttgccaaataaggatggcgtcgtccggttcagtccctattgcgtttgcgactacatggagcctgaaaggggttctgagaaaaagaccagcggacccttgtctccacctactgggcccccgggaccagcacctgcgggacccgctgtgcggcttggaagtgtcccatactccctgctctttcgcgtcctgctccagtgtctaaaacaagaatctgattggaaagtcctaaaactagtgctgggacggttacccgagtctctccgctataaggtgctgatcttcaccagcccttgttcggtggatcaactttgtagcgccctgtgcagcatgttgtctggacccaaaaccctggagcgtctgaggggcgcccccgaaggattttccaggacggatctgcacttagctgttgtgccagtccttacagccctgattagttatcacaattacttggacaaaacaaagcagcgagagatggtatattgtctcgagcaggggctcattcacagatgtgcaagccagtgcgttgtggctctgagtatctgctcagtagagatgccagacattataatcaaagccttgcctgtgttggtagtgaagctgacccacatcagcgccacagcatcgatggccgtgcccctgctcgaattccttagcaccctcgctcgattaccccatctctacagaaactttgcggctgagcaatatgccagtgtgttcgccatcagcctcccatacaccaacccctccaaatttaatcagtacattgtatgtcttgctcaccacgtcatcgccatgtggttcatccggtgtcgtcttccttttaggaaggacttcgtgccctttataactaagggcctgcgtagcaatgttctgctgtcttttgacgatacacctgagaaggactcctttcgtgcccgatctacatccctgaatgagagacccaaatctttgcgcattgcccgccccccgaaacaaggcctgaacaactctcctccggtcaaagaatttaaggagtctagcgccgctgaggcttttcgatgccgcagcattagcgttagtgaacatgtcgtgaggtctaggatccagacatctttaacgagcgcttctctcggatcggcagatgaaaacagcgtcgcacaggccgacgatagtctgaaaaacctgcatctcgagctgactgagacatgcttagacatgatggccagatatgtctttagcaactttacagccgtccctaaacgcagtcccgtgggtgaatttctcctggctggcggccgtaccaaaacctggcttgtcggaaataaactggtcaccgtcacaacctctgtcgggacagggacaagatcactccttggattggactcaggagagctgcagagcgggccagagagcagttcgagcccaggcgtgcatgtgcgccagacaaaagaagcccccgccaagctggaaagtcaggccggccagcaggttagtcgtggtgcccgggaccgcgtacgatctatgtctggtgggcacgggctccgagtgggcgctctcgacgtgccagcatcccagttcctcggtagtgccacctccccaggacctagaactgcaccagcagcgaaacccgagaaagcgagtgcgggcacccgggtgcccgtccaggaaaaaaccaatctcgcggcttatgtacccctgctgacccagggctgggcggaaatcctggttagaaggccaaccggcaatacttcttggctcatgagtctggagaacccgctcagcccattttcctcagacatcaacaacatgccactccaagagctctcgaacgcgctgatggctgcagaaaggttcaaagagcatagggacacagcactctataaatctctcagcgtgccagccgctagtacggccaaacctccgcctctgccacgatctaataccgattctgccgtggtgatggaagagggctcgcccggcgaagttcctgttttggtagagcctcctgggctggaggatgtcgaagccgccctggggatggaccgtagaaccgacgcttacagcagaagctcttcggtgtctagccaggaggagaaaagccttcacgcagaggaactggtaggccgaggaattcccatagagagagtggtttctagcgaggggggccgtccttcagttgacctgtccttccagccgtcccagccactctccaagtcttcaagttccccggagctgcagactcttcaggacattttgggggaccctggagataaggccgatgtcggccgactctcccccgaagtaaaggccagaagccagtctggcacactggacggagagtctgccgcctggtcggcgtcaggcgaggattccaggggtcagccagaaggtcctttgccatctagctcccctcggtctccaagcggactccggcctagggggtacaccattagcgactcggctccttctagaaggggtaagagggtcgagcgcgatgctctcaagagtagggctacggcttctaacgctgaaaaggtgcctggcatcaacccctccttcgtctttctccagctctatcactcccccttcttcggcgacgaatccaataaacccatcttgctaccgaacgagtcacagagcttcgagagatccgttcagttgctggaccagattccctcatacgacacccacaagattgcagttctgtatgttggcgagggccaaagcaactcagagctggcaatcctgtcaaatgagcacggcagctaccgctacactgagttcctgaccggcctcggacgtctaatcgaattaaaagactgccagcccgataaggtgtacttgggaggtctggacgtttgcggagaagatggccagttcacatactgctggcatgacgacattatgcaggccgtatttcatatcgccaccctcatgcccaccaaagatgttgacaagcacaggtgcgataagaagcggcacttaggtaacgacttcgtgtccattgtgtacaacgacagcggtgaggattttaagcttggcacaatcaaggggcaatttaatttcgtccatgttatagtgaccccgttagattatgagtgcaatctggtgagcctgcagtgccgcaaagacatggaaggcctggtggatactagcgtcgcaaagatagtcagcgaccggaatctgccattcgtcgcgaggcagatggcactgcatgccaatatggcttcacaggtgcaccactctagaagtaaccctacggatatttacccaagtaagtggattgcccggctgcgccacatcaagagactgagacaaagaatttgcgaagaggctgcatactctaaccccagtctgcctttggtacaccctccatcccacagtaaagcacccgcgcagactcctgcagaacccacacccggttatgaagtggggcagcgaaagcgactgatctcgtctgtcgaagattttaccgaattcgtgtag

SEQ ID NO: 26814 - DNA, 5295 bp, synthetic construct
  misc_feature 1..5295: note = Description of Artificial Sequence: Synthetic coding sequence
  source 1..5295: mol_type = other DNA
atggccaagcccaccagcaaggacagcggcctgaaggagaagttcaagatcctactcgggcttggtacacccaggcccaacccaaggtccgccgagggtaagcaaaccgagttcattataaccgctgagatcttgagggagctgagcatggagtgcgggctcaataacagaattagaatgattggccagatttgcgaggtggccaagactaaaaagtttgaagaacacgccgtggaagcactctggaaggctgtggccgaccttctccagcctgagcgtccactggaggctagacatgccgtcctggcactcctgaaggcaattgtgcagggccagggagaacgacttggcgttctgcgagcgctctttttcaaggtcataaaagactatccttcaaacgaagacctgcacgagaggctggaggtttttaaagccctcaccgataacggtcgacacatcacatatctggaagaggagttagcggacttcgttctgcagtggatggacgtggggttgagctctgagtttctcctcgttctggtgaatctcgtgaagttcaatagctgctatctggacgagtacatcgcccgcatggtgcagatgatctgtcttctgtgtgtgcgcaccgcgtctagcgttgatatcgaggtaagccttcaggtgctggacgcagtcgtgtgttacaactgcctgcccgctgaaagcctacccctattcattgtgactctttgcaggactatcaatgttaaggagctgtgcgagccgtgctggaaactcatgagaaacttgttgggcacacacctgggacactctgcgatctacaacatgtgccacctgatggaggatagagcttacatggaggacgctccgctgttgagaggggctgtgttttttgtcggtatggctctgtggggggcgcaccggttgtattcattaagaaacagccccacaagtgtgctcccatctttttaccaggcaatggcatgtccaaacgaggtggtgagctacgaaattgtactgtctattaccagactgattaagaagtatcggaaggaacttcaggtggtcgcctgggacatcctcctcaacattatcgagagactgctgcagcagctccaaacactggattcccccgagcttcgaacaattgtgcatgacttgctcacaacagtagaggagctctgcgaccagaatgagttccatggctcacaagagcggtacttcgagctggtagagaggtgtgccgaccagcgcccggaatcctcacttctgaatcttatcagctacagagcccaatctatccaccccgctaaggatggctggatacagaacctgcaggcccttatggaacggttcttcagaagcgaatcacgcggcgctgttcggatcaaagtactggacgtcttgagctttgtactgcttatcaaccggcaattttacgaagaagagctgatcaactccgtggtcatctctcagctgagccacattcccgaggacaaagatcatcaggtcaggaagctggccacccaactgctcgttgatttagcggaaggatgccatacacatcattttaattcactgctggatataatagaaaaggttatggccaggtcattgtcacctcctcctgagcttgaggagagagatgtcgcggcttattctgcctctttagaagacgtgaagacagcggtcctcggtctgctggttatactgcagaccaaactgtataccttgcctgcgtcacatgctaccagagtctatgagatgttagttagtcatatccagctacattataagcacagctatacactccctatcgccagctctatccgcctccaggcgttcgacttcttgcttttgttgagagccgactcacttcatcggttggggcttccaaacaaggacggggtcgtgcggtttagcccttactgcgtatgcgattacatggagccggagagaggcagtgaaaagaaaacttccgggcctctgagtccacccaccggcccccccggcccggcccctgctggccccgccgtgagattaggaagcgtgccttactccctcttattcagagtgctgttgcagtgtctcaaacaggaatccgattggaaggtgctgaagctggtacttggtaggctgcctgaaagccttagatataaggtcctgatctttaccagtccttgttctgtggatcagctgtgttccgcgctgtgctctatgttatccggacctaagaccctggaaagactcagaggagccccagaaggcttctctaggactgacttgcacttggcagtggtgcctgtccttacagctctgatcagttaccataattatctggataagacaaagcaacgcgaaatggtatactgcctggaacagggcctcatccatagatgcgcatcccaatgcgtcgtggccctcagcatctgctctgtcgagatgcccgacataataatcaaggccctacctgtgctggtggtcaagctcactcatatctcggcaaccgcctcaatggccgtgcctttgttggaatttctgtctacgctggcacggctgccacacttatacaggaattttgccgccgaacagtacgccagcgtgtttgcgatctctttgccatacactaatccaagtaagttcaaccagtacatcgtttgcctggcccaccatgtgattgctatgtggtttatccggtgtcgtcttccatttcggaaggacttcgtcccttttattaccaaaggcctgcgttctaacgttttgctgtctttcgacgacactcccgaaaaggattccttccgcgccagaagcacatccctaaacgaacgacccaagagtcgtattcagaccagtctcactagcgccagcctcgggtctgctgatgaaaattccgttgcccaggcagatgacagtctgaaaaacttacatctggaactgaccgaaacctgcctggacatgatggccagatacgtgttttcgaatttcacggctgtccccaaacgctcccctgtaggggaatttttgctagctggcggccgaactaagacatggttagttggaaacaaactcgtgactgttactacctcggtcgggaccggcactcgatcgttgcttgggcttgattcaggcgagttacagtccggacctgagagtagctctagcccgggggtgcacgttcgccaaaccaaagaggcccctgccaagctggagtcccaggccggccagcaggtgagtcgcggtgcccgggaccgggtgcgtagtatgtcaggaggccatggactgcgggtgggcgcactcgacgttcccgcctcccagttcttgggctccgcaacaagtccggggcccaggaccgctcccgcggcaaagccagagaaggcttccgcaggaacacgggtcccagtccaggagaaaacaaacttggcagcgtacgtgccattgttaacccaggggtgggccgaaattctagtgcggcggcccacaggaaatactagttggctcatgtctctggaaaaccctctcagtcccttcagtagcgatattaacaatatgccactgcaggagctgagtaatgccctcatggccgctgagagatttaaagagcatcgcgacaccgccctttataagagtctttcagtgcctgccgcctctactgcaaagccgcctcctctaccacggagtaacacagtagcctccttctcttccctatatcagtcatcttgccagggtcagctgcatcgttctgtgtcatgggccgatagcgccgtggtgatggaggagggcagccccggcgaggtgcctgttctagtggagccacccgggctggaggatgtggaggccgcactcggcatggacaggcgcactgacgcttactccagatcaagctccgtctcgtctcaggaggagaaatctttgcacgctgaagaattagtgggccggggaataccaattgagagagtcgtctcaagtgagggagggcgcccaagcgtggatctgtccttccagccttcacagcctctgagcaaatccagcagcagccctgaactacagacgctgcaggacattctgggagatccaggtgataaggcagacgtcggcaggttatcccccgaggttaaagcaagatcccagtctggtactctggatggggaatcggctgcgtggtccgcttctggggaggacagtagagggcagccagagggccccctcccgtcttccagtccgaggagcccctcaggactccggcctcgtggatacacaattagtgatagtgctcccagccggagaggaaaaagggtcgagagggatgcacttaagtccagggccaccgcatctaatgccgaaaaagtgcccggaatcaacccttccttcgtcttccttcaactgtatcattcaccctttttcggtgatgaatccaataaacctattttactgcctaacgagagccaatctttcgaacgatcggtccagttgctcgatcagattccctcctatgatacccacaaaattgcagtcttgtatgtaggggagggccaaagcaacagtgaactcgctattctgtctaatgagcatgggtcctaccgttacaccgaattcctgactggcctgggccgactgatcgaactgaaggattgccagcccgataaggtgtacttaggagggctcgacgtgtgcggcgaggacggccagttcacttactgctggcatgacgacatcatgcaggccgtgttccacatagcaacactcatgcccactaaggatgttgacaaacaccgctgtgataagaaacgccatctggggaatgatttcgtgagcatcgtgtacaatgactctggggaggattttaaactgggaactatcaaggggcagttcaattttgtccatgtaatcgtcacacctttagactacgagtgtaaccttgtgtcactccaatgtcggaaagacatggagggtctcgtcgatacttcagtcgccaagattgtttcggacagaaatttacctttcgtcgcgcgtcaaatggctctccatgctaatatggcgtctcaggtgcaccattctaggtccaatcctacagatatatatccatccaagtggattgctcgcctgcggcacataaagcggctcagacagaggatctgtgaggaggcagcctattccaatccctccctgccactcgttcatcccccatctcactctaaggctcctgcacagacacctgccgagcctacaccagggtacgaagtggggcagaggaagcggctcataagttccgtggaagacttcaccgagtttgtctag

SEQ ID NO: 26815 - DNA, 5079 bp, synthetic construct
  misc_feature 1..5079: note = Description of Artificial Sequence: Synthetic coding sequence
  source 1..5079: mol_type = other DNA
atggagtgcggcctgaacaaccggatccggatgatcggccagatctgtgaagtggccaagactaagaagtttgaggagcatgcggtggaggccctgtggaaagctgtagcagatcttctgcagccagagcgtccgctggaagcgcggcacgctgtacttgcattgcttaaggctatcgtccaaggtcagggcgaacggttgggggtgctcagggcgctgttctttaaggttattaaagattatccctctaacgaagacctccatgaacggctggaggtgtttaaggccctgaccgacaacgggcgccacatcacatacctcgaagaagaacttgccgacttcgtgcttcaatggatggacgttggcctgtcttctgaattcctcctggtccttgtgaaccttgtcaaattcaacagctgctatttagacgaatacatcgctcgaatggtgcagatgatctgcctactttgcgtgcgtaccgccagcagcgtcgacatagaggtttctctccaggttctggatgccgtggtatgctacaactgtttgccagcagagagcctacctcttttcatcgtgacactctgcagaaccattaatgtgaaagagctttgcgagccttgctggaaactgatgcgcaacctgctaggcactcacttaggccactccgctatatacaacatgtgtcacttaatggaagatcgcgcctatatggaagatgcgcccttgttaaggggagctgtgtttttcgttgggatggccttatggggcgcacataggctgtactccctgcgcaattctcctacctctgttctgcctagcttctaccaagcgatggcttgccctaatgaggttgttagctatgagatcgtgctctctatcacacggctcatcaagaaataccgcaaagagctgcaggttgtggcttgggacatcctcttgaatataattgagcgtctcttgcagcagctgcagaccctggatagtcccgagctgagaactatcgttcacgacctcctcactacggttgaggaattatgtgatcagaacgagttccatgggagccaggagaggtatttcgaactggtggagagatgtgcagatcaaagacctgaatcatccttgctgaatctgatctcttatagagcacaatcgatccatccagctaaagacgggtggattcaaaacctacaagcactcatggagagattcttcagatcggagtcaaggggcgccgtccgcatcaaagtcctggacgttctctcatttgttctgcttatcaacagacagttctacgaggaggaattaattaactcagtcgtgatttcccagttgtcccacatccccgaggataaagaccatcaggtccgcaagctggccacgcagcttctagtggatctggcagaagggtgccacacacaccattttaacagcctcctcgacataatagagaaagttatggccaggtctttgagtccaccccccgagctggaggaacgagacgttgccgcttacagcgccagcctggaagatgtgaagacagctgtccttgggctgcttgtcatccttcagactaaactgtatacactgccagctagtcacgccaccagggtgtacgaaatgctggtgtctcacattcaattgcactataaacattcttataccctccccatagccagctctatccgtttgcaagcctttgacttccttttgctcctgcgtgctgactcccttcaccgcctgggactgccgaacaaggacggagtggtccggttctctccatattgcgtgtgcgactacatggagcctgagagaggcagtgaaaagaagacaagtggacccctgtcgcctcctactggcccaccggggcccgcacctgctggacctgccgtacgacttggtagtgttccatactctctcctatttcgcgttttgctgcaatgcttaaagcaagagtcagactggaaagtattaaaactggttctaggacggctgcctgaatctctgagatacaaagtgctgattttcacgagcccctgttccgtggaccaactatgcagtgccctgtgcagcatgctgtcggggccaaagaccctcgaacgccttcgtggggctcctgaaggcttctcccgcaccgatctacatctggctgtggtgcccgtccttactgctctgatctcttaccataactacctggacaagacaaagcagcgagaaatggtatactgcctggaacaaggcctcattcataggtgcgcgagtcagtgcgtcgtggctctgtcgatttgcagcgtggagatgcccgatattatcatcaaagctctgcccgtgctggtagtgaaattgactcatataagcgccacggcgtccatggccgtcccactactggagttcttgtctacgctagcgcgcctgccacatctgtaccgcaacttcgcagcggagcagtatgcctctgtctttgcaatcagcttaccatacacgaatccttcaaaattcaaccagtacattgtctgcttggcacaccacgttatcgccatgtggttcatcaggtgccgcttaccattcagaaaggacttcgtccccttcatcactaaggggcttcgctccaatgtactgttgtcattcgacgacacgcccgaaaaagattcattccgagcccgttctacatccctcaacgaacgtccaaagtcacggatccaaacttctctgacctctgcttccctgggtagtgccgatgagaactccgtggctcaagcagatgactccctcaaaaatttacatctggagctgaccgagacttgtttggatatgatggctcgctacgtgttttccaactttacggcagtcccaaaaaggagcccggtgggtgagttcctgcttgccggtggaaggaccaaaacatggctggttgggaacaagctcgtgactgtcacaacctccgttggcactggcacgcgcagtctgttaggcctcgactctggcgaactacagagtggccccgagtcctctagctccccaggggttcatgtgcgacaaaccaaagaagcccccgccaagctggagtcacaggcagggcagcaagtgtcgcgcggcgctagggacagagttcggtccatgtctgggggccatggcctccgcgtgggcgcgcttgatgtccccgcctctcaatttcttggctccgccaccagccccggaccccggacggcgccggctgcaaaacccgagaaagcgtccgccgggactcgcgtacccgtgcaggaaaagaccaatctggcagcctatgtgccactgctcacacaaggctgggccgagatcctagttcggagaccgacgggtaacacatcatggctcatgtcactggaaaatcctttatcgcctttcagcagtgacattaacaatatgccactgcaggagctttctaatgctttgatggctgccgaacggttcaaggagcatagggacaccgcgctctataagtccctgtctgtaccagcagcttcaaccgccaagcctcctcctcttccacgttcaaatactgatagcgcggtcgttatggaagaggggtccccgggcgaggtgcccgtgctggtggagccgccaggacttgaggacgtggaagccgccttgggtatggataggcgtaccgatgcctattcccgcagttcaagcgtgtccagccaagaagagaaaagcctgcatgcagaagagctcgttggccggggaattcccattgagcgggtcgtgagttctgaggggggacgtccttccgtagatctctccttccaaccaagccagccattatctaagagcagtagcagcccagaactccagactttgcaggatattctgggggacccaggcgacaaggcagatgtagggcggcttagtcctgaagtcaaagccaggtcacagagtggtacactcgacggcgaatcagccgcgtggagcgcaagcggcgaggactccaggggtcagccagaaggtcccttgccgagctctagtcctcgcagtccaagtggcttgcgaccccggggctatactatttccgatagcgcacccagcagaagaggcaaacgagtggaaagggacgctcttaaatcgcgtgcaaccgcttccaatgctgagaaagttcccggtatcaacccaagcttcgtgtttctacagctataccacagtcccttcttcggcgacgaatctaacaaaccaattctgctgcctaatgagtcacagtcatttgagcgaagcgtccagctccttgatcagatcccgagctacgatacccacaagatcgcggtgctgtacgtgggagaaggccagtccaattccgagctggcaatcctcagtaatgagcatggatcgtatcgatatacagagtttctgacggggcttggtcgcctgattgagctcaaagattgtcagccagacaaagtctatctggggggacttgacgtttgtggcgaggacggtcagttcacttactgctggcatgacgatatcatgcaggccgttttccatattgccaccttaatgccaactaaagatgtcgacaagcaccgctgtgataagaagcggcatttaggcaacgacttcgtctcaattgtttataacgatagcggggaggactttaaattagggaccattaagggccagtttaatttcgtgcacgttatagttaccccactggattacgagtgtaacctggtctcccttcagtgccgtaaagacatggagggactggtcgatacaagcgtggccaagatagtgtccgatcggaatcttcctttcgtggcacggcagatggccctgcacgctaacatggcttcccaagtccatcattcgcgcagtaaccctacagacatctacccatccaaatggatagcccgattgaggcatatcaagaggcttaggcagcgtatctgtgaggaggctgcttattctaatccttccctgcctcttgttcacccgcccagccactcaaaagctcccgctcagaccccagcagagccgaccccagggtacgaagtgggacagagaaagcgcctcatcagcagcgtggaggactttaccgaattcgtgtag

SEQ ID NO: 26816 - DNA, 5226 bp, synthetic construct
  misc_feature 1..5226: note = Description of Artificial Sequence: Synthetic coding sequence
  source 1..5226: mol_type = other DNA
atggccaagcccaccagcaaggacagcggcctgaaggagaagttcaaaatcttgctgggcctgggcactccgaggccaaatcctaggtccgctgaaggcaagcagactgagttcattatcaccgcggaaattttaagggaactcagcatggaatgtgggctgaataataggatcagaatgattggtcagatctgcgaagtggcaaaaaccaagaagtttgaggaacatgctgtagaggctctttggaaagcggtggcagatctcttgcaacctgaaagacccttggaagcccggcatgccgtgctggccctactgaaagccattgtccaaggccagggcgaacgacttggtgtcttacgtgctttattctttaaagttattaaagactatccttctaacgaggatctgcacgagcgcctcgaggtatttaaagccttaaccgataatggacgccacatcacttatctcgaggaggaactggctgactttgtcctgcagtggatggatgtcgggctttcaagcgagttcctcctcgtgcttgtcaacttagtaaagtttaacagttgttaccttgacgaatatatcgccagaatggtgcagatgatatgtctgctgtgcgtgcggaccgcttccagtgtggatattgaagtgagcttacaagtgttggacgctgtcgtatgctacaactgcctcccagctgagtccctgcctctcttcattgttaccctgtgtaggaccatcaatgttaaggagttgtgcgagccttgttggaaattgatgagaaatctgttgggaacccatttaggccattccgccatctacaatatgtgtcacttaatggaggatcgggcttatatggaagatgctccactgttgcgaggcgccgtgttctttgtggggatggccttgtggggggctcatcggctctattccttgagaaattcccctactagtgttctaccatctttttatcaagctatggcgtgtccaaacgaagtggtgtcctacgagattgtcctctctattacccgtctgataaagaaataccggaaggaactccaggttgtagcatgggatatcctgctgaacattatcgaaaggctgctgcagcaactgcagactctggactccccggaactacgcaccatagtgcacgatcttctcaccacagtggaggaactgtgtgatcagaatgagttccatggcagtcaggaaagatactttgaactcgtagagcgctgtgctgaccaaagaccggagtctagcctactgaatctgatctcatatcgagctcagagtatccacccggctaaggacggctggatccaaaacttgcaggccctgatggaaaggtttttcaggagtgaatcccgtggggccgtccgcatcaaggtgctcgacgtgctttcgttcgtgctcttgataaaccggcagttttatgaagaggaactgatcaatagcgtggtgatcagccagctatctcacatacctgaggataaggatcaccaagtccgtaaactcgccactcagttgctggtggatctcgcagagggttgccacactcaccacttcaattcactgctggacattatcgaaaaggttatggctaggtcattatccccaccgcccgagctggaggaacgggacgtggctgcttatagcgcaagcttagaggacgtgaagacagcggtcttgggattgcttgtgatactgcagacgaagctttacacgttgcctgcctcccacgccacacgagtgtatgaaatgctggtcagccacatacagctgcattacaaacacagttatacccttcctatagccagctctatacggctgcaagcttttgactttctgctgctgcttagggccgattccctgcacagactggggctgcctaataaggatggtgtggttaggtttagtccgtattgtgtctgcgactacatggaacccgaacgaggtagcgagaaaaagactagtggtccactcagcccacccaccgggccccccggaccggccccagctggtccagcagtcagactgggctccgtgccttactctctactttttcgagtcctgctgcagtgcctgaagcaggagagtgattggaaggtgctgaagctggtgttgggaagactgccagagagcttaaggtacaaggtgttgatctttacatctccctgcagcgtggaccagctttgcagcgcactgtgttcaatgctctccggacccaagacgcttgagagactgaggggagcgccggagggtttctcccgaaccgatctgcacctcgcagtggttcctgttttaaccgcgctgatttcataccacaattatctggataaaacgaaacaaagggagatggtctactgtctcgaacagggcctgattcaccgctgcgccagtcagtgcgtggtcgctctctccatttgcagcgtcgagatgcctgacattattatcaaggctctgcccgtgttggttgtcaagctgacccacatctctgctaccgcatccatggcagtccccttactagagttcctgagcactcttgcgcgtctgccgcacctgtatcggaactttgcagccgaacagtacgcctccgttttcgctatctctctcccctacacgaacccctccaagtttaaccaatatatcgtgtgcttagctcaccatgtaatcgcgatgtggttcatccgttgccggctcccttttagaaaggattttgtgcccttcatcaccaagggcctccggagtaatgtgttacttagcttcgacgacacccccgagaaagacagcttcagagcacgctctacctccctcaatgaacgccccaagtctcgtatccagacctctctgacctccgccagtcttggatctgcggatgaaaattccgttgctcaggcagacgacagcttgaaaaacctgcatctcgaactgacagagacttgcctggatatgatggctcggtatgtgttttccaacttcaccgctgtgcctaaaaggtcaccagtgggtgagtttttgctggccggcggccggacaaaaacatggttggtgggcaataaattggtgacggttacaacatctgtcggaactggaacacggagtttgcttggtctggactcaggggagctgcagtctggccccgaaagctcctcttctcctggtgtgcacgtacgacaaactaaggaggctcccgccaagcttgagtctcaggcaggacagcaggtgtccagaggcgctcgtgaccgggtgagatctatgtccgggggccatggcctgagggtcggcgcactggatgtacccgcatcacagttcctcgggtcggcaacgtctccaggccccaggaccgctccagctgccaaaccagagaaggctagcgcaggcaccagagtcccggtgcaagaaaaaaccaatctggccgcatacgtccctttgttaacccaaggatgggccgaaattttagtacgacgcccgactggtaacacatcctggttgatgtcactggagaaccctctctctccattctcctctgacatcaataatatgcctctgcaggaactgtccaatgccctaatggctgcggaaaggttcaaagagcatcgcgatacagcactgtataaaagcctgtccgtacctgccgcctcaaccgcaaaacccccccccttgccacggtccaacactgactcagctgtggtgatggaggaggggagcccgggggaggtccccgtccttgtagaacctcctggcctcgaggacgtcgaggccgcactgggtatggatcgcagaaccgacgcatactccaggtctagtagcgtctcttcccaggaggagaaaagtttgcatgctgaggagctcgtcgggagaggcattccgattgagcgggtagtctccagtgagggggggcgccccagcgttgacctgtctttccagcccagtcaacccttatcaaaaagcagctcgagtcctgagctgcagactctccaggacatactcggggaccccggtgataaggccgatgtcggccgtctctctcccgaagttaaggctagatcccagtccggtactctcgacggcgaatcagccgcctggagcgctagtggcgaggactcccgcggacagccagagggaccccttccctctagcagtccgcgaagccctagcgggttacgcccccggggatatacaatctctgattcagcccctagcaggcggggcaagagggtggagcgtgacgctctgaaaagtagagctactgccagcaatgccgaaaaagttcctggcatcaacccctcttttgtgtttctgcaactgtatcacagccccttcttcggggacgagtccaataagcccatcctcctgcctaacgaaagccagagtttcgaacggagtgttcagttacttgatcaaatcccttcttatgacacgcacaaaatcgccgtcctctacgtgggagagggtcagtcaaactccgagctcgccatcctttccaacgagcatggctcataccgatacaccgaattcctgaccggtctgggcaggttaatagagcttaaagactgtcagccagacaaagtgtatctgggaggcctggatgtctgcggcgaggatgggcagttcacatattgttggcatgacgacataatgcaggccgtattccacatcgccacgctcatgcccaccaaggatgtagataagcatcggtgtgacaagaagaggcacctaggcaatgactttgttagcatcgtttataatgacagtggtgaagactttaagctgggcaccattaaagggcagtttaactttgtgcacgtcatcgtcactcccttagactatgaatgcaatctggtttcacttcagtgtagaaaagacatggaggggcttgtggatacgtccgtcgcgaagatagtgtcagatcgaaatctgcctttcgttgcccgacagatggccctccatgctaacatggcctcacaggttcaccactccaggtctaatccaaccgatatctacccaagcaaatggatagcacgcctgcgacatattaagcgtttacgacagcggatctgcgaggaggccgcttattctaatccaagccttcctctcgtgcatccaccttctcactcgaaagcccctgctcagacccctgctgaacccactcccggatacgaggttgggcagcggaagcgattaatttctagcgttgaagattttacggagtttgtctag

SEQ ID NO: 26817 - DNA, 5115 bp, synthetic construct
  misc_feature 1..5115: note = Description of Artificial Sequence: Synthetic coding sequence
  source 1..5115: mol_type = other DNA
atggccaagcccaccagcaaggacagcggcctgaaggagaagttcaagatcctactgggactgggtacacctcgccctaaccctagatcagctgaaggaaagcagacagagttcattattacggccgagattctgcgtgagctgtcaatggagtgcggactgaacaacaggattcggatgattgggcaaatttgtgaagttgccaaaaccaagaaatttgaggaaggcgaaagactaggtgtgttgcgcgcattgttcttcaaagtgataaaggactaccctagtaatgaggatctccacgagagactcgaagtctttaaggctctgactgacaacgggcggcacattacctacctcgaagaagagttggctgatttcgttttacagtggatggatgtgggtctctcttcagaatttctgttagtgttggtgaacctagtgaagttcaactcgtgctacctggatgaatatatagcacggatggttcagatgatatgccttctttgcgtcaggactgcttctagcgtcgacatagaggtctccttgcaggtgctggatgcagtggtttgctacaattgtctccccgctgagagcctccccctttttatcgtgaccctgtgtaggaccattaatgtgaaagagctgtgtgagccctgctggaagttgatgcggaacctgctgggcactcatctaggacattctgccatatataatatgtgtcaccttatggaggatcgcgcttatatggaggatgcccctctactgagaggggctgtgttcttcgttgggatggctctgtggggcgcacacagactatactcactgcgcaacagccccacaagtgtcctccctagtttttaccaggcaatggcctgccccaacgaagtggtgagctatgagattgtcctcagcatcacccgactcatcaagaaataccgcaaggagctgcaggtagtcgcttgggatatcctgctgaacattatagaacggctgttacaacagctgcagaccttggattcccctgaattacggaccattgtgcacgatcttctgacaacagtggaggagctctgtgatcagaacgaatttcacgggtcccaagagcgctattttgagctggtggagaggtgtgcggatcagagaccagaaagcagcttgttgaacctgatttcgtacagagcccaaagtatccacccagccaaagacggatggattcagaatcttcaggcccttatggagaggttcttccgatctgaatccagaggggccgtgaggatcaaggtacttgacgtcttgtctttcgtgcttctgattaatagacagttctacgaagaagagcttatcaatagtgtggtgatatctcaactgagccacatcccggaggataaagatcatcaggtgagaaagctagccacccagctcttggttgatctcgccgaaggttgccatacccatcacttcaactctctgctcgacatcattgaaaaagtgatggctcggtcactgtctccccctccggagctggaggagcgagatgtggcagcatattctgcttccctggaggacgtgaagactgctgtgctcggtctgctagttatcttacaaaccaaattatacacgttgccagcatcacacgccacaagggtctacgagatgctggtgagccacatccagctgcactataaacacagttacaccttgccgatcgcctccagcattcggctacaggctttcgattttctcctgctcttgagagccgactctctgcaccggttaggcctccccaacaaagatggcgtcgtgagattcagcccctattgcgtgtgcgactacatggaacccgagcggggctctgaaaagaaaacttccggtccattatcccccccaaccgggccacccggtccagcccctgcaggtcctgcagtcaggttagggtccgtgccttattcactcctgttcagagtcctcctgcaatgtctgaaacaggagagcgattggaaggtcttaaaactcgtgctcggacgtctccccgaatcgctgcggtataaagtgttgatatttaccagtccttgctccgttgatcaactgtgctcagccctttgctcaatgctatcagggcccaaaaccttggagagactgcgtggcgcaccggaaggtttttcaaggacggacttgcatcttgccgttgtcccggtccttacagccctgatttcctatcataactatctggacaagacgaagcagcgcgagatggtctattgcttggagcaaggcctaatccacagatgcgcatcgcaatgcgtggttgcgctgagcatttgttccgtggagatgcccgacattattatcaaggccctgcctgtgctggtcgtcaagctgacgcatatctcggccacggcatccatggccgtaccactgctcgagttcctctcaaccctagcacggctcccccacctctacagaaattttgccgccgagcagtacgccagcgtgtttgctatctcgctgccctacaccaaccctagcaagttcaatcagtatatcgtttgtttagcacatcatgtcatcgcaatgtggttcattcggtgccggctccccttccgcaaggatttcgtgccctttattacaaaaggattgaggtcaaatgttctgctgagcttcgatgacacgcccgagaaggattcgtttcgcgcccgtagcacttccctaaacgaaaggcccaaatcccggattcagacttcactgacctcggcgtcacttggatccgctgacgagaattccgttgctcaggcagacgacagtctcaaaaacctgcacctggagttaacagagacgtgcctggatatgatggcccgatacgtgttcagtaactttacagccgttcctaagcgctccccagtgggcgaattcctactggcaggtgggcggaccaagacctggctggtaggaaacaagctggttaccgttaccactagcgtgggaaccggcaccaggagcttactgggattggacagcggtgagctgcagtccgggcccgaatctagctctagccccggcgtgcacgtgaggcaaaccaaggaggccccagctaaactggaatcacaggcgggccagcaagtgtccaggggtgccagggatcgcgtgcggtcaatgtcgggagggcatgggctgagagtgggtgctcttgacgtgccggcaagccagtttcttgggtccgccacatctcctggtcctcgcaccgctccagccgctaagccagagaaggccagtgccggaacgagggtgcccgtgcaggagaaaactaatctggccgcctacgtacctctgctgacccaggggtgggcagaaattctggtgaggagaccgactggcaataccagctggttaatgtccctcgaaaatcccttgtctccattttcgtcggatatcaacaatatgcctttgcaggagctgtccaatgctttgatggctgcagagagattcaaggagcacagggacacggctttgtataagtccttatccgtgcctgcagcctcgacagcgaagcctcctccgctgccacgcagtaacacagacagtgccgtcgtgatggaggagggcagccccggagaagttcctgtgctcgtggaacctcccgggctcgaagacgtggaggccgcgctagggatggacagacgtactgacgcctattcaagatcctcttctgtgtccagccaggaggaaaagtctcttcatgcggaagagttggtggggcgcggcatccccattgaacgagtggtgagcagcgagggggggcgccctagcgtggatctttcattccagccctcacagccactttctaagtctagctcttccccagagcttcagacccttcaggatattcttggcgacccgggcgacaaggcagacgtcggccgcctgagcccggaggtaaaggctagatcgcagagtgggactttagatggagaaagtgccgcctggagtgcctcaggggaagactctcgcggtcagccagagggccccctgcctagcagtagtcctcggagcccaagtgggctcaggcctcgcgggtacactataagcgactctgccccatcaaggagaggtaaacgcgtggagagagacgcgctcaagtcccgggccactgcctcaaacgctgaaaaggtgcctggaatcaatcctagctttgtgtttctccagctgtatcattcaccgttcttcggtgacgaaagcaataagccaattctcctcccaaatgagtcccagtcattcgagcgctcggtccagctgctggaccagatcccatcgtatgatactcataaaattgccgttctttacgtaggagaaggacagagcaatagcgaactagcgatactctctaatgagcacggaagttacagatataccgagtttttgactggcctcggccggttaatcgaactcaaggactgtcagccagacaaagtctatcttggtggactcgacgtgtgtggtgaagacggtcaattcacttactgttggcatgatgacataatgcaggctgtctttcacatcgccacactgatgcccacgaaggacgtggacaaacatcgctgcgacaaaaagagacacctcggcaatgatttcgtttccattgtctacaatgacagcggcgaggactttaagctgggcaccattaagggacagtttaacttcgtgcacgtcattgtgacccctctggattatgagtgcaaccttgtgagcttgcaatgtcggaaggatatggagggtttggtcgatactagcgtggccaagatcgtgtcagaccggaatttgccatttgttgcaaggcagatggctttacatgccaatatggcgagccaggtccaccattcaagatcaaaccccacagacatctaccctagcaaatggattgcaaggctccggcatattaaacgcctccgtcagcgcatctgtgaggaagccgcatacagcaatccctcgctccctttggttcacccccccagtcactcaaaggctccagcccagacacccgctgaacccacccctgggtacgaagtggggcaaaggaagcggcttatcagctctgtggaagatttcactgagtttgtctag

SEQ ID NO: 26818 - DNA, 516 bp, synthetic construct
  misc_feature 1..516: note = Description of Artificial Sequence: Synthetic coding sequence
  source 1..516: mol_type = other DNA
ttcccccgggacctgagcctgatcagccccctggcccaggccgtgagaagctcctcccgcacgcccagcgacaagccagtggcacatgtggttgcaaacccacaggctgagggtcagctccagtggttgaatcgcagggctaacgctttattggcgaatggcgtcgagctgagagacaaccaacttgttgtcccttcagaagggttgtaccttatttatagccaggttctgttcaaaggacagggatgcccaagtacgcacgtgttactcactcacaccatctcgaggatcgccgtaagttatcagactaaagtaaaccttctgtctgctatcaaaagtccatgccagagagagacaccggagggagcggaagctaaaccatggtacgaaccaatttacctggggggcgtttttcaactggagaaaggagatcggctaagtgccgagatcaatcggcctgattatctggacttcgcagaaagcgggcaggtgtatttcgggatcatcgcactctag

SEQ ID NO: 26819 - DNA, 306 bp, synthetic construct
  misc_feature 1..306: note = Description of Artificial Sequence: Synthetic coding sequence
  source 1..306: mol_type = other DNA
atggccatgatggaggtgcagggcggccccagcctgggccagacctgtgtgctgattgtaatctttacggttctattgcagagcctgtgtgtcgcggtgacctacgtatatttcactaacgagctgaaacagatgcaggataagtactcaaaatccggaatcgcctgttttctgaaagaggacgatagttactgggacccaaatgacgaggagagcatgaactccccttgctggcaggtcaagtggcagttgcgccagcttgtgagaaaaaccccccgtatgaaaaggctgtgggcagcaaaatag

SEQ ID NO: 26820 - DNA, 846 bp, synthetic construct
  misc_feature 1..846: note = Description of Artificial Sequence: Synthetic coding sequence
  source 1..846: mol_type = other DNA
atggccatgatggaggtgcagggcggccccagcctgggccagacctgcgtgctcatcgtgatctttactgttttgctgcagtccttgtgtgtggccgttacatacgtttactttacaaatgagctcaaacaaatgcaggacaagtattctaagagtggcatcgcctgttttctcaaggaggatgatagctactgggacccgaacgacgaggagtcaatgaacagtccttgttggcaggtgaagtggcagcttagacagttggtgagaaaaatgatcctacgaacgtcagaggaaaccatttccacagtccaggagaagcagcagaatattagtcccttggtgcgcgagaggggtccccagcgggtcgcagctcacattacaggaacccgcgggcgatcaaatactctctcaagccccaattccaagaatgaaaaagccctgggacgaaagattaattcttgggaatcctcccggtccggacatagcttcctgtcaaatctgcacctgcgaaacggtgagctggtgattcatgagaagggtttttactatatctactcccagacctatttccggttccaagaggaaattaaggagaacacgaaaaatgataaacagatggtgcaatacatttataagtacacctcctatcccgatccgatccttttgatgaagagcgctcgcaactcatgttggtcaaaggatgccgaatacggcctttactcaatctatcaagggggcatttttgagctcaaagaaaatgaccggatttttgttagcgtgactaacgagcacctgattgatatggaccatgaggcctccttctttggggctttcctggtgggctag

SEQ ID NO: 26821 - DNA, 858 bp, synthetic construct
  misc_feature 1..858: note = Description of Artificial Sequence: Synthetic coding sequence
  source 1..858: mol_type = other DNA
atggacgacagcaccgagcgggagcagagccggctgaccagctgcctgaagaaacgagaggagatgaagctgaaagaatgcgtatcaattctccccagaaaggagagcccaagtgtgcgttcctccaaagacgggaaacttctagctgcaacccttctgcttgctcttctgagctgctgcctgacagtcgtctccttttaccaagtggccgctttgcagggtgacctggcctccttaagagctgaactgcagggccatcatgcagaaaaactgcccgctggtgctggagcacctaaggccgggctggaggaagcaccagccgtgacggccggccttaaaattttcgagccacctgctccgggagagggtaatagctcacagaactcccggaacaagcgagcagtgcagggccccgaggagactgttacccaggactgcttgcagctcatcgcggactctgagaccccaaccatccagaagggttcctatacattcgtcccgtggctactctcattcaagaggggatccgcactggaggagaaggagaataagatcctcgttaaggaaaccggatacttttttatttacggacaagttctgtatacggacaaaacctacgctatgggccatctgatccagagaaagaaggtgcacgtattcggcgacgaacttagcctagtcacactgttcaggtgcattcaaaatatgccagagactctgcctaataacagctgttatagcgcgggcattgccaagttggaggagggggatgagctgcagctggctatcccccgcgagaacgctcagatcagtttagatggcgacgtgactttctttggagctctgaaattactgtag

SEQ ID NO: 26822 - DNA, 801 bp, synthetic construct
  misc_feature 1..801: note = Description of Artificial Sequence: Synthetic coding sequence
  source 1..801: mol_type = other DNA
atggacgacagcaccgagcgggagcagagccggctgaccagctgcctaaagaagcgggaggaaatgaagctcaaggaatgcgttagcattctccctagaaaggaatcgccttccgtcagaagtagcaaggacggcaagctcctcgctgctactttgttactcgccctgctgtcctgctgcctcaccgttgtgagtttctatcaggtggcagctcttcagggagacctagcctctctgagagcagagctgcagggccaccacgcggaaaaacttcccgcaggcgcgggcgctcctaaggcagggctggaggaggcaccggccgtgaccgcgggcctcaaaatctttgagcctcctgctcctggggaaggaaatagttcccagaatagccgaaacaagagggccgtgcagggcccggaggaaacaggctcatacacatttgtcccatggctattgtctttcaagaggggatccgccctcgaggagaaggaaaacaaaatcttggtgaaggagacggggtacttttttatttatgggcaagtcctctataccgacaaaacctacgcaatggggcacctgatccagaggaagaaagtccatgtctttggtgatgaacttagcctcgtgacactctttcgctgtatccagaacatgccagaaacactgcctaataacagctgttactctgccgggattgccaaactcgaggaaggcgatgaactgcagctggcaatacccagggagaacgctcaaatctctttggacggagacgtgacgttctttggggccctgaaactgctttag

SEQ ID NO: 26823 - DNA, 495 bp, synthetic construct
  misc_feature 1..495: note = Description of Artificial Sequence: Synthetic coding sequence
  source 1..495: mol_type = other DNA
atggacgacagcaccgagcgggagcagagccggctgaccagctgcctgaagaagagggaggaaatgaaactcaaggagtgcgtgagtattctaccccggaaagaatctccctcggtgcggtcctctaaggacggcaaactgcttgctgccactctgctcctggccttattgagttgttgtctcacagtcgtgtccttctatcaggtcgctgccctgcaaggagacctcgcttcgctacgggctgagttacaggggcatcatgcggagaaactgccagccggagctggcgctcctaaggccgggctggaagaggccccagctgtaacggcaggcctgaagatattcgagccgccggcgcccggagaggggaactctagccagaattccaggaataaaagggcagtgcaagggcctgaagagaccgtgacccaggattgtctccagttgatcgccgactccgagaccccgacaatccagaaaggtttcatctactag

SEQ ID NO: 26824 - DNA, 2700 bp, synthetic construct
  misc_feature 1..2700: note = Description of Artificial Sequence: Synthetic coding sequence
  source 1..2700: mol_type = other DNA
atgcccaccctgggctggctgcccgagaaccgggacatcagcgaggaccaaagttcagccgagcaaacacaggccttggcaagtcaagctagtcagttcttggctaaagtcgagtcttttgaacggcttattcaggccggacgtctgatgccacaggatcaggtgaaagggttccaaaggctgaaagcagcccacgccgctctagaggaagaatatctaaaggcctgtagagaacagcacccagcacagcctctcgcgggttccaaaggcactccaggtaggttcgatccccgcagagagctggaagccgagatctacagactcggctcatgcctggaggagctgaaggagcacattgaccagacacagcaggaacctgaaccgccaggcagcgattctgcactcgactctactcctgcactaccctgtctccatcaaccgacacatctgcccgcccccagtggacaggccccgatgcctgcaataaaaacctcctgcccagagcctgccacaactaccgcagctgcttccactggcccttgcccacttcacgtaaacgtcgaagtaagtagcgggaacagcgaagtggaagatcgcccccaggacccgctcgcgcgcttaagacataaagaactccagatggagcaggtgtatcacggactcatggaacgatacttgtccgtcaaatctctaccggaggccatgaggatggaggaggaagaagagggggaagaggaagaagaggaggagggtggaggtgattcacttgaagtcgacggtgttgcagctaccccaggcaaagccgaagcaacacgcgtcttgcctaggcagtgcccggttcaagctgaaaaatctcacggtgcgcctctagaggaagccacagaaaaaatggtctctatgaagccaccagggttccaggcgtcactggcccgtgacggccatatgagcgggctcgggaaggcagaagccgcaccccccgggcctggagtgccgcctcaccctcctgggaccaagtctgccgctagccatcaatccagcatgactagtctggagggctctggaatatcggaacgattgccccagaaaccactccaccgtgggggtggcccacaccttgaggaaacttggatggcctctcctgaaaccgactcgggcttcgtgggatctgagactagccgtgtttcccccctgacccagaccccagagcatcgactctcgcatatcagtacagctggaaccctggcacagcccttcgctgctagtgtccctcgcgacggtgcctcgtaccccaaggctcgcgggagcctgattccccggcgggctaccgagccttccacacctcgcagccaggcccaacggtacctctcatcaccaagcgggcctctgagacagagagcccccaatttcagcctcgagaggacccttgccgctgaaatggcagtgccagggtcggaatttgagggacataaaaggatctcagagcagccgctgcctaataaaacgatctcaccaccccccgctcccgcacctgccgcggccccgctcccctgtggccccacagaaactattccaagcttcctcttaaccagggccggcagagatcaagccatctgcgaacttcaggaagaagttagcagactgagactcaggctcgaagattccctgcaccaaccactccagggctcccccaccaggccagcaagtgcctttgatcgacccgccaggaccaggggcagacctgcagattcacccgccacttggggctcacattatggttccaagagcactgaacgtcttcctggcgagccccgaggggaagaacaaattgtgcccccgggccgacagagagccaggtcaagtagcgtgcccagagaagtgctgcggttgtcattgagcagtgagtcagagctccctagtctgccccttttctcagagaagtcgaaaactactaaggatagccctcaagcggcacgcgacggcaagagaggggtgggatctgcgggttggcctgatcgggtaacttttcgcgggcaatataccggacacgaataccatgtgctcagtcctaaggcagtgcccaagggaaatggaaccgtgtcctgtccgcactgccgacccatcagaacccaggacgccggtggtgcagtcacgggcgatccattgggaccccctcctgccgatacactacagtgcccgttatgcgggcaggtgggaagccctccggaagctgatgggcccggctctgctacctcgggagccgagaaggctactaccagacggaaggcatcctcaacaccgtcccccaagcagaggtctaagcaggctggctctagcccgaggcctccaccgggactctggtacttagcaacggccccccctgctccagcccctcccgccttcgcctatatctcaagtgtgcccatcatgccttatccgcccgcagctgtctactatgcacccgccggtcctaccagtgctcaaccggccgcaaagtggccaccaaccgcatctcctcctccggcccgtaggcaccggcactccatccagctggatctcggcgacttagaggaactcaacaaagcgctgtctcgtgcagtgcaggccgctgaaagcgtgcgatcaacaacacgccagatgaggtcctctctgtcagcggacctccgccaggcccatagcctacggggctcctgcctgttctag

SEQ ID NO: 26825 - DNA, 1569 bp, synthetic construct
  misc_feature 1..1569: note = Description of Artificial Sequence: Synthetic coding sequence
  source 1..1569: mol_type = other DNA
atggccctgctgccccgggccctgagcgccggcgccggccccagctggagaagggccgcaagggcgttcagaggattcctgctgttattgccagaaccggctgccctgacgcgagcactttcccgcgcaatggcgtgtaggcaggagcctcagccacaagggcccccgcctgctgcgggcgcagttgcgtcctacgattacttagttattggcggaggcagcgggggactcgcctcggctcggcgcgccgctgagctgggcgcgagggcggctgttgttgagtcccataagctgggggggacatgtgttaatgtggggtgcgttccaaagaaggtgatgtggaacaccgccgtgcattctgaatttatgcacgaccatgcagattatggatttccctcatgcgaagggaagtttaactggcgtgtcataaaggaaaaaagagacgcttacgtcagccgcttgaacgcgatctaccaaaacaacctcactaagagtcatatcgaaatcataaggggtcacgccgcgtttacaagtgatcccaaacctaccatcgaggtgtcaggtaaaaaatatacggcaccacacatccttatcgcgaccggcgggatgccgtccacgccccacgaaagccaaattccgggtgcatccttaggaatcacaagcgacggattcttccaattggaagaactgcccggacggagcgttatcgtgggtgccggttatatcgctgtagaaatggcaggtattcttagtgcactcgggtcaaaaacaagtttgatgattagacacgataaagtcctgcgaagttttgactcgatgatcagtacaaactgtaccgaggaactcgagaatgctggagtggaagtgctaaaattctctcaagtgaaggaggtcaagaagaccttgtctggtcttgaggtaagtatggttaccgccgtcccaggccgtctcccagtgatgacaatgatccctgacgtagactgtttactgtgggcaattggccgggttcctaacaccaaggatctgtctttgaacaaactcggcatacagacagatgacaaagggcatatcattgtggacgagtttcagaacacaaacgtgaagggcatctacgcagtgggagacgtctgtggaaaggcactgctcacacctgttgccatcgctgcagggagaaagctggcccacaggcttttcgagtacaaggaagactctaaactggactataataacatccccacagttgtattttctcacccccccattggaactgttggcctcaccgaggacgaagctatccacaagtacgggatcgaaaacgtcaaaacgtactccacatctttcacaccaatgtatcacgcagtgaccaaaagaaagactaagtgcgtaatgaaaatggtatgcgcaaataaggaagagaaggttgtggggatacacatgcaggggttagggtgtgatgagatgctacaaggattcgccgtagccgtgaagatgggcgcaactaaggcagatttcgataatacagtggccatccatccgacatcatctgaggaattggtaactcttcgatag

SEQ ID NO: 26826 - DNA, 1323 bp, synthetic construct
  misc_feature 1..1323: note = Description of Artificial Sequence: Synthetic coding sequence
  source 1..1323: mol_type = other DNA
atggagcagcggggccagaacgcccccgccgccagcggcgcccggaagcggcacgggcccgggccgagagaagctcggggcgccaggcccggcccgagagttcccaaaactttagtgcttgttgtcgccgccgtactcctactcgtgtcagccgagagcgccctgataacccagcaggatctggcccctcagcaaagggccgcaccacagcagaagcgatccagtcccagcgaggggctctgcccccccggccaccacatctctgaagatggccgcgactgcatcagctgcaaatatgggcaggattatagtacccattggaacgatttgctgttctgtctgcggtgcacacgctgcgactccggggaggttgagttgtcaccctgtaccaccacccgtaacacagtgtgccagtgtgaggaaggcacattccgagaagaggacagccccgagatgtgcagaaagtgcagaaccgggtgccctcgcggcatggtgaaggtgggggattgtactccctggtctgatattgaatgtgtacacaaggagtcaggcacaaaacacagcggggaggttcccgcagtggaggagacggtgacttcgtctccgggaacccccgccagtccctgcagtctgagcggaattatcatcggtgtgacagttgccgcggtcgtgctcatcgtcgccgtgtttgtatgtaagagcctcttatggaagaaggtgttgccttaccttaaggggatttgttctggcggtggaggagatccggagcgagtagacaggtcctcacagagacctggagccgaggataacgtccttaacgaaatagtgagcatcttgcagcctacccaggtacccgaacaggaaatggaggttcaggaaccagctgaaccaactggcgtgaatatgctaagccctggagagtccgaacacctgcttgaaccagcagaagcggagagatcccagaggcgtagactcctggtccctgctaatgaaggggaccctaccgagactctcaggcagtgctttgacgactttgctgatctggtcccgtttgattcctgggagcctctaatgcgtaagctgggactgatggataatgagatcaaagttgccaaggctgaggcagccggccatcgggacaccctctatactatgctgataaaatgggtgaacaaaaccggacgcgacgcatctgtgcacactttgctggacgccctggagacccttggagaacgacttgctaagcaaaagattgaggatcacttgctgtctagcggcaagttcatgtatctcgagggaaatgcagattctgcgatgagctag

SEQ ID NO: 26827 - DNA, 1236 bp, synthetic construct
  misc_feature 1..1236: note = Description of Artificial Sequence: Synthetic coding sequence
  source 1..1236: mol_type = other DNA
atggagcagcggggccagaacgcccccgccgccagcggcgcccggaagaggcacggaccagggccgagggaagcaagaggagcgaggcccgggccacgtgtgccgaagaccctggttctggtggtggcagcggtgctcctgcttgtatccgctgaatccgcactgatcactcagcaggacctcgcacctcagcagcgcgcagcaccccaacagaagcggagttcacctagcgagggtctttgcccccctgggcaccacatcagcgaggacggccgtgactgcatcagctgtaaatatggtcaggactattcgacccattggaacgatctgctgttctgcttgaggtgtacccggtgtgatagcggggaggtggagttatccccctgcacaactaccaggaacaccgtatgccagtgcgaggaagggaccttccgcgaagaagactcgcccgagatgtgtcggaagtgtcgcacaggatgcccccgcggcatggtcaaggtgggcgactgtactccgtggtctgatatcgaatgtgttcacaaagagtccgggataattattggcgtgacagtggccgcagttgtcctcatcgtagccgtttttgtttgtaagagtttactgtggaagaaggtactgccttatttgaagggaatctgtagtggcggagggggcgacccagagagagtggatagaagttcccagagaccaggggcagaagataatgtgttaaacgagattgtaagcattctgcagcccacacaggtacctgagcaggagatggaggttcaggaacctgccgaaccaaccggtgtgaatatgctgtcgcccggagagtcagagcacctattggagcctgcagaagctgaacgcagtcagcgacgaaggttactggttcccgctaatgagggggatcccactgagacccttaggcagtgcttcgatgattttgctgacctggtgccattcgattcatgggaacccctgatgcggaagctgggactgatggataacgagattaaggtcgctaaggccgaggccgcggggcatcgtgacaccctctatacaatgctgatcaaatgggtgaacaaaacaggtagggatgcttccgtacacacgctcttggacgccctggagaccctcggggaacggctggcaaagcagaaaattgaggatcatctgctatcctctggtaaatttatgtacttagagggcaacgctgactccgcaatgtcttag

SEQ ID NO: 26828 - DNA, 783 bp, synthetic construct
  misc_feature 1..783: note = Description of Artificial Sequence: Synthetic coding sequence
  source 1..783: mol_type = other DNA
atgtgccggaagtgccggaccggctgcccccggggcatggtgaaggtcggagactgcactccttggtccgatattgagtgtgtccacaaagagtcaggtattattattggcgtcaccgtagcggccgttgtccttatcgtggccgtgtttgtctgcaagagtttactgtggaagaaagtgcttccctatcttaaaggcatctgctcaggggggggaggtgatccggagcgagtcgaccggtcaagccaacgacccggtgccgaggacaacgttttaaatgaaattgtcagtattctccagcccacgcaggtccctgagcaggagatggaggtgcaggaacctgctgagccaaccggcgtcaacatgctgtcgcctggcgaatcggagcatcttctggagcccgcagaggcggagagaagccagaggaggcgactgctggtgccagcaaacgagggtgatccgactgagacgctcaggcagtgttttgacgatttcgcagatctggttccttttgactcctgggagccgctcatgagaaaactaggcctaatggacaacgagattaaagtcgcgaaggctgaagccgctggccaccgggacactctctacactatgctcatcaagtgggtcaataaaacggggcgagatgctagtgttcacactctgctggacgcgcttgagacactgggagaaagactggccaaacagaagatcgaagatcatctcctgtctagtgggaaattcatgtacctggaaggcaatgccgattctgctatgtcatag

SEQ ID NO: 26829 - DNA, 1161 bp, synthetic construct
  misc_feature 1..1161: note = Description of Artificial Sequence: Synthetic coding sequence
  source 1..1161: mol_type = other DNA
atgggcctgtggggccagagcgtgcccaccgccagcagcgcccgggcaggtaggtaccctggcgctaggacagcttcaggtacccgaccgtggctattagatcctaaaattctgaaattcgtagtttttattgtcgcggtgcttctacccgtccgtgttgacagtgccactatcccacgacaagacgaggtgccacaacagacagtggctccccaacagcagcggagaagcctaaaagaggaggagtgccccgcaggatctcacagatcagagtataccggagcatgcaatccatgcacggagggggtcgattacacgattgcctctaataaccttccttcctgtctcttgtgtacagtctgcaaatccggacagacaaacaaatcatcttgcacaactaccagggataccgtgtgccagtgtgaaaagggtagcttccaggacaagaattcacccgaaatgtgccgcacctgccggacaggctgtccaaggggtatggtcaaggtgagcaactgcacgcccagatccgacattaagtgcaagaatgagagcgctgcaagcagtactgggaagacccccgccgctgaggaaactgttacaaccatactggggatgttagcttccccctatcactatcttataatcatcgtcgtgctggtgatcatcctggccgtcgtggtcgtcggattttcctgtcgtaagaagtttataagctacctgaagggaatctgcagcggcggaggcgggggacccgagcgcgtccaccgagtactcttcaggcggcggagctgtccctcacgagttccaggcgctgaggataatgcccgcaatgaaacgctgtccaataggtatctgcaaccaactcaggtatctgaacaggagattcaggggcaagaattggccgaactgacaggtgtgactgtggagcttcccgaagagccccagcgcctacttgaacaagccgaagctgagggatgccagcgcaggcgcctgcttgtgccggtgaatgacgctgactcagccgacatctccactcttctggatgccagcgctaccctggaagagggccatgccaaagaaacgatccaagaccaactagtcggatcggagaagctcttttatgaggaggatgaggccgggtctgccactagctgtctgtag

SEQ ID NO: 26830 - DNA, 1368 bp, synthetic construct
  misc_feature 1..1368: note = Description of Artificial Sequence: Synthetic coding sequence
  source 1..1368: mol_type = other DNA
atgggcctgagcaccgtgcccgacctgctgctgcccctggtgctgctggaactgctcgtcgggatttatccaagtggggttataggcttagtgccacatcttggcgatcgtgaaaaacgcgatagcgtttgcccacagggcaagtatattcacccacaaaataacagcatctgttgtactaaatgccacaagggcacatatctttataatgactgccctggacccggccaagatacggactgcagagagtgcgaaagcggctctttcactgcgtcagaaaaccacttgcgccattgcctgtcttgcagcaaatgtcgaaaggagatgggtcaagtggagattagctcctgcaccgtggaccgcgacacagtgtgcggctgccggaagaaccagtatcgccactactggtccgaaaacctgttccaatgtttcaactgcagcctttgtctgaatggtaccgttcatttgagttgtcaagagaaacagaataccgtttgcacttgccatgctgggttttttttacgggagaacgaatgtgtatcctgttccaattgtaaaaaaagtctggaatgcaccaagctgtgtttgcctcagattgagaatgtcaaaggcacagaagatagtggcacaacagtcctgctacctctagtcatattcttcggactctgtctactgtccctgctgtttattggactaatgtatcgctatcagcgatggaaaagcaagctatactccatcgtatgcggcaaatccaccccagagaaggagggtgaactggaaggcaccactacgaagcccttagccccgaaccctagcttctctcctactcctggattcacgcccacgctgggattctcccccgtcccatcctctacatttacctcaagctccacatacaccccgggggactgcccaaactttgccgccccccggcgcgaggtggcgcctccctatcagggcgccgatcctatcttggccaccgctttggccagcgatcctatccctaatccgctgcagaagtgggaagattctgcgcacaagccccagtctcttgataccgatgatcctgccactctttatgcagtggtcgagaacgtcccccctctgcggtggaaggagtttgtgagaagactgggactgagcgaccatgaaatagatcgcctggagttgcagaacggtcgctgcctccgagaagctcaatactccatgctggcgacatggagacgcagaacacctaggcgcgaagctacccttgaactcctgggaagggtattgagagatatggacctgctgggttgtctagaggatattgaggaggctctatgtggccccgccgcactacctcccgcgccgtcattactgcggtag

SEQ ID NO: 26831 - DNA, 657 bp, synthetic construct
  misc_feature 1..657: note = Description of Artificial Sequence: Synthetic coding sequence
  source 1..657: mol_type = other DNA
atgggcctgagcaccgtgcccgacctgctgctgcccctggtgctgcttgaactactggttggcatatatccttcaggagtgatcggactggtcccccatttaggagaccgggagaagcgagactccgtttgccctcagggtaagtatatccatccacagaataattccatctgttgtactaagtgtcacaagggtacatacctctataacgactgtcccggcccaggccaggatacggattgtcgggagtgcgagtctggcagctttacagcaagtgaaaaccacctgcgccattgcttgagttgttcaaagtgtagaaaagagatggggcaagtcgagatctcatcatgtacagtggaccgcgacaccgtgtgcggctgcagaaaaaaccagtaccgacactattggtcggagaatctgttccagtgctttaattgctctctctgcctgaacggcacagtgcacctatcctgccaggagaaacagaacaccgtgtgtacctgccacgctggttttttcctgcgcgaaaacgagtgtgtgtcatgctctaaagttctcttgtgcagaccagggtggaatgcagttgctagatcaaggctgacagccacctctgcatcgcagattcaggcgattctgctgttgcagcctcccaaatag

SEQ ID NO: 26832 - DNA, 1386 bp, synthetic construct
  misc_feature 1..1386: note = Description of Artificial Sequence: Synthetic coding sequence
  source 1..1386: mol_type = other DNA
atggcccccgtggccgtgtgggccgccctggccgtgggcctggagttgtgggccgcagcccacgcccttccagctcaggtagctttcactccatacgcacccgagcctggatctacctgtcggctgagagagtactatgaccagacagcccagatgtgctgcagtaagtgttctcctggtcagcacgctaaggttttctgtaccaagacttctgatacagtttgcgactcctgtgaagactctacctatacacagctatggaactgggtaccggaatgtcttagctgtggttcaaggtgtagctccgaccaggtcgagacacaagcttgcacaagggagcagaacaggatttgcacttgcaggccagggtggtactgcgccctgtccaaacaagaaggatgtcgcctgtgtgctcctctgcggaagtgtcgccccgggtttggcgtggccagacccggcactgagacttccgacgtggtgtgtaagccatgcgctccgggtaccttctcgaacaccacttccagcacagatatctgtcgaccccaccaaatctgtaacgttgtggcgattcccggtaatgcctccatggatgccgtgtgtacttcaactagtcccacccgtagcatggcccccggtgcggttcatctgcctcaaccggtgagtactagatcacaacatacacagcctaccccagaaccctctaccgccccaagtacctcattcctgctgccgatgggccctagcccacccgccgaaggctccacgggcgattttgccctgcctgtgggtctcatcgtgggtgtgactgctctgggcctgctgattattggagtcgttaattgcgtcatcatgactcaggtgaagaaaaagcccctctgcctccaacgcgaggctaaggttccgcatttgcccgcagacaaagctcgcgggacccagggcccggaacaacagcacctgctgatcaccgcgccatccagcagctcctcaagtttagagagctccgctagtgccttagatcgtcgtgcacctacgagaaaccagccacaggcccctggggtggaagctagcggggctggtgaagccagggcttccacaggctctagtgacagcagcccaggcgggcacggaactcaggtgaatgttacatgcatcgtaaacgtgtgctcctcctccgaccacagcagccagtgttcttcccaggcgtccagtaccatgggagacaccgactcttcacccagcgagtccccaaaagatgaacaggtgcccttctccaaagaggagtgtgcattccgatcacagctggagacccccgaaactcttttgggcagcactgaggaaaaaccactgccgttgggggtcccagatgccggcatgaagccttcttag

SEQ ID NO: 26833 - DNA, 807 bp, synthetic construct
  misc_feature 1..807: note = Description of Artificial Sequence: Synthetic coding sequence
  source 1..807: mol_type = other DNA
atggcccccgtggccgtgtgggccgccctggccgtgggcctggagctctgggctgctgcacacgcactgccagcgcaggtggcgttcacaccttatgccccggagccaggaagtacatgtcgccttcgggaatattacgaccagacagctcagatgtgttgtagcaaatgctcgcccggccagcacgcaaaagtattctgtacaaaaacgagcgacaccgtgtgtgactcctgtgaagactcgacttacactcaactgtggaattgggttcctgaatgcctaagctgtggaagcagatgctcgagcgatcaagtagaaactcaggcatgtacaagagagcaaaaccgaatctgtacgtgtcgaccaggctggtattgcgccctctcaaagcaggaggggtgccgactgtgcgccccacttcggaaatgtcggccaggttttggggtggccaggcctgggacagagacttctgacgtggtgtgcaaaccctgtgcaccaggaaccttcagcaataccacctcttccaccgacatatgccgaccacatcagatttgtaatgtggttgccatacctgggaatgcaagtatggacgccgtttgcaccagcacgagccctactagatcaatggcccctggtgccgttcacttaccccagcctgtgtctacgcgttcacaacacacacagcccactcccgaaccctccactgcaccaagtacctcttttttgctccccatgggacccagtccaccagctgaaggcagcacgggagacttcgcgctgcctgttgtttcgttgtcttccagttag

SEQ ID NO: 26834 - DNA, 468 bp, synthetic construct
  misc_feature 1..468: note = Description of Artificial Sequence: Synthetic coding sequence
  source 1..468: mol_type = other DNA
atggcccccgtggccgtgtgggccgccctggccgtgggcctggagctttgggctgccgcacacgcacttcccgcacaagtagccttcaccccatatgcgcctgagcccggtagtacgtgtcgtctacgcgagtactatgatcagaccgcacagatgtgctgctctaaatgctcccccggacagcacgccaaagttttctgcacaaagacgtctgacacagtctgcgattcttgtgaagattccacttacacccagctgtggaattgggttccagagtgtctcagctgcggcagtcggtgctcaagcgatcaggtcgagacacaggcgtgcacacgcgaacagaatcggatttgcacctgtcgacccggctggtactgtgcactgtctaagcaggaagggtgtcgtctgtgtgccccactgagaaaatgcagacccggattcggggtggcaaggcccgatctttcatag

SEQ ID NO: 26835 - DNA, 114 bp, synthetic construct
  misc_feature 1..114: note = Description of Artificial Sequence: Synthetic coding sequence
  source 1..114: mol_type = other DNA
atggcccccgtggccgtgtgggccgccctggccgtgggcctggagctgtgggctgccgcccacgccctaccagcccaagtggatcctggacctctttttcctcaccccggatag

SEQ ID NO: 26836 - DNA, 1968 bp, synthetic construct
  misc_feature 1..1968: note = Description of Artificial Sequence: Synthetic coding sequence
  source 1..1968: mol_type = other DNA
atgggcaccagccccagcagcagcaccgccctggccagctgcagccgcatcgcccggcgcgccactgcgacaatgattgccggatcgctgttgttacttggatttcttagcactacaacggctcaaccggagcaaaaagcttccaacctgattggaacctaccgtcatgtggaccgcgccactggccaagtgctgacttgcgataaatgtcccgcaggcacctatgtctccgagcactgtaccaacacctcactccgggtctgctcttcttgcccggtgggtacattcactcgccatgagaatggcatagaaaagtgtcacgactgcagtcagccctgtccatggccgatgatcgagaagctgccatgtgccgctctgactgacagagagtgcacctgtcctcctgggatgttccaatctaacgcaacatgtgcaccccacaccgtgtgccccgtgggctggggtgttcgcaaaaaaggtacagagacagaggacgtgaggtgcaagcagtgtgcgcggggaacattttccgatgtgccttcctccgtaatgaagtgtaaggcctataccgactgtctgagccagaacctagtggtgataaaaccaggtactaaggaaactgataacgtgtgcggtacactgccatcatttagctcttcaacctctccctccccaggcaccgctatcttcccacgaccggagcatatggaaacacacgaggttccctccagtacatacgtaccaaagggaatgaattctacagagtctaatagctctgcatctgtgcgcccgaaagtgctgtcttctattcaggagggcacggtcccagataatacttcctctgccagaggcaaggaggacgtcaataagactttgcccaacctacaggttgtgaaccaccagcaaggaccacaccataggcatatcctgaaactgctcccttccatggaggccacaggcggagaaaaaagctccacacctattaagggacctaagcgcggacatcctagacagaatctgcataagcattttgatataaatgaacatttaccatggatgatcgtgctttttctgctgctggtgctcgtggtaatcgtggtgtgttcaataagaaagagctctcgcaccctcaagaagggtccacgccaggatccctcagctattgtggaaaaggccggcctgaaaaagagcatgacccctacacagaaccgcgagaagtggatttattactgtaatggccatggtatcgacatcctgaagctcgtagcggcacaagtcggctcacagtggaaggacatctaccagttcttatgtaacgcaagtgaaagagaggtcgccgcattttccaacggttacaccgctgatcacgaacgtgcctacgccgcgctgcagcattggactattcggggaccagaggcctcgttggcccagctaattagcgctctgcgccagcatcgccgaaatgacgtggttgaaaagatcagaggcctcatggaggatactacccagctggagacagacaaactggcgctaccaatgtccccatctcccctctctccatcccccattccttcgcccaatgctaagctcgagaattccgccctgctgactgtagagccaagcccgcaggataagaacaaagggttttttgtggacgaatcagagcctctccttaggtgtgacagtacatcatctgggagtagtgccctctccaggaatggaagctttattactaaggaaaagaaagacaccgttctgcgacaggttcggttggatccatgtgacctgcagcctattttcgatgatatgttgcacttccttaatcccgaagagctccgcgtgattgaggagattcctcaggccgaagacaaactggacaggctgttcgagattattggtgtgaagtcccaggaagcctctcagacactgctggactcagtttactcacacctgcctgacttgttatag

SEQ ID NO: 26837 - DNA, 1035 bp, synthetic construct
  misc_feature 1..1035: note = Description of Artificial Sequence: Synthetic coding sequence
  source 1..1035: mol_type = other DNA
agctgctgccggccctggcggcccctgggcgcccggagccccgcccgcccttcccggcccaagcgcggccacccaagacaaaatctgcacaaacattttgacatcaacgagcatctgccatggatgattgtcttgtttctgctgctcgtcctagtcgtcattgtcgtctgtagtattcggaaatcaagccgaacactgaaaaaaggcccgcgccaggatcccagtgcgatcgtggaaaaagcaggacttaaaaaaagcatgacgcccactcagaatcgagagaagtggatttactattgtaacggacacgggatagatattctgaaactggtcgccgctcaggtgggtagccagtggaaagacatctatcagtttctatgtaacgccagtgagcgagaagtcgcagctttttccaatgggtatacagccgatcacgagcgtgcctatgctgcactacagcattggacaatccgcggacccgaagcgagccttgcccagcttatcagcgctctcaggcagcatagacgcaatgacgttgtcgagaaaatccgcggcctcatggaggataccactcagcttgagacagacaagttggccttaccaatgagcccttcccctctttcacctagtcccattccttcacctaatgcgaagcttgaaaattccgcgctgcttacagtggagcccagtccccaggacaagaataaggggttttttgtcgacgaatccgagccactgctgaggtgcgactctacatcatccggcagctctgccctgagtcgaaacgggtcctttattactaaagagaagaaagacacagtcctaagacaggtaaggctggacccctgtgatttacagcctattttcgacgatatgctacatttcttgaacccagaagagcttcgggttatcgaggaaatcccccaagcggaggataagctggacaggttgtttgagattatcggcgtgaagtcccaagaagcctcgcagactctgctggactctgtatacagtcatctgcctgacctgctgtag

SEQ ID NO: 26838 - DNA, 1119 bp, synthetic construct
  misc_feature 1..1119: note = Description of Artificial Sequence: Synthetic coding sequence
  source 1..1119: mol_type = other DNA
atggagcagcggccccggggctgcgccgccgtggccgccgccctgcttctggtactccttggggcccgggcccaagggggcacaagaagcccacggtgcgattgcgcaggcgatttccataagaaaatcggtctgttctgttgtcgcggatgccccgccgccagtcaggtggccctggagaactgctccgccgtcgcagataccaggtgcggttgtaaacccggatggttcgtagaatgtcaggtctcccagtgcgtcagttcttcccctttctactgtcagccctgtcttgactgcggcgcccttcacagacacacccgactcctatgctccagacgagatacagactgcggtacatgtctgccaggcttttatgaacatggcgatggatgtgtgagctgcccaaccagcacattggggagttgccctgaaaggtgcgcagccgtgtgtggatggaggcagatgttctgggtgcaggttctgctagccggtcttgtggtgcccctcctcctgggtgccaccctcacgtacacttatcgccactgttggcctcataaaccactggtgactgccgatgaggccggcatggaggccctgacccccccccccgctactcatctgtctcccctggacagcgcccacacgcttttagcgcctccagattcctcggagaagatctgtaccgtccaactggtgggtaattcatggactcctggatacccagaaacccaggaagctctctgcccacaagtgacttggtcttgggaccagctcccatccagggcactaggtccagctgctgcgccaactctgtccccagagagccctgctggctccccagctatgatgcttcagcctggtccgcaactgtacgacgtcatggacgctgtgcctgctaggcgctggaaggagtttgttagaacccttggcttgagggaagcagaaatcgaagcagtggaagttgaaatagggaggttccgtgatcaacagtacgaaatgttgaagcggtggagacagcagcagcccgccggcctcggtgcggtgtatgccgcccttgagagaatggggttagacggatgcgtggaggacctgcggagccggcttcagcggggcccctag

SEQ ID NO: 26839 - DNA, 705 bp, synthetic construct
  misc_feature 1..705: note = Description of Artificial Sequence: Synthetic coding sequence
  source 1..705: mol_type = other DNA
atggagcagcggccccggggctgcgccgccgtggccgccgccctgttgctggtcctcttgggggccagggctcaaggcggcacgcggtccccccgctgcgattgtgctggcgactttcataaaaagatcgggctattctgttgccggggctgtcctgccgacgaggccgggatggaagcgctgaccccaccacccgccactcacttgtctccgctggattccgctcatacactattggccccgccagattccagcgagaaaatctgcacagtgcagttagtggggaacagctggacgcccggctaccccgagacacaggaggcactgtgtccccaggtcacatggagctgggatcagctcccttccagggcactcggccccgccgccgcaccaactctctctccggaatcgcccgccggctctcctgccatgatgctccagccagggccacagctgtacgacgtgatggatgccgtcccagcgcgtcgatggaaagaatttgtaaggactctgggtctacgcgaggcagagattgaggcagttgaggtcgaaatcggacgttttcgggatcaacagtacgagatgcttaaacgttggcgccagcagcagcccgctggcttgggggccgtctatgccgctcttgagcgcatgggactggatggctgtgttgaggaccttcggagcagactgcaacgggggccatag

SEQ ID NO: 26840 - DNA, 1143 bp, synthetic construct
  misc_feature 1..1143: note = Description of Artificial Sequence: Synthetic coding sequence
  source 1..1143: mol_type = other DNA
atggagcagcggccccggggctgcgccgccgtggccgccgccctgctgttagtgctgctgggggcccgcgctcagggggggacaaggtccccaagatgtgactgcgcaggagacttccacaaaaagatcggtttgttttgctgccgaggatgtcccgccgggcattacctgaaagccccatgcaccgagccatgcggcaactctacctgcctcgtgtgcccacaggatacttttttggcttgggaaaaccatcataatagcgagtgtgccaggtgtcaagcctgcgacgagcaggccagccaggttgccctggaaaattgtagcgccgtcgcggacacgcgctgtggttgcaagcccggttggtttgtcgaatgccaggtgagccagtgcgtgagctcctcacctttctactgtcagccttgtctggactgtggcgcgttgcaccgccatactcgcttgttgtgctcccgacgagatacagactgcggcacctgcctccccggcttctatgagcacggcgacggttgtgtttcttgccccacgagtacactaggttcgtgccctgaaagatgtgctgcagtgtgtgggtggcggcaaaacgaggccgggatggaggctctgacaccccctccagcgactcatttatcgccactggacagcgctcacacactattggccccccccgacagctccgagaaaatctgtaccgtgcagttagtaggcaattcctggactcctgggtatcccgagacacaagaggccctgtgcccgcaagttacctggtcctgggaccagttgcctagtcgtgccctgggacccgcggcggcccccacactgtctccagagtcccctgccggaagccctgcaatgatgttgcagccaggaccacagctgtatgacgtgatggatgccgtgccagcacgtcgttggaaagagtttgtccgcacacttggactcagagaagcagagattgaggcagtggaagtggagataggacgctttagagaccagcaatatgagatgctcaagcgttggcgccagcaacaacccgcgggcctcggagccgtatatgcggcacttgaaagaatggggctggacggatgtgttgaagacttaagaagcagactgcagagggggccctag

SEQ ID NO: 26841 - DNA, 1254 bp, synthetic construct
  misc_feature 1..1254: note = Description of Artificial Sequence: Synthetic coding sequence
  source 1..1254: mol_type = other DNA
atggagcagcggccccggggctgcgccgccgtggccgccgccctgttgctagtccttctgggggctcgagcccagggcgggactaggtctccaaggtgcgattgcgctggtgatttccacaagaagatcggcctcttttgctgtaggggatgtccagccggtcattacctgaaagctccctgcactgagccctgtggaaatagtacgtgccttgtgtgcccacaggatacatttctagcgtgggagaaccaccacaactcagaatgtgcccgctgccaggcttgtgacgaacaagccagtcaggtggccctcgaaaattgcagcgcagtggccgacactcgctgcggatgcaagcccggttggtttgtcgaatgtcaggtgtcccagtgcgtgtccagcagccctttttattgtcagccatgcctcgactgcggggccttgcaccgtcacactagacttctttgttcccggcgtgacactgactgtgggacttgtctccctggattctacgagcatggggatggatgcgtgtcatgcccaacatctaccctagggtcgtgtcccgaaaggtgcgctgctgtgtgcggatggaggcagatgttctgggtacaggtgttgctggccggtctggtggtccctctgctgctcggggcaactttaacatatacctacagacattgttggcctcataaacctctggtcacagccgacgaggcgggcatggaagcccttacaccacctcctgcgacccacctctccccccttgactctgctcacacgctcctggcgccacctgatagttccgaaaagatttgcaccgttcagctcgtgggcaactcatggacacctggctacccagaaactcaggaggctctatgtcctcaggtgacttggtcctgggatcagctacctagtcgagctctcggccccgctgccgcgcccacactgtcacccgaatcacctgcaggttcgcccgcgatgatgttgcaaccaggaccacagctgtacgacgtcatggacgctgtgcctgcccgccgctggaaggagtttgtgcgtaccttggggctcagggaagcagagatcgaagctgtggaagtagagataggaaggtttagagatcagcagtatgagatgctgaaaagatggaggcaacagcaaccagcaggcctcggagctgtgtacgcagcactcgagcgaatggggcttgacggttgtgtggaggatctacgatctaggttacagaggggcccatag

SEQ ID NO: 26842 - DNA, 1281 bp, synthetic construct
  misc_feature 1..1281: note = Description of Artificial Sequence: Synthetic coding sequence
  source 1..1281: mol_type = other DNA
atggagcagcggccccggggctgcgccgccgtggccgccgccctgttgctggtgttgctgggagcccgggcccagggaggaactcggtcacccaggtgtgactgcgctggcgattttcacaaaaagatcgggctgttttgttgcaggggctgtccagccggccactatctgaaagctccatgcaccgaaccttgcggcaattctacttgcttggtatgcccccaagataccttcctcgcatgggagaaccaccacaattcagagtgcgccagatgccaggcttgcgatgagcaggccagccaagtggcattggaaaactgctccgctgtagccgatactcggtgcggctgtaaacctggatggtttgtcgaatgccaagtaagccagtgtgtcagttcctcccctttctactgccagccgtgtttagactgtggggcccttcaccggcacactcgcctgctctgctctagaagagacacagactgcggtacatgcctccccggcttttacgaacatggagatggttgcgtgtcctgtcctactcctccgcctagcctcgctggggctccatggggggctgtgcagtccgcagtgcctctgtcagtggcaggtggccgcgtgggcgtgttctgggtccaggtgctcctcgctggactcgtcgtaccactcctgctcggcgccacccttacatacacctatcggcactgctggcctcacaagcctctcgtgacagccgacgaagcgggcatggaggccctgactccgcccccagccacccatctaagtccgctggacagtgcacacaccctcctggccccacctgattcatctgagaaaatctgcacagtacagctagtgggcaattcctggaccccaggttacccggaaacccaggaagccctgtgcccccaggtgacctggtcttgggatcagctgccgagccgggcattgggcccagcagccgcacctacattatcaccagagtctccagcaggttccccagccatgatgcttcagcccggcccgcaattatatgatgtgatggatgccgttcctgctcgccgttggaaggaatttgtgcgtaccctggggctcagggaggcagaaatcgaagcggtggaggtggaaataggcaggtttcgagaccagcagtatgagatgctgaagaggtggcgacaacagcaacctgccgggctgggggcggtctatgcggcactggagagaatgggccttgatggctgcgttgaggacctgcgttcccgccttcagaggggcccatag

SEQ ID NO: 26843 - DNA, 768 bp, synthetic construct
  misc_feature 1..768: note = Description of Artificial Sequence: Synthetic coding sequence
  source 1..768: mol_type = other DNA
atgggcaacagctgctacaacatcgtggccaccctgctgctggtgcttaactttgagcgaaccaggagtctccaagacccttgcagcaattgtcccgccggcactttctgtgacaacaaccgaaatcagatctgttcaccatgtcctcccaactccttctcgtccgcaggagggcagaggacttgcgatatatgtaggcaatgtaagggtgtgttccgaacccggaaggaatgctcatctacttctaacgctgaatgcgattgtacacccgggttccattgccttggtgcaggctgctctatgtgtgagcaggattgcaaacaagggcaggagctaacaaaaaagggatgcaaagactgttgctttggtacatttaacgatcaaaaacggggaatttgtcgaccttggaccaattgctccctggatggcaagtctgttctcgtaaacggaactaaagaacgggacgtggtctgcggaccatcccccgctgacttgtcccccggggcctcaagtgtgacaccgccggctcccgccagagaaccggggcatagcccacagattatttcattctttttggccttgactagcaccgctttgttgtttcttctgttctttctgaccctcaggttttctgtggtaaagcgcggtaggaagaagctcctttatattttcaaacaacctttcatgcggcctgtgcagaccactcaggaggaagacggctgttcttgtcggtttcccgaggaggaagagggcggttgcgaactgtag

SEQ ID NO: 26844 - DNA, 5919 bp, synthetic construct
  misc_feature 1..5919: note = Description of Artificial Sequence: Synthetic coding sequence
  source 1..5919: mol_type = other DNA
atggaccccaccggcagccagctggacagcgacttcagccagcaggatacaccatgcctcattattgaagattctcaaccagaaagtcaggtgctggaagacgactcaggatctcacttctctatgctgagccgccacttgccaaatctacagacacataaagagaaccccgtacttgatgtggtctcaaatcccgaacagacagccggagaagagcgcggagacggaaactccggatttaatgaacacctcaaagaaaataaggtggcagacccggtggacagtagcaatctggatacgtgcggatccatcagtcaggtgatagaacagctgcctcaacctaacaggacctctagcgtactaggaatgtccgtggagtcagcccctgccgtggaagaggagaagggcgaggagctagagcagaaggagaaggaaaaagaggaagatacctcaggaaataccactcatagtttgggtgctgaggacaccgctagctcccagttgggctttggggtgttagaactaagccagtcccaggatgtggaggaaaacaccgtgccgtacgaagtggataaggagcaattacagtcagttacgacgaattcagggtacactaggctttccgatgttgacgcgaacaccgcaatcaaacacgaagagcagtccaatgaagatatcccaatcgccgagcagtctagcaaggacattcccgtgacagctcagcctagcaaagacgtgcatgtcgtgaaggaacagaaccctcctcccgcgcgtagtgaagacatgccattctctcctaaggcttctgtcgcggcgatggaggccaaggaacaactttccgcccaagaactgatggagtctggcctccagatacagaaatcccctgaacctgaggtgctctctacccaggaggacctgtttgaccagtctaataagacggtgagcagtgacggctgctcaaccccttccagagaagaggggggatgctctctcgcttctaccccagctactacccttcatctcttgcaactatccggtcagcgatcccttgtgcaggattctctatcgacaaactccagcgacctcgtcgctccatcaccagatgcatttcgatccacaccatttattgtaccctcctcccctacggagcaggaaggtaggcaggacaagcccatggatacaagcgtgctgagcgaagagggaggagaaccatttcagaaaaaactgcagtctggcgaacccgtggagctggagaatccaccacttttgcctgaatctacagtctccccacaggcctcaactccaatttcccaaagcaccccggtctttccccctggctcgctgccaatcccaagtcagcctcagttttcacacgacattttcattccaagccccagcctggaggaacagagcaatgacggcaagaaggacggggacatgcactcaagttcactgactgtggagtgtagcaagacctccgaaatcgaaccgaagaattcgccagaagacctcggtctatcgttgacaggtgatagctgcaaactgatgctgagtacctcagaatacagccagagcccaaagatggagagcttgagttcacaccggatagacgaagacggggaaaacacccagattgaggatactgaacccatgtctccagtgctgaacagtaagtttgtgccagcggagaacgactccatcctcatgaatcccgctcaggatggcgaggtgcagttgtcgcagaacgacgacaagactaagggagacgatactgacacccgcgacgacatctccattctggcaactggctgtaaaggcagagaagagactgttgctgaggacgtgtgcatagacctcacctgcgactctggaagccaggccgtcccctcccccgcaactcggtctgaggccctgtcttctgttctcgatcaggaggaggcgatggaaatcaaggagcaccaccctgaggaaggatcttcaggctccgaggtggaagagataccagaaaccccgtgcgagtctcagggggaggagctcaaagaggagaatatggaatcagtgcctttgcacctcagtcttaccgagacccagtcccagggcctttgtctccagaaggaaatgcctaagaaggaatgtagtgaggccatggaggtggagacaagcgtgatcagtatcgacagtccacagaagctagcaattctcgatcaggaactggagcacaaggagcaggaagcgtgggaggaagcgacgagcgaggattcttcagtagtgatcgttgacgtgaaagaacccagtcctagagttgacgtcagctgcgaaccactcgagggtgttgagaaatgtagtgattcacagtcctgggaggatatcgccccggagatcgaaccctgtgctgagaatcgtctggataccaaggaagaaaaatcagttgagtacgaaggcgatctgaaaagcgggaccgcagaaacggaacctgtggagcaagacagtagtcagccatctctccccttggtgcgtgctgatgacccacttagactggatcaggagctgcagcagccccagacacaggaaaaaacctcgaacagcctaaccgaagattccaaaatggcgaacgcaaagcaactgtccagcgacgccgaagctcagaagcttggtaaacctagcgcacatgcttcacaatcgttctgcgagagtagctccgagacaccattccactttaccttgcctaaggaaggcgatatcatcccgccacttacaggagccaccccgcccctgattgggcatctgaaattagagccgaagaggcatagcacacctattgggatctccaactatcccgagtcaaccatcgcaacatccgatgtcatgtcagagtcaatggtcgagacccatgaccctattcttgggtctggaaaaggggacagtggcgcagcacccgacgttgatgacaagttgtgtctcagaatgaaattggtttccccagagaccgaggcttctgaggaatccctccagtttaatctggagaagccagcgacaggggagcgcaagaacggaagcactgcagtcgcagagagcgtcgcatcaccccagaaaactatgtctgtcctgtcatgcatttgcgaagctcgccaggaaaatgaggcacggagcgaagatccgcccactactcccatccgtggtaatctgctccatttcccttcaagccagggggaagaagaaaaagaaaagctggagggagatcataccatccgacagtcccagcaacccatgaagcctatttcccctgtgaaggaccctgtcagcccagcctcacagaagatggtgatacagggtccaagtagtccccagggagaagccatggtgactgacgttctcgaggaccagaaagaaggaagatccactaacaaagaaaatccctccaaggccctgatagaacgccctagtcagaataacattggaatccagacaatggagtgttctctgcgggtgcccgagaccgtgtcagccgctacccaaactattaagaatgtgtgtgaacagggaacctctactgtggatcagaattttggcaagcaagacgccaccgttcagacagagcgtggaagtggggagaaacccgtgagcgccccaggagatgataccgagtctctccactcccaaggcgaggaggagttcgatatgccccagccacctcacggacacgtgcttcataggcatatgagaaccattcgggaagttcgcaccctagtgacacgcgtgatcaccgacgtgtattatgtggatgggaccgaggttgaaagaaaagtgacagaggagactgaggaacctatcgtggaatgtcaggagtgtgagacagaagtctcaccctcccagacaggcgggagctccggcgaccttggtgacatcagcagcttctcatccaaggcttcaagtctgcaccggacctcctcaggaacatccctctcagcaatgcactctagcggatcctcgggaaagggggccggtcctctccggggtaagacctctggcacagaacctgccgattttgcattaccctccagtagggggggacccgggaaactgtccccacgaaagggggtcagccaaaccgggacaccagtttgtgaggaggatggggatgcaggactggggatacgacaaggtgggaaagctccggtcaccccacggggtagaggcaggcggggacgaccgccatctaggactacgggtactagagagaccgccgtaccaggacctttaggaatagaagatatttcccctaatctttcccctgatgacaagtcttttagccgggtcgtgcctagagtccccgatagtacccgtcgcactgatgtcggtgctggcgcgctgcgccgtagtgattcacctgaaattccctttcaggccgctgcaggtccctccgatggcctcgacgcgtcctcccctggcaactccttcgtggggcttcgcgtagtcgccaagtggtcgtctaatggctatttctattctgggaaaatcacaagagatgtcggcgccggaaaatataaactgctttttgatgatggctacgagtgtgatgtgctgggaaaggatattttgctatgtgaccctatcccactggatacagaggtgaccgctcttagcgaggacgaatatttcagcgcaggggtggttaaggggcatagaaaagagtccggggaactgtattacagtattgaaaaagagggccagaggaaatggtataagaggatggccgtgatcctctctctggagcagggcaatcgcttaagagagcagtatggcctggggccatacgaggccgttaccccactgaccaaagctgctgatataagccttgataatctcgtggagggaaaaaggaagcgacggagcaacgttagctcccctgccacccccaccgcctcctcctcaagctctacaacccctaccaggaagattacagaatccccacgcgccagcatgggcgttctctctgggaagcggaagctgatcactagcgaagaggaaagatcaccagcaaagcgggggaggaagtctgccactgtcaaacctggagccgtgggcgcaggcgagtttgtttctccctgcgagtcgggggacaacacgggtgagccatccgccctggaggaacagagaggccccttaccccttaacaaaacactgtttttgggctacgctttcctgttaactatggctaccacttcagacaagctggcttcacggagcaagctacccgatggccccaccggctcatccgaagaggaggaggagttcctggagatccctccctttaacaagcaatacactgagtcacagctgcgggccggagccggctacatattggaggacttcaatgaggctcagtgtaacacggcctatcagtgtctcctcatcgccgaccagcattgtcgcacccgaaaatacttcctgtgcctcgcgagtgggattccgtgtgtgagccacgtgtgggtgcacgacagctgccacgctaatcagttgcagaactataggaactacctgctgcctgccggctactctttggaggaacaacgcatcctggactggcagcccagagagaacccttttcaaaacttaaaagtgctcctggtttcagaccaacaacaaaacttcttagagctgtggtcggagattcttatgacaggcggagctgccagcgtcaagcaacatcattcttccgctcataataaagatatcgcgttgggagtgtttgacgtggtcgtgactgaccccagttgccctgcctctgtattgaaatgcgctgaggctcttcaattgcccgtggtttcccaggaatgggttattcagtgtctgatcgtcggtgagcgaatcgggttcaagcagcaccccaagtataagcatgattacgtgtcccattag

SEQ ID NO: 26845 - DNA, 5784 bp, synthetic construct
  misc_feature 1..5784: note = Description of Artificial Sequence: Synthetic coding sequence
  source 1..5784: mol_type = other DNA
atgcccggcgagcagatggaccccaccggcagccagctggacagcgattttagccagcaggacactccttgcctgatcattgaggacagtcagccagagagtcaggtgctcgaggacgactctggctcccacttctccatgctgtcccgtcacctgcctaacttacaaactcacaaagaaaacccggtgctggatgtagtctccaaccccgagcagacggccggagaagagcgcggggacgggaattctgggttcaatgaacacttaaaggagaacaaagttgccgatcccgttgactctagtaatctggacacttgcgggtccatttcacaggttatcgaacagctgccacagccaaaccgaaccagctcagtgctggggatgtctgttgaatcggcacctgctgtcgaggaggaaaaaggggaagagctggagcagaaagaaaaagaaaaggaggaagacaccagcggcaacacaacccatagcctgggggcagaggacaccgcttcctctcaattagggtttggagtgctggagctctcacaatcccaggatgtagaggaaaacactgtcccttacgaagtggacaaagaacaactgcaaagcgtgacaacaaactccggatacacacggctcagcgatgtggatgctaacactgcaatcaagcatgaagagcagtcaaacgaagatatccccatcgctgagcagagctctaaagatatccctgtcaccgcccaaccttctaaggacgtgcacgtcgtgaaagaacagaacccacctcccgcccggagtgaggacatgccgttctcccccaaagccagcgtggctgcaatggaagccaaggagcagctgtccgctcaggaactcatggaatctggattgcagatccagaaaagccccgaacctgaagtcctatctacacaggaggatttattcgaccagtccaataagacggtctcctctgatggttgttcgaccccgtcacgggaggagggtggttgttccttggcctcaaccccagcgactaccctccatctgttgcagctctccggacagaggagcctggttcaagactctctctctaccaactctagtgaccttgtagccccttcccccgacgcttttcgctccaccccattcatcgtgccttcaagtcccacagaacaagagggcagacaagataaaccaatggatacctcagttctgagcgaggagggcggcgaaccctttcagaaaaagttgcagtcaggcgaacccgtcgaactcgaaaaccctccactgttgcctgaatcaacagtctccccccaggcatccacccccatcagccagtctacaccagtgtttccaccaggcagcctgccaattccgagccagccacagttttcgcacgacatctttatcccttccccctcactagaggaacagagtaatgatgggaagaaggatggcgatatgcattcctcctctctcactgtggagtgctccaagacaagcgaaatcgagcccaaaaacagccctgaagatctcggcctgtcactgactggagactcatgcaagctgatgctatccacatcagaatatagccagagtcctaagatggagtctctgagctcccatagaatcgacgaggatggcgagaatacacagatcgaggacaccgagccgatgtcaccagtgttaaattccaaatttgtcccggctgagaatgactctatcctgatgaacccagcccaggatggcgaggtgcaattgtcccagaatgacgataagaccaagggagatgacactgataccagagacgacatttccattttagccacgggatgcaaaggacgagaagagacagtggctgaagatgtctgcattgatctgacttgtgattccgggtcgcaggctgtgccaagccccgccacccgctccgaggcactcagttccgtgttagaccaggaggaggccatggagatcaaggagcatcaccccgaggagggatcaagcggctccgaagtcgaagagatcccggagacaccctgcgagtcacagggagaagaactcaaggaagagaacatggagtcagttcccctgcatctgtctctgacagagacacagtcccagggtctgtgtttgcagaaggaaatgcccaaaaaagaatgttccgaggctatggaggttgagacatcggtgatctccattgattccccacagaagcttgccatcctcgatcaggaattggaacacaaagaacaggaggcttgggaggaggccacctcagaagactcctcagtggtgatcgtggacgtgaaggagccttcaccacgggtcgatgtaagctgtgaaccgctggaaggagtcgaaaaatgctccgatagtcagagctgggaggacattgcgcctgaaattgagccttgcgccgagaacagacttgatactaaggaagagaagtctgtagaatacgagggggaccttaaatcaggtaccgcggaaactgagcctgtggagcaggatagttcacagccctctctcccactagtaagagctgacgatccgttgcggctagatcaggaactacagcaaccccaaacacaggaaaagaccagcaacagcctcactgaagactctaaaatggctaatgccaaacagttgagctccgacgcagaggcacagaagctcggtaagcccagtgctcatgcctcacaatctttttgcgaatcatcttccgaaacgcctttccacttcaccctacctaaggagggagatataattccgccactgaccggagcaacccctcccctgataggccacttgaaactggaacccaaacggcattctacgccgattggtatctctaactacccagaatcaacaatcgctacatctgacgtgatgtcagaaagcatggtggaaacccacgaccccattctgggttcggggaagggggattctggagccgcaccggacgtcgatgataagttatgcttaaggatgaagttagtgagtccggagacagaagcttccgaagaatcgttacaattcaatctggagaagccagccacaggggagcgtaagaacggctccaccgccgttgcggaatccgtggcctcccctcaaaagactatgagcgtattatcctgcatatgtgaagcccgccaggaaaacgaggcacgctccgaggacccgccgaccacgcctattcgaggaaatctgctgcatttcccgagtagccagggagaggaggagaaggaaaaactggaaggagaccatactataagacagagtcaacagccaatgaaacccatttcccccgtgaaggacccggtaagtccagcatcacagaaaatggtaattcaggggccaagttcaccacagggtgaggctatggtcacagatgtgctcgaagaccagaaagaaggcagaagcacaaacaaagaaaatccttctaaggcactcatagagcgcccatcccaaaataatattggtatccagacaatggagtgttccctcagggtgccagaaacagtgagtgctgctacccagactatcaaaaacgtgtgcgagcaggggacatcaaccgtggaccagaattttgggaaacaggatgcgacggtgcaaactgagcgagggtctggagagaagcctgtctcggcaccaggcgatgacactgagtctttgcactcgcagggtgaagaagagttcgacatgccacagccgccacacggccatgtcctgcatcggcacatgcggaccatacgggaggtgaggactctagtgactcgagtcatcaccgacgtgtattacgtcgatggaactgaagtggagcggaaagtgactgaagagaccgaagagccgatcgtcgagtgtcaggaatgcgaaacagaagtgtctccatcccagaccggagggtctagtggcgatctcggggacatttcctcattcagtagtaaagcatcctcactgcataggacaagctcaggcaccagtttgtccgcgatgcacagtagcggaagttccggtaaaggcgccggtccactgcggggaaaaacgagtggcactgagcctgctgatttcgccctgcctagcagcagaggcggacctggcaaacttagggagacagccgtgcctggccccctgggaatagaggacatctctccaaacttgtctccagacgacaaatctttctctcgagtggtgccgagggtgcccgatagcactcggcgcaccgacgttggcgcaggagctctcaggaggtctgatagcccagagatccccttccaagctgcagcagggccatcagacggcctggatgcttccagccccggtaactcttttgttggactgcgggtggtcgcgaagtggtcttccaacggctacttctactccggcaagataaccagagacgtcggcgctggaaagtacaagctgttgtttgacgatggttacgagtgcgatgtgctggggaaagacatactactctgtgatcctataccattggacaccgaggttaccgcactcagcgaggatgagtacttcagtgcaggggtggtcaagggtcaccggaaagaatctggagagctgtactactcgatagaaaaagaaggccaaaggaaatggtataaaaggatggctgttattttaagccttgaacagggtaaccggctgagagagcagtacggcttgggaccatatgaagctgtgaccccattaaccaaggcagctgatatttcgttagacaatcttgtcgagggaaagagaaaacggcgctcgaatgtttcatcccccgccacaccaacagcctcctcatcgagttctacaacgcctacacgcaagatcaccgagagtccgagagcctctatgggagtcctgtctggcaagaggaaacttatcacaagtgaggaggagagaagccccgccaagcgcgggagaaaatcggcaaccgtaaagcctggtgctgttggcgccggggagtttgttagcccttgcgaaagcggagacaataccggggagccatctgctctagaggagcagaggggcccactgcctcttaacaagacattatttctcggctacgcatttcttttgaccatggctacaacttccgacaaattggccagcaggtccaagctgccagatggaccgaccggctcctcagaagaagaggaggagttcctggaaatccctccattcaataagcaatataccgaaagtcagttaagagctggcgccggctacatcttggaggacttcaatgaggcccagtgtaacaccgcctaccagtgcctgttgatagctgatcagcattgcagaacacggaaatacttcctctgcctcgcttcgggtataccctgcgtatcacatgtatgggtacatgacagttgccatgccaatcagttgcagaattacaggaactacctcctccccgccggctattccctggaagaacagcgcatactagactggcagcccagagaaaacccctttcagaacctcaaggtcctgttagtgagcgaccagcagcagaattttctcgaactatggagcgagatactgatgacaggcggggccgcctctgtgaaacagcatcattcaagtgctcacaacaaggatattgcgttaggtgtgttcgacgtggtagtcacagatccctcatgccctgcatcagtgctgaagtgtgcagaagcgttacagctgccagttgtgagccaggaatgggtgatccagtgtctcatagtaggcgaaaggattggattcaagcagcaccccaaatataagcacgactacgttagccactag

SEQ ID NO: 26846 - DNA, 5934 bp, synthetic construct
  misc_feature 1..5934: note = Description of Artificial Sequence: Synthetic coding sequence
  source 1..5934: mol_type = other DNA
atgcccggcgagcagatggaccccaccggcagccagctggacagcgacttctcacaacaggacacaccctgtctgatcattgaggatagccaacctgagtctcaagtgttagaggacgattcaggatctcacttttcaatgctgtcccgacatttgcctaacttacagacacacaaggagaatcccgtactcgacgtggtatctaaccccgaacagactgccggtgaggagcgcggggatggaaacagcgggtttaatgaacacctgaaagaaaataaggtggctgacccggtcgatagctccaacctcgacacttgcggatccatctcgcaggtgatcgaacaacttccccagccaaacaggacgtcttccgtccttggcatgagcgttgagagcgcccctgcagtggaagaagagaagggcgaggaattagaacagaaagagaaagaaaaggaagaggatacaagtggaaacaccacccacagtctcggtgctgaagacaccgcttcctctcagctcggattcggcgtactggagctctctcagagtcaggatgtggaggagaacactgttccctatgaggtagataaagaacaattgcaatctgtcacaacaaatagcggctacactaggctttctgatgtagatgctaataccgctataaagcatgaagaacagagtaacgaggacataccaatcgccgaacagtcatctaaagatatccccgttaccgcccagccttcaaaagatgtgcacgtagtcaaggaacaaaatccgccacccgcccggagcgaggatatgcctttttcccccaaggcatccgtagccgcaatggaggccaaggagcaattatctgcccaggaattaatggagagtgggctccagatacagaaaagcccggagccagaggtactgtcgacacaggaggaccttttcgatcagagtaataaaaccgttagttctgacgggtgcagcactccgtcccgtgaggaaggtggctgctctctggctagcactccggctactacattgcacctcctccaattgtccggccaaaggtctctggtccaggattccctgtctacaaactcttcagatttggttgctccatctccggatgcatttcgatccactccctttattgtgcctagttcacctacagagcaggagggccgtcaggacaagcctatggacacctccgtgctgagtgaggaggggggagaaccattccagaagaaactacagtctggcgaacctgttgagctcgaaaacccaccactgctacccgaatccacagtgtcaccgcaggcttccactcccatatcacagtccacaccagtcttcccacctggttcactccctattccgagccagcctcagtttagccacgacatattcattccatcaccatccttggaggagcagagcaacgacggtaaaaaggatggcgacatgcacagctcgtcactgactgtagagtgtagtaaaacgagtgagatagagcctaaaaacagcccagaagacctggggttaagtctgactggcgactcatgcaagctgatgctaagcacctccgagtactctcagtcgccgaagatggagagcttgtcgtctcatagaatcgacgaagacggtgaaaacacacagatcgaggacacagagcccatgagtcccgtgttaaacagcaagtttgtgccagccgagaatgattcaatactgatgaacccagcccaggacggagaagtgcagctaagccagaatgacgataagacgaagggtgatgacaccgacactcgagacgatatctccattctcgcgaccggctgtaaaggacgcgaggagacagtggccgaagacgtgtgtatcgacctgacctgcgatagtggctcccaggctgtgccatcccccgctactagatcagaagcgctcagcagcgtactcgaccaggaggaagctatggagatcaaggaacatcatcctgaagagggctcctcagggtcagaggtggaggaaattcctgagacaccctgtgaaagccagggagaggagcttaaggaggaaaatatggagagtgtgcccctgcacctgagcctaactgaaacccagagtcaagggctgtgcttgcaaaaggagatgcccaagaaagaatgctcagaggccatggaggtggagactagtgtgatttcaatcgactctccgcagaagctggctattctagaccaggagctggaacacaaagagcaggaggcttgggaggaagctaccagtgaggattcatctgtcgttattgttgatgtcaaagagcctagcccccgggtagacgtgtcatgcgaacccctggaaggagtcgagaagtgctctgacagccagtcttgggaggacatcgctcctgagatagaaccatgtgcggagaatcgcttggacacaaaggaggaaaaatcggtggagtacgagggcgatcttaagtccgggacggcagagaccgagcctgttgaacaggattctagccagccatcgctgcccttggtgagggctgacgaccccttgaggttagaccaggagctccaacagcctcagacccaggagaaaaccagtaactcactgaccgaagactccaagatggctaacgcaaagcaattgagttctgatgcggaagcgcagaaattggggaaaccaagtgcacacgcctcacagtcgttttgcgagagcagttctgagaccccattccacttcacacttccaaaggaaggcgatattatacctccattaacaggggccacgcctccgctgatcggtcacttgaagttggaacctaagaggcattcgacccctattggaatctctaactatcctgaatcaactatcgccacctcagacgtaatgtcagagtccatggtggaaacccatgaccccatcctgggatccggcaaaggcgattccggagccgcccctgatgtcgatgacaaactatgtttaagaatgaagctcgttagcccggaaacagaggccagcgaggagagcctgcagttcaacctggagaagcctgcgactggagaacggaagaacggatcaacagccgtggctgagagcgtcgcaagcccgcagaaaacaatgagtgtgctttcctgtatttgtgaagctcgccaggagaacgaggctaggagcgaggacccaccaaccacccccattagagggaatctgctgcacttcccctctagccagggcgaggaagaaaaagagaaactggaaggcgatcacaccatcagacagtcccagcagcccatgaaaccaatttctccagtgaaagatccagtttcccctgccagtcagaaaatggtcattcagggtcccagctccccccagggtgaagccatggtgacagacgttctggaggaccagaaagaggggcgatccacgaacaaggaaaatcctagtaaagccttaattgagcggccctcacagaacaacatcggcatccagacaatggagtgcagtctccgggtgccagagactgtgtcggccgcaacccaaacaatcaaaaacgtgtgtgaacagggtacatccaccgtagatcagaacttcggtaagcaagacgctaccgtccagaccgaacggggctctggcgagaaacctgttagcgctcctggcgatgatacggagtccttgcattcacaaggagaagaggaatttgacatgccccaacctcctcacgggcatgttctgcatcggcacatgagaaccatccgtgaagtacgcacgcttgtcacacgagtcatcacagatgtctactacgtggacggcaccgaagttgagaggaaggtcacagaagagacggaggaaccaatagttgaatgccaggaatgcgaaactgaggtctcacctagccagacagggggatcctcgggcgacctgggggatatctcaagcttctcctccaaggcatcaagcttacacaggacttcctctggaaccagcctgtccgccatgcacagctcggggagcagcggtaaaggcgcagggcctctccggggaaagactagcggaacagagccagcagactttgccctccctagctctcgtggtgggcccggtaaactgagtcccagaaaaggtgtctcccagactgggactcccgtttgtgaagaggacggagacgcaggcctcggcattaggcagggagggaaggccccagtaacgccacgaggacggggaaggcggggccgcccaccgtcacgaactaccgggactagagagacagcagtcccagggcctcttggcatagaggacatcagtcccaaccttagtccagatgacaagtctttctcgagagtcgtaccccgggtcccggattctaccaggagaaccgacgttggagccggcgccctgagaaggtctgactcaccagagattccctttcaggcagcggcaggaccatctgacggtctagatgcgtctagcccagggaattcctttgtgggactgcgagtggtcgcaaaatggagcagcaatggatacttctacagcgggaaaattacccgagacgtcggggccggcaagtacaaactgctgtttgatgacgggtacgagtgcgacgtacttgggaaggacatcctgttgtgtgatcctatcccgctggacacagaagtcacagccctctcagaggatgagtacttcagcgccggggtggtgaaagggcaccgtaaagaatctggagagctgtactattcaattgaaaaagagggccaacgcaaatggtacaagcgaatggccgttattctgtctttggagcaaggcaatcggctgcgtgaacagtatggcctagggccctacgaggccgtgacacccctgacaaaagccgccgatatcagcctggataacctcgtggagggcaaaaggaaacgaaggagcaacgttagttctcctgccactcctacagctagcagtagtagttccacaaccccaaccaggaagataaccgaatctcctcgggccagtatgggcgtgttaagtggcaagaggaagcttattacaagcgaggaagaaagatctcctgccaagagggggcggaaatccgcgacagtaaagcccggtgcagtgggggccggggaatttgtctctccatgcgaaagtggcgacaacaccggtgaaccaagcgctctcgaagaacagcggggtcccctgccattgaacaagacccttttccttgggtacgccttcctgctcactatggctacaacctcagataagctagccagtagatctaagcttcctgatgggcccaccggaagctctgaagaagaagaggagttcctggagatcccacctttcaataagcaatatacagagtcccagcttagggcgggggccggctacatactggaggatttcaatgaggcgcaatgtaacacagcgtaccaatgtctgctgatagccgatcagcattgtcggacacgaaagtactttctgtgcttggccagtggtattccttgcgtgagtcatgtctgggtgcacgattcttgtcatgctaaccaactgcagaattatcggaactatctcctgccggccggttattctctggaggagcagaggatcctggactggcaaccgcgggaaaacccgtttcaaaatttaaaagtacttttagtcagtgatcaacagcaaaacttcctggagctgtggagcgagatcttgatgacgggtggcgcagcctccgtaaaacagcaccacagcagcgctcacaacaaggatattgccctgggtgttttcgacgtcgtggttacagatccttcatgccccgcctcagttctcaagtgcgcggaggcgctgcagctgcccgtagtttcacaggaatgggtgattcagtgcctgattgttggcgaaaggattggattcaagcaacacccaaagtataagcatgactatgtgagtcattag

SEQ ID NO: 26847 - DNA, 5928 bp, synthetic construct
  misc_feature 1..5928: note = Description of Artificial Sequence: Synthetic coding sequence
  source 1..5928: mol_type = other DNA
atgcccggcgagcagatggaccccaccggcagccagctggacagcgacttttcacagcaggatacaccatgcttgattatcgaggattcgcagcccgaaagccaggttttagaggatgatagtgggtcacatttctccatgctctctcggcacctccctaacctccagacccataaagaaaatcctgtgctggacgttgtgagcaatcccgagcagaccgctggagaagaacgcggcgatggaaactccggctttaacgaacatttgaaagagaataaagtagctgaccccgtagactcctctaatctggatacctgcggtagcatctctcaggtgattgaacagctgccccagcccaatagaaccagcagtgtgttgggaatgtcagtggagtccgcacccgcggtggaggaggagaagggagaggaattagagcagaaggagaaggagaaagaagaagatactagcggtaataccactcattcactgggcgccgaagacaccgctagctcccagctagggttcggcgtcttagagctaagtcaatcacaggatgtggaagagaacactgtgccctatgaggtggacaaagagcagttgcagtcagttacaacaaactcaggctacacgcgcttgtcagacgtggatgctaacaccgcgatcaaacacgaagagcagtccaatgaagacatccctattgcggaacagtcttctaaggatattccggttactgcccagccatctaaagatgtgcacgtggtaaaagagcaaaatcctcctccagctcggtctgaggacatgcccttcagccccaaggccagtgtggctgcaatggaagctaaggagcaattgtccgcccaggagcttatggagtcaggtcttcaaattcaaaaaagtccagaaccagaagtgctgtcaacccaggaagacctgttcgaccagagcaacaaaacggtgagctctgacgggtgcagtacacctagtcgcgaggagggagggtgttcgttggctagcacaccagcaaccaccctccaccttctgcagctgtcgggccagcggtcccttgtacaagacagcctgtctactaactcctccgacctggtggctccttccccggatgcatttaggtccaccccgtttatcgtcccctccagtccaacagaacaggaggggcgtcaggacaagcctatggacaccagcgtgctgtccgaggagggcggcgagccctttcaaaaaaagctccaatccggtgaaccggtcgagctggagaacccacctttactcccggagtctaccgtttcgccccaagcctctacgcctatcagccagtcaacccccgtgttccccccaggcagcttaccaatcccatcccagccccaattttcacacgacatcttcatcccatccccgtcactcgaggagcagtccaacgacggtaagaaggatggggatatgcattcatcaagcctgaccgtcgaatgctccaagacatccgagatagagccgaagaattcaccggaggacttaggactaagtttgacaggcgactcctgtaagttgatgctcagcactagcgagtactctcagtctccgaagatggaaagcctgtcctcccacaggattgatgaggatggggagaatacccaaattgaggacaccgaacctatgagccctgtactcaactcgaagttcgtgcccgctgaaaacgattccatacttatgaatcccgcacaagacggggaggttcaactttctcagaacgacgataagactaagggggacgacactgatacccgggacgacatctctatccttgccacgggctgtaagggacgggaggagacggtggctgaggatgtgtgcattgacttgacctgtgactccggtagccaggctgtcccctctcctgcgacccggtctgaggcactttcttctgtgttagaccaagaggaggctatggagattaaggagcaccaccccgaagaggggagtagcggcagtgaggtggaggagattcccgagaccccctgcgagtcccagggagaggaactgaaggaagaaaatatggagagcgtgcctctgcatttgtccctgaccgaaacacaatcgcagggcctgtgtctgcagaaagagatgcccaaaaaagaatgtagtgaggccatggaggtggaaaccagcgttataagcatcgattcgccgcagaaactcgcaatcctggatcaggaactggagcacaaggagcaagaggcttgggaagaggctacatcagaggactcatccgtagtgatcgtggacgtgaaggagccctccccaagggttgacgtgagctgcgagccgttagagggggtggagaaatgctccgactcccaaagctgggaggatatagctcctgagattgagccctgtgctgagaacaggctggatactaaggaagaaaagtctgtggagtatgagggcgacctgaaatcaggtaccgctgagaccgaaccagtggagcaggattctagccagccatccctgccgctggtgagggccgacgaccctttgcgcttggatcaggagctgcagcagcctcagacccaggaaaagacatccaactctctcaccgaggattctaagatggctaatgcaaaacagctttcgagcgacgcagaggcccagaaactcggcaaaccgagtgcccacgccagccagagcttttgcgagagcagtagcgaaacccccttccacttcactttacccaaggaaggagatattatccctccactcaccggtgccacaccccctctgatcgggcatctgaagttggaaccaaaaagacattccactcctatcggaatatctaattaccctgagtccaccatcgctaccagcgacgtgatgtcagaatctatggttgagacacatgatcccatacttgggagcggaaagggcgattcaggagccgctcccgacgtggatgataagctgtgtctccggatgaaactggtttcaccagaaacggaggcaagcgaagagtcgctgcagttcaatctggaaaagcccgccacgggtgaacgtaagaatggatcgaccgcagtggctgagagcgtcgcatctccacaaaagacaatgtcggtactgtcttgtatatgcgaggccagacaggagaatgaagccaggtcagaagatcctcctactactcctattagaggaaatctcctgcattttccttcaagccagggtgaagaggaaaaggagaagctggaaggtgatcatactattcgccagtctcagcagccaatgaagcccatcagccctgttaaggatccagtgagtccagcttcgcagaagatggtgattcaaggaccatccagcccacagggggaggccatggtgacagatgtgctagaagatcaaaaagaagggagaagtaccaataaagaaaacccaagtaaagcccttattgagcggccatcccagaataacatcggaatccagaccatggagtgcagcctgcgtgtcccagagaccgtcagcgctgcgacacagaccatcaagaatgtctgcgagcaagggacctctacagtcgaccagaacttcggcaagcaggatgcgaccgtgcagactgagagggggtccggagagaagcctgtttccgctcctggcgatgatactgagtccctccactcccagggcgaagaagaattcgacatgccgcagcctcctcatggacacgtcctccacagacatatgcgtaccataagagaagttagaactctggtgacaagggtgattaccgacgtgtactacgtggacggtactgaggtggagagaaaggtgaccgaagaaacggaggaaccgatcgtcgaatgtcaggaatgtgaaacagaagtgtccccatcacagacggggggcagcagcggcgacctgggtgatatcagctctttcagctctaaggcttccagccttcatagaaccagcagtgggacctccctcagcgcaatgcacagctctggtagcagtggcaaaggcgcaggcccgttacgggggaagactagcggaacggaacccgctgacttcgccctgccttcaagccgtggcgggcccgggaaactgagccctagaaaaggggtttcccagactggaactcctgtctgtgaagaggatggcgatgctggcctaggaatccgccagggtggcaaggcccccgtcaccccaagaggccgggggaggcgcgggaggccgccttccaggacaacaggcactagggagactgcagtacctggcccgttagggatcgaggacatcagcccaaatttgtcaccagacgacaagtccttttcgagagtggtcccacgagtccccgattcgacacggcgcacggatgtgggcgcaggagccttgcgcagatccgacagcccagaaattccttttcaagcggcagccggtccctccgatgggttagacgcctcgagtcctgggaatagctttgtggggctgagagtcgtagcaaaatggagctccaacgggtacttttatagcggcaaaataacaagagacgtgggagctggcaagtataaattactgttcgacgacggctacgagtgtgacgttctcggcaaggacattttattgtgtgacccaatccctctggacactgaggtaaccgccctgagtgaagatgagtactttagcgccggtgtcgtcaaaggccacagaaaggagtcaggtgagctgtactactcgattgaaaaagagggacaacgaaaatggtataagcgcatggccgtaatcttgagcctggagcagggaaatagacttagagaacaatacggattgggcccgtatgaagctgtaactcctcttaccaaagccgcagacatttccctagataacttggttgagggcaagcgcaagcgacggtcaaacgtcagttcgcccgcgacaccaactgcaagttccagcagcagtaccacgcccacacgaaagatcaccgagtccccacgtgcatccatgggcgtgctgtcagggaagcggaaactgataacttctgaagaagaacggagccccgccaaaagagggcggaaaagcgcaacagtgaagcccgtaggcgcaggggaatttgtatctccctgtgagtctggtgacaacactggtgagccctccgctctggaggagcagcggggccctttacctttaaacaagaccctattcctcggctatgcctttctgcttaccatggcgacgacgtctgataagttggcctcccggtccaagctgccagacgggccaactggaagctctgaggaagaagaagaattcctcgaaatacctcccttcaataagcagtacaccgagtcacaattgcgggccggggccgggtacattctggaggatttcaacgaggcccaatgcaatacagcgtatcaatgtttgctaatcgcagatcaacattgtcgtacccgaaagtattttttgtgtttggctagcggaataccttgcgtttctcatgtgtgggtgcacgactcctgccacgctaaccaactccagaactatagaaattatctgctccctgcaggctattctctggaagaacagagaattctggattggcagcctcgcgagaaccctttccaaaatctcaaggtgctgctagtgtccgatcaacagcagaactttcttgagttgtggtcggagatcttgatgacaggcggagcggcatcagtgaaacaacatcatagtagcgcccacaacaaagacatcgcccttggggtcttcgatgtcgtggttacggacccctcctgtccagcctctgtgctaaagtgcgcagaagcactgcagctgccggtcgtgtctcaggaatgggtgatccagtgtttaattgttggggagagaattgggttcaagcagcaccctaagtacaaacacgattatgtgtcccactag

SEQ ID NO: 26848 - DNA, 1623 bp, synthetic construct
  misc_feature 1..1623: note = Description of Artificial Sequence: Synthetic coding sequence
  source 1..1623: mol_type = other DNA
atggcccagagcaccgccaccagccccgacggcggcaccaccttcgagcatctgtggagttctcttgagcccgatagtacttatttcgatctgccacagtcttcaagaggcaataacgaagttgtcggaggaacagattcaagcatggacgtatttcacctggagggcatgacaaccagtgtcatggctcagttcaacctcctttcttctacgatggaccagatgtcctccagagcggcctctgcgtccccatatactcctgagcacgccgcaagcgtccctactcacagcccgtacgctcagcccagcagcacctttgatacaatgtcacctgccccggtgatccctagcaataccgattaccctgggccgcaccactttgaagtaaccttccagcagagctctaccgcgaaatcggctacttggacctattcccccctgttgaaaaagctgtattgccagatcgcaaagacatgtccaatccaaattaaagtgagcacaccacccccaccggggacagctattcgggcaatgcccgtctacaagaaggcggaacacgtgaccgatgtcgtgaaacgctgccctaaccacgagctagggagggacttcaatgaaggccaaagcgcgcccgcaagccatctgatccgcgtggaagggaacaatttgagtcagtacgtggacgaccctgtcaccggccggcagagcgtggtagttccctatgaaccaccgcaggttggaaccgagttcaccacgattttgtataatttcatgtgcaacagtagctgcgtggggggaatgaacagaagacctatccttatcatcatcacattagaaatgcgagacgggcaggtgctgggccgacggtctttcgagggcagaatttgtgcctgtccgggtagagacagaaaggcggatgaggatcattatcgagagcagcaggcactgaacgaatcaagtgcaaaaaatggagcagccagcaaacgagccttcaagcaaagtcctcccgccgtccccgccctgggtgccggcgtgaagaagaggcgccatggtgatgaggatacgtattaccttcaagtgagaggtagggagaattttgaaattctcatgaaactgaaggagagcctggagttaatggagctggtgccccagcccctggtcgactcctatcgccagcagcagcagctgctacagagaccttttctgacggggctggggtgccccaattgtattgagtattttacatcgcagggacttcaatcgatttaccacttgcagaacctcaccatcgaggacctgggagccctcaagattcccgagcagtaccggatgaccatctggaggggtctgcaggacctgaaacagggtcacgactacagcacagcccagcaattactgcgcagctccaatgcggcaactatttcaattggcggatccggtgaactccagaggcagcgggtgatggaggccgtgcactttagggtacggcatacaataacaataccaaatcggggcgggcccggtggcgggcccgatgaatgggctgatttcgggtttgatctgccagattgtaaggcgcgcaagcaacctattaaagaggaatttaccgaagccgagattcactag

SEQ ID NO: 26849 - DNA, 1500 bp, synthetic construct
  misc_feature 1..1500: note = Description of Artificial Sequence: Synthetic coding sequence
  source 1..1500: mol_type = other DNA
atggcccagagcaccgccaccagccccgacggcggcaccaccttcgaacatttatggtcatccctggaaccagactcaacttattttgacctgccccagtcatcccgtggcaataacgaagttgtcggcgggaccgactcgagcatggatgtgtttcatctggaaggaatgactacatctgtgatggcgcagtttaaccttctctccagcaccatggatcagatgtcctcccgggccgcgtctgcttcaccatacacccccgaacacgctgccagtgttcctactcactcaccttacgctcagccctcatcgacttttgacacgatgtcccctgcccctgtaataccctccaataccgactatcccggaccacaccatttcgaggtgaccttccagcaatcctcgacggctaaatccgctacctggacatacagccctttgttaaagaagctgtactgccagatagcaaagacttgccctattcagatcaaagtttctacccccccgcctccaggaaccgcgatcagggccatgcctgtctataagaaagccgaacatgtcaccgatgtggtaaaacggtgcccgaatcatgagctcggccgagacttcaacgagggccaatccgcacctgccagtcatcttatccgcgttgaggggaacaatctgtcccagtatgtggatgacccggtgacaggccgtcagagcgttgtagtaccatatgaaccaccccaggtaggcaccgagtttaccacaattttatacaatttcatgtgtaacagcagctgtgtgggtggaatgaaccgccgacccatacttataatcatcactctggagatgagggatggacaggtgctcggacgtcgctcttttgaaggccggatttgtgcttgccccggtcgggacagaaaggctgatgaagatcattatcgcgagcagcaggcactgaatgagagcagcgccaagaatggtgccgccagcaaacgcgccttcaagcaatcaccaccggctgtacctgccctaggagccggggttaagaagcgccgccacggggatgaagatacatactacctgcaggttaggggaagggaaaactttgagatcctgatgaaactgaaggagtcgcttgagctgatggagcttgtgccgcagccactcgttgattcgtacaggcagcagcaacagttgctgcagcggcccagtcacctgcagcccccctcgtacggccccgtgctgagcccaatgaataaggttcacgggggaatgaataagctgccatccgttaaccagctggtcggccaacccccacctcattcctcggccgccaccccaaatttgggccctgtgggtcccggcatgctgaataaccacggccacgcagtccccgcgaatggtgagatgtcaagtagccacagtgcccagtccatggtgagtggatcccattgcacaccccccccaccttaccatgcggatccatctctggtcaggacctggggcccctag

SEQ ID NO: 26850 - DNA, 1668 bp, synthetic construct
  misc_feature 1..1668: note = Description of Artificial Sequence: Synthetic coding sequence
  source 1..1668: mol_type = other DNA
atggcccagagcaccgccaccagccccgacggcggcaccaccttcgagcatctgtggtcgagtctggagcctgacagcacgtacttcgacctcccacagtcatctagagggaataatgaggtcgttgggggtacagacagctctatggacgtgttccacctggaggggatgaccacatcggtaatggcccagtttaacctgctgtcatccaccatggatcagatgagcagtagagcagccagcgcgtcaccatacacgcccgaacacgccgcatctgtgcccactcattctccatatgcccagccctcgtccacctttgacacgatgtcaccagcgccagtgatcccatcaaacaccgactaccccggaccgcaccacttcgaggtcaccttccagcagtcttctacggccaagagtgcgacttggacctactcacctttgttgaagaagttatactgtcagattgcaaagacatgccccatacaaattaaggtgtccactcccccgccgcccggaaccgcgatcagggccatgccagtgtacaaaaaagcagagcacgtgactgacgttgtcaagcgctgccccaaccatgaacttgggcgggattttaatgaaggccaatctgctccagcctcgcatctcattcgcgttgagggcaacaacctttcacagtatgtggacgaccctgtgacaggccggcagagcgttgtggtcccctacgagccgccgcaggttggaaccgagttcacaacaatactatataatttcatgtgtaacagctcctgcgtaggtgggatgaatcgtcggcctattctgatcattattacgttggaaatgagagacggtcaggtgctaggcagaaggtctttcgagggccgcatttgtgcttgccccggccgagataggaaggctgatgaagaccattacagagagcagcaagctctcaacgagtctagcgcaaaaaacggggccgcatcaaagcgggcatttaagcagtcccctcccgccgtgcccgctctaggtgctggagtaaagaaaagacgacacggggacgaggatacttactatctccaggttcggggccgcgagaattttgagatcttgatgaagctaaaagagtctctcgagctgatggaactggtgccacagcccctggtggattcgtaccggcaacaacagcagctgctccagagacctcctcgcgacgctcagcaaccctggccgaggagtgcaagtcaaaggagggacgaacagcagccgcagcgtcccgtccatggactcggcgtcccactacacagcgcaacccccttgcccaggcggccccagccgaggcaggatcttggggccctgaaaattcccgagcagtatagaatgacaatttggcgtggactccaggacctgaagcagggccatgactactccactgcccagcagctgttgcgaagctccaatgctgccactatatcaataggaggatccggagagctgcagcggcagcgagtcatggaggcggtccacttccgtgtacgccacactataaccatccctaataggggtggccctggtggtgggcctgatgagtgggctgatttcggtttcgacctgcctgactgtaaggcgcgcaagcagcctattaaggaggaatttacagaggccgagatccactag

SEQ ID NO: 26851 - DNA, 1281 bp, synthetic construct
  misc_feature 1..1281: note = Description of Artificial Sequence: Synthetic coding sequence
  source 1..1281: mol_type = other DNA
atgctgtacgtgggcgaccccgcccggcacctggccaccgcccagttcaaccttctgagcagtacaatggatcaaatgagcagccgcgcggcttctgcttccccctacactccagaacacgctgcgtccgttccgactcacagtccgtatgctcaaccgtccagtacttttgacactatgtcccccgcacccgtcattccctcaaatacagattacccaggtcctcatcacttcgaggtaactttccaacaaagctctacagccaagtcagccacttggacatacagccctctactgaaaaaactgtattgccaaatcgctaagacctgcccaatccagatcaaggtcagcaccccccccccccccggcaccgctattcgggccatgcccgtctacaaaaaagcggagcacgtgaccgacgtggtgaaacggtgtccgaatcacgagctgggtcgagacttcaatgaaggccaatctgcacctgcaagccacttgatcagagtcgaaggtaacaatttatcacagtacgtcgacgatcccgtcacggggcggcagtccgtggtcgttccctacgagcctccccaggtggggacggaattcaccacgattctctacaacttcatgtgtaattcttcctgcgtcggcgggatgaatcgtagacccattctaattataatcacactggagatgagagatggtcaggtgctgggacggagaagctttgagggccggatctgtgcttgtccaggccgggataggaaggccgacgaggaccattatcgcgagcagcaggccctcaatgagagctctgcaaaaaatggcgctgcttccaaacgtgcgtttaagcagtccccacccgctgtgccagcactcggcgcaggtgtgaagaaaagaaggcatggcgatgaggatacctactacctccaggtcagggggcgcgagaacttcgaaatcctgatgaaactaaaagaaagtctggagctcatggagctcgtccctcagcctctggtggacagttataggcaacagcagcagttactgcagcgcccaccgcgcgacgctcagcaaccttggccgcggagcgcctcccaacgcagagatgagcagcagccacagaggccagtgcacgggcttggggtccccctgcactcagcaaccccgctgcctcgaaggccccagcctcggcaatttttcaaccggattggggtgagcaagctacatcgggtttttcatctgccacgcgtgacagagcacctcccaccagctgagccagatcactag

SEQ ID NO: 26852 - DNA, 1353 bp, synthetic construct
  misc_feature 1..1353: note = Description of Artificial Sequence: Synthetic coding sequence
  source 1..1353: mol_type = other DNA
atgctgtacgtgggcgaccccgcccggcacctggccaccgcccagtttaaccttctgtcctcaaccatggaccagatgtcatctcgggctgcctctgcatccccctacacacccgagcatgcagccagtgtaccaactcacagcccgtatgcgcagccctcttcaacctttgatacgatgtcccccgccccagtgattccttccaataccgactaccccggtccccaccactttgaggtaaccttccagcagagctcgaccgccaagagtgccacatggacctactcaccattactgaaaaaactctactgtcagattgcaaaaacgtgccctatccagatcaaggtcagcacacctccaccacccggaaccgccattagagccatgccagtgtacaaaaaggctgaacatgtgactgatgtcgttaagcgatgccccaaccatgaactgggcagagacttcaacgagggtcagagtgccccagcgagccaccttataagagtggaaggcaacaatctctcccagtacgtcgacgaccctgttactgggaggcagtcagtcgtggtgccgtacgaaccaccgcaggtcggtacagaattcacaaccatcctgtataatttcatgtgtaattctagctgcgtgggcggcatgaatcgcagacctattttgataatcattactctggagatgcgcgacggccaggtactcggacggaggagtttcgagggtcgcatctgtgcgtgtcccggcagagatcgaaaggcagatgaggaccattatcgggagcaacaggcacttaacgagagtagtgcgaagaatggcgccgcctcaaagagagccttcaagcaatctccacctgccgtgcctgcactgggggcaggcgtaaaaaagcgcaggcacggtgatgaagatacatattacctacaggttcgcggcagggagaactttgaaatcttgatgaagctaaaggaatcactagagcttatggagctggtgccacagccgctggtggattcttaccgtcagcaacagcagctcttgcagcgaccttctcatctacagcccccgagttacgggcccgttttgtcccctatgaacaaagtgcacggcggaatgaataagttgccatcagtgaaccaactggttggccagccgcccccacattctagtgcggccactcctaacttagggccagtgggaccagggatgctcaataatcatggacacgcggtgcccgcgaatggagaaatgtcttccagccatagcgcacagagcatggtttccggctcccattgtacgcctccacccccttatcatgcagacccctcccttgtgcggacatggggcccgtag

SEQ ID NO: 26853 - DNA, 1764 bp, synthetic construct
  misc_feature 1..1764: note = Description of Artificial Sequence: Synthetic coding sequence
  source 1..1764: mol_type = other DNA
atgctgtacgtgggcgaccccgcccggcacctggccaccgcccagttcaaccttctctctagcactatggaccagatgagtagcagagccgcctcggctagcccttacacccccgaacatgctgcatcagtcccaacccatagcccgtatgctcaaccttcctctacatttgacactatgagtcccgcacctgtgattcccagcaacacggattatccgggaccacatcacttcgaagtcacgtttcagcagagtagcacagccaaatccgctacatggacatactctcctctcctaaagaagctatactgccaaatagcaaaaacctgtcctattcaaatcaaggtttctactccccccccacccggtaccgcaattcgggccatgcccgtttataaaaaggctgaacacgttactgacgtggtgaaacggtgtccaaatcacgagctcggccgggatttcaacgagggtcagagtgcgccggcttcacacttgattcgagtggaaggcaacaatttgtcccagtatgtggatgatccagtcacaggacgacagtctgttgtagtcccttacgagcccccccaggtgggaacagaatttaccacgattctgtataacttcatgtgcaattcgagttgtgtggggggaatgaatcggcgtcctattttgatcattattaccctggagatgagggatggacaggtgttaggccgtagaagctttgagggacgaatttgcgcgtgtcctggtagagaccgtaaagcagacgaagatcactaccgggaacagcaagccctgaatgaatcttccgccaaaaatggagccgcgtcaaagcgggcttttaagcagtcccctcccgccgtccctgctctgggcgctggtgtgaagaaaagacgtcacggagatgaggacacttattatctacaggtgcgcggtagagagaactttgagattctaatgaagttgaaagagagcctcgagctgatggaactggtgccgcaaccacttgtggactcttacagacaacaacaacagctgctgcagcgtccttctcatctgcagcccccctcctatggccccgtgttaagccctatgaacaaagtgcacggagggatgaacaagttgccatccgtcaatcagttggttggccagcctccccctcattctagcgcagccactcctaacctgggccctgttggcccaggcatgttgaacaatcatgggcacgctgtgccagctaacggcgaaatgtcatcctctcatagcgcgcaatccatggtatctggctcgcactgtaccccaccgcctccgtaccacgccgacccctctctcgtgagctttctcacagggcttggatgcccaaactgcatcgagtactttacatcccagggcctccagtcaatttatcacttacaaaatctaacaatagaggatctcggcgcactgaagattccagaacagtataggatgacaatctggagaggcctccaggatctgaagcagggtcacgactatagtactgcgcagcaacttctcagaagtagtaacgcagcaactatttctatcgggggcagcggggagctgcagcggcaacgggtgatggaggccgtgcactttagggtgcggcacacaattaccattcctaacagaggcggccctggcggcggtcctgacgagtgggccgattttggtttcgacttacccgactgcaaagccagaaaacagcccataaaagaggagttcaccgaggccgagatccactag

SEQ ID NO: 26854 - DNA, 1698 bp, synthetic construct
  misc_feature 1..1698: note = Description of Artificial Sequence: Synthetic coding sequence
  source 1..1698: mol_type = other DNA
atggaccagatgagcagccgggccgccagcgccagcccctacacccccgaacacgccgcaagtgtgccgacgcacagcccttacgcccaaccatctagcacctttgacactatgagccccgcccctgtaataccttccaataccgattatccaggcccccaccactttgaggtcacctttcagcagtcaagcaccgcaaaatccgccacttggacatacagtccgctactcaaaaaactctactgccagattgccaagacctgcccaattcagataaaagttagtaccccaccccctcctggaactgccataagagcaatgcctgtatataagaaagcagaacatgtcactgacgttgtaaagcggtgccctaaccacgagctgggccgcgattttaatgaggggcaatctgcaccagcgagtcacttgatacgcgtagagggtaataatttatcccagtatgtcgacgaccctgtaacaggcagacagagcgtggtggtgccctacgagcctccgcaggtgggaactgaattcacaactatattgtacaactttatgtgtaactccagctgcgttgggggcatgaaccggcgcccgattctcattatcataaccctcgagatgagggatggccaagttctcggaagacggtcgtttgagggaagaatctgcgcctgccctggtcgtgacagaaaggccgacgaggaccactacagagagcagcaggcactgaatgagagtagcgcgaaaaacggggccgccagtaaaagggcttttaaacagagtccgcctgctgtccctgctctgggcgctggcgtgaagaaaagaagacacggggacgaggatacgtactacttgcaggtgcggggcagagagaactttgaaattctgatgaaattgaaagagagcctggagctgatggagctggtcccacagcctctggtggacagttatcgccaacagcagcaactgcttcagcgacccagtcacttacaacctcccagttacgggccagtactgtccccaatgaacaaagtacacggcggtatgaataaactgccttccgttaatcagcttgtgggacagccacccccacacagttccgctgcaaccccaaacctgggccctgttggtccaggaatgctcaataatcacggacatgcagttcccgccaacggggagatgtcaagttcacatagcgcgcagtctatggtatcgggatcccattgcaccccccctcccccataccacgcggacccatcgttggtgtctttcctgaccggactcggctgccccaactgcattgagtactttacatctcaaggattgcagagtatttatcatctacagaacctcaccattgaagaccttggtgccctgaagatccctgaacagtaccgcatgaccatctggcggggcctacaggacctgaagcaaggtcatgattattctactgcacagcagctcctgcggagctcaaacgcggccacgatatccattggcggatcaggggagctgcaacggcagagggtcatggaggcggtacattttcgagtcagacatactattaccattccaaatagagggggaccaggaggaggaccagatgaatgggcagacttcggctttgatttgcctgattgtaaagccaggaagcaacctattaaggaggaatttaccgaagccgaaatacactag

SEQ ID NO: 26855 - DNA, 1911 bp, synthetic construct
  misc_feature 1..1911: note = Description of Artificial Sequence: Synthetic coding sequence
  source 1..1911: mol_type = other DNA
atggcccagagcaccgccaccagccccgacggcggcaccaccttcgagcacctgtggtcatccctcgaacctgacagcacatatttcgaccttccacagagctctagggggaacaatgaggtcgtcggcggcacggactctagtatggatgtctttcacttggagggcatgactacttccgtcatggctcagtttaatctgcttagctccactatggatcaaatgtcttctcgcgcggcgtccgcctccccttatactcctgagcatgcagcctccgtcccaactcactccccatatgcccagccatcctctacattcgatacaatgagtcctgcaccagtgattccgtctaacaccgactaccccggcccccaccattttgaggtgacatttcagcagagctcaaccgctaaatcggcaacctggacctactccccgttgctcaaaaagctttactgccagattgctaaaacgtgcccaatccagatcaaggtgtctaccccccccccaccgggcactgctatcagggccatgccagtttataaaaaagctgaacatgttaccgatgtggtgaagcggtgccctaatcacgagctgggtagagactttaatgaaggtcagagcgcaccagcttcacaccttatcagagtcgaaggcaacaacctgagtcaatatgtggacgaccctgtgactggtcgacagtcagttgtcgtgccttatgagccgcctcaggttggcacggaattcaccactattctgtacaattttatgtgtaacagcagctgcgttggaggcatgaatcgacggcccatcctcatcatcataactcttgagatgcgggacggccaggttttgggccggcggagcttcgagggtcgtatctgcgcctgtccggggagagaccgcaaagcagatgaggatcactatcgcgagcagcaggcactcaatgaatcatctgccaagaatggggcggcctccaagagagcctttaaacaaagcccacctgccgtgcctgccttaggcgccggcgtgaagaaaaggaggcatggagacgaggatacctattatctgcaggtacgaggtcgggaaaactttgaaattcttatgaagcttaaagaaagcctggagctgatggaactggtgccccaaccattagtggattcctaccggcaacagcagcaactgctgcaaaggccaagccatctgcagccacccagttacggaccggtgctgagtcctatgaataaagttcacgggggcatgaataagttaccttcggtcaatcagctcgtcggacagcctcctcctcactcctcggctgcgacccctaaccttggcccagtgggtccaggcatgctcaacaatcatggccacgctgttccggccaacggagaaatgtcatcaagccatagcgcacagagtatggtgtccggctcacactgcactcctccgcctccctaccacgccgacccatcactcgtaagtttcctaactgggctgggctgtcctaactgtattgagtattttacctcgcagggcctgcagtcaatctatcacctccaaaatctcacaatcgaggacctgggagcattgaaaatccccgaacagtaccggatgactatctggcgaggtctacaggatctgaagcagggccatgactatagcactgctcagcaactacttagatccagtaacgctgctaccatcagtattggcggaagtggcgaattacagcggcaacgcgtgatggaagcagtacacttcagagtgcgacacaccatcaccatacccaatcgaggtggtcccggtggtgggcccgatgagtgggccgattttggctttgacctaccggactgcaaagctcgtaagcagcccatcaaagaagagtttacagaggctgagattcattag

SEQ ID NO: 26856 - DNA, 1053 bp, synthetic construct
  misc_feature 1..1053: note = Description of Artificial Sequence: Synthetic coding sequence
  source 1..1053: mol_type = other DNA
atgggcgccggcgccagcgccgaggagaagcacagccgggagctggagaaaaagctgaaggaggatgccgaaaaggacgccaggacggtgaaactgctactccttggtgctggcgaatctggcaaatctacaattgtgaaacagatgaaaatcatacaccaggatggctacagtctggaggagtgccttgaatttattgcgattatctacggcaatacactgcagtcaatcctggcaatcgtgagagccatgacaacattaaatatccagtacggcgactccgcccgccaggacgacgcaaggaagcttatgcacatggctgacaccatcgaggagggaaccatgcctaaggaaatgtccgatatcatccaacgcctgtggaaggattctggcattcaggcctgtttcgaaagggctagtgagtatcaactgaatgatagtgctggctattacctcagcgatctggagcgcctggtaactccggggtacgtgccaacggagcaagatgtgttacggagccgggtgaaaaccacaggcattatcgaaacccagtttagcttcaaggacctgaacttccgcatgttcgacgtggggggccagagatccgagcgcaagaagtggattcattgtttcgagggtgtaacatgtattatctttatcgctgcactgagcgcatacgacatggtgctcgtggaagacgatgaggttaatagaatgcatgagtcgctgcacctatttaatagcatctgtaaccatcgctacttcgcaacaactagcatagtgttgttcctgaataaaaaagacgtgtttttcgagaagatcaagaaggcccatctgagtatctgtttcccggactacgacgggcctaacacctacgaagatgctgggaattacatcaaggttcagttcctggaactgaatatgaggagggacgtcaaagagatctatagccacatgacctgtgcaaccgacacccagaacgtgaaattcgtgtttgacgccgtaactgacataatcataaaggagaacctgaaggactgtggactcttctag

SEQ ID NO: 26857 - DNA, 609 bp, synthetic construct
  misc_feature 1..609: note = Description of Artificial Sequence: Synthetic coding sequence
  source 1..609: mol_type = other DNA
atgatgcaggacgtgagcagcagccccgtgagccccgccgacgactctctgagtaactctgaggaagagccggaccggcaacagcctcccagcggcaaaaggggggggcggaagcgaaggtcaagtagacggtccgctggtggaggagcagggccaggcggcgctgccggtggtggggtcggcggtggagacgaaccaggatcgccagctcagggcaaaagaggaaaaaagagcgccggctgcggtggaggtgggggcgccgggggcggcggtggatcctcctctggaggcggcagtccgcagtcctacgaagagttacagacacagcgtgtcatggccaatgttcgagaaaggcagagaacacagagcttgaatgaggcattcgccgccctccgcaagattatacccactcttccctccgacaagttgtctaagattcaaacattgaagctagcggccagatacatcgacttcctgtaccaggtactgcaatccgatgagctcgactcaaagatggccagttgcagttacgtggcacacgaacgcctgagctacgcgttctctgtctggcggatggaaggggcatggtcaatgtccgcctcgcattag

SEQ ID NO: 26858 - DNA, 741 bp, synthetic construct
  misc_feature 1..741: note = Description of Artificial Sequence: Synthetic coding sequence
  source 1..741: mol_type = other DNA
atgggcgaccgggagcagctgctgcagcgggcccggctggccgagcaggcagagcgctatgatgacatggcctcagccatgaaagccgtaacagaattgaacgaacccctttccaatgaagacagaaatctactgtccgtggcctacaagaacgttgtaggcgcccgaagaagttcctggagagtgatctcctctatcgaacaaaaaacgatggctgatggtaatgaaaagaaactcgaaaaggtgaaagcttacagagagaaaatcgagaaagagcttgagacggtgtgcaacgatgtcctttccctcctggataaatttctcatcaaaaactgtaacgattttcaatatgagagtaaagtgttctatcttaaaatgaagggggactactacaggtatctggcagaggtcgccagtggcgagaagaaaaattccgtggtggaggcttcagaagccgcctataaggaggcattcgagatctctaaagaacagatgcagccaacccacccaattcggctgggtctcgcccttaatttctctgttttttattacgaaatccagaacgccccagagcaagcctgtctcctcgcgaagcaggcctttgacgacgccatcgccgagttggataccctaaacgaggactcttacaaggactccaccctcattatgcagttactccgagacaatttaaccctgtggaccagcgatcagcaggacgaggaggcaggcgaaggaaattag

SEQ ID NO: 26859 - DNA, 1626 bp, synthetic construct
  misc_feature 1..1626: note = Description of Artificial Sequence: Synthetic coding sequence
  source 1..1626: mol_type = other DNA
atggtgtggcgggtgccccccttcctgctgcccatcctgttcctgggtacgcactaccagctggatgtacagttgtaccactgtacccttctgggcccagcaagcccacccgcccatgtcctgttgccccccagtggcccccctgcacctcgacatctccatgcccaggccctgtctgattccgaaatccagcttacttggaaacaccccgaggcgctgcccgggcctatttccaaatacgtggtcgaagtccaggtagcaggcggcgcaggcgaccctctgtggatcgacgtcgataggccagaggagaccagcaccataattcgcggcttgaacgcctccactaggtacttattccgaatgcgtgcgagcatccagggtcttggtgactggagtaataccgtggaggaaagtacgctgggcaatgggcttcaagccgagggacctgttcaggagtcccgcgccgccgaggagggactggatcagcaacttatcttggccgtcgttggaagcgtctcggcgacctgtctgactatcctggccgcccttcttactctggtgtgcatccgccggtcttgtctacacagaaggaggaccttcacctatcagtccggtagcggtgaagagacaatcctgcagttctcttccggtacgctgacgctgacaaggagacctaaactgcagcccgagcctttaagttaccccgtcctcgaatgggaggacattacgtttgaggacctgatcggagaaggcaactttgggcaggtgatcagagcaatgattaagaaggacggcttgaagatgaacgccgccatcaaaatgcttaaagagtatgcctccgagaatgaccaccgggacttcgccggggagctcgaagtcctgtgcaaacttggacaccacccaaacattataaatctcttgggcgcatgtaagaatagaggttacttgtatatcgctatagagtacgcgccttatggaaatctgctcgacttcctccgcaagtccagggttttggaaacggaccctgcatttgcgcgtgagcatgggacagcatccacactttccagtaggcagctgctgagatttgcatccgacgccgcgaacggtatgcagtatctgtctgagaagcagtttatacatcgtgacttagcagctcgcaatgtcctggtgggcgagaacctggcgtccaagattgctgattttggactgtcccggggcgaagaggtgtatgttaaaaagaccatgggtcggctccccgtccggtggatggcgatagagtctctgaactacagcgtgtatactaccaagtcagatgtctggagtttcggcgtgctgctgtgggaaatcgtgagcctggggggcactccgtactgcggtatgacctgcgccgaactgtatgagaaacttccacaaggctaccggatggagcagccgcggaactgtgacgatgaggtgtatgagctgatgaggcagtgttggcgggaccggccctacgagaggccacccttcgcacagatcgcgctgcagctaggccggatgctggaggcacgaaaggcatatgtgaatatgtcactgtttgagaactttacttatgcgggcatcgatgctacggctgaggaagcttag

SEQ ID NO: 26860 - DNA, 3417 bp, synthetic construct
  misc_feature 1..3417: note = Description of Artificial Sequence: Synthetic coding sequence
  source 1..3417: mol_type = other DNA
atggtgtggcgggtgccccccttcctgctgcccatcctgttcctggcctcacatgtgggcgccgcagttgatctgactcttctggccaatctcaggctcaccgaccctcagcgcttcttcctgacctgcgtgagtggggaagccggcgccgggagggggtccgacgcatggggcccccctctgttattggaaaaagacgatagaatcgtgcgtacgccacctgggcctccgttgcgccttgcaagaaatggcagtcaccaggtaactctgaggggtttctccaagcccagtgatcttgtgggcgtttttagctgtgtggggggtgcaggagcaaggagaactagggttatctacgtccataatagcccaggtgcgcacctgctgccagacaaggtgacacacactgtcaataaaggagacacagcggtgctgagcgcacgggtgcacaaggaaaagcagaccgacgtcatatggaagtccaacggcagctatttctataccctggattggcacgaagcccaggatgggcggttcctcctgcagctgcctaacgttcagccaccctccagtggtatctatagcgcaacttatctggaagctagccctctgggaagcgcattcttcaggctgatcgttagagggtgcggtgccgggaggtggggaccaggatgcaccaaagagtgcccaggctgcttgcatgggggtgtgtgtcatgatcacgacggagagtgcgtttgccctccagggtttacggggaccaggtgcgagcaagcctgtagggagggcaggtttggccagtcctgccaggagcagtgtccaggtatttcagggtgtcggggattgacgttctgtttgccagatccctatggatgctcttgcgggagtggttggaggggctctcagtgccaggaagcctgtgctcctgggcacttcggagctgactgtcgcctacagtgccaatgccaaaatggagggacctgcgacaggtttagtggttgcgtgtgcccctccggctggcatggagtccactgtgaaaaatccgatcgcattccccaaatcctcaacatggcgtcagaactggaattcaacttggagaccatgcctcgtatcaattgtgctgctgccggaaaccccttccccgtccggggctccatcgagctcaggaaacccgacggcacagtactgctctctactaaagccatcgtggaacctgaaaagactacggcagagtttgaggttccaaggctagttttagccgatagcgggttctgggagtgccgcgtgagtacctcaggggggcaagactctcggaggttcaaagtgaacgtaaaggtgcctcctgtgcccttggcggcccccagactcttgaccaagcagtcgcgccagctggtggtttctccactggtgtcatttagtggggacggcccaatttcgaccgtgcgtctacactacaggccccaagatagtactatggactggagtactatcgtggtggatccctccgaaaatgtaacattgatgaatcttcgaccaaaaaccggatactctgtacgagtccagctgagcagaccaggcgagggcggcgagggagcctggggaccaccaactttaatgactacagactgcccggagcccttgctgcagccatggctcgagggctggcacgttgaaggaacagataggctgagggtctcctggagcttacccctcgtgcccggccccctagtgggggatggatttctacttcgcctctgggacggcacgaggggccaggaacggagggagaacgtgtcttcccctcaggccaggacagccttactcaccgggttgactcctgggacacattatcaattggatgtccagctgtaccattgtacgctgcttgggcctgcatctccacctgcccatgtgctgctaccaccctcgggcccgcctgcccctcgccacctccacgcccaggccctgtctgatagcgagatccaattaacttggaagcatcctgaagcactgccggggccaatctccaaatatgtcgtggaggtgcaagtggccggaggagccggggatcctctttggattgatgtggacaggcctgaagagacctccacaatcatcaggggcctcaacgcaagtacccgctacctctttcgcatgcgcgcgtccattcagggtctgggagactggagcaacaccgtggaggagtccacattgggaaatgggctccaagccgaaggccccgtgcaggagagtcgcgccgcggaggaaggacttgaccagcagctcatactagcggttgtggggtccgtgtcggctacctgtctgacgatactcgctgctctgcttacccttgtttgcattcgtaggagctgtttgcaccgcagacggaccttcacgtaccaatcaggcagcggcgaggaaaccatcctgcagttttctagtggtacgctcacgctcacaagacgtcccaagctgcaacccgaacctctcagttatccagtactcgagtgggaagatataaccttcgaagatctgatcggcgaagggaactttggacaggttatccgtgctatgatcaagaaggacggcctaaagatgaatgccgccattaaaatgctgaaggagtacgccagcgagaatgaccaccgagactttgccggcgagctggaggtgctgtgcaagctgggacaccacccgaacataattaatctgctgggcgcgtgcaagaaccgaggctacctgtacatcgccattgagtacgccccatatggtaatctgctggactttctgcggaagtctagagttctggaaaccgatcctgcctttgccagggagcatggcaccgcgtccactctatcatccagacagctgcttaggtttgcatccgatgccgctaatggcatgcagtacttaagtgaaaagcagtttatccacagagacttggccgcacgtaatgtcttggtcggggagaacctggcttccaagatcgcggattttggcctgtcaaggggagaggaggtttatgtcaaaaagaccatgggccgcttgcctgtgaggtggatggcgatcgaaagtctgaattactccgtatatacgacaaaatccgatgtctggtcctttggcgtgttgctgtgggagattgtgtcgttgggcggcactccgtactgcggtatgacctgtgccgaactgtacgagaaattaccacagggctaccgcatggaacaaccgagaaattgcgacgacgaggtctacgagctgatgaggcagtgttggagagataggccgtacgagcgcccaccatttgcccagattgcactgcagcttgggaggatgttagaagctagaaaagcatacgtcaatatgagtctgttcgagaactttacgtatgctggaatcgacgctacagcggaagaggcttag

SEQ ID NO: 26861 - DNA, 2352 bp, synthetic construct
  misc_feature 1..2352: note = Description of Artificial Sequence: Synthetic coding sequence
  source 1..2352: mol_type = other DNA
atggccagcgagctggagttcaacctggagaccatgccccggatcaactgtgcagcggcagggaatcctttccctgtgaggggctcaatcgaactgcgtaaacccgacggtacagtgctgttatcaaccaaggctatcgtggaaccagaaaaaaccactgcggaatttgaagtcccaaggctggtgctagctgactcagggttctgggagtgcagggtctctactagcggcgggcaggacagtcggcgtttcaaagtgaacgtgaaggtaccgcctgttccgttagcagcccctaggctcttgactaagcaaagcaggcagctcgtagtttcaccactggtgtctttctcgggggacggtccaattagtacagtccggctccattatagacctcaggatagcaccatggactggtcgactatcgtggttgacccctccgagaacgtgacactgatgaatttgcggcccaaaactggctatagtgttcgagtgcaactctcccgtcccggagagggcggcgagggagcctggggcccccctacactcatgaccactgactgccccgaaccactgcttcagccctggctggaaggctggcacgttgaagggacagaccgcctccgggtcagttggtcactacctttggtgccgggaccactggtgggagatgggttcctgctccggctttgggacggcacacgtggccaggagagacgggagaacgtgagcagtccacaggcccgcaccgcactgctcacaggcctgacccccggcacacactaccagttggatgtgcagctctaccactgtaccctgctggggcctgcttctccccctgcccacgtcttgctgcctcctagcggtcctccagctcctcggcacctgcatgcacaggctctatcagactcagagatacagctaacctggaaacatccggaggccctgccgggaccaatatcaaaatacgtggtcgaagtgcaggtagctggcggggctggcgacccactgtggatcgacgtcgaccgacccgaggagacctctaccattatcaggggcctgaacgcttccacgcgttatctgttccgcatgagggccagcattcaggggctgggagactggagcaacaccgttgaagaatctacgctgggtaatggcctgcaagcagaagggccagttcaagaaagccgggccgcagaagaaggactcgaccagcaactgattttagccgtggtgggatcagtcagcgccacctgcttgacaattctcgccgcgctgctcactttggtgtgcatccggcgctcctgcctgcaccgacgaaggacctttacataccagagcggaagcggagaagaaactatcctgcagttttctagtggcactctgacgttaactcgtcgtcccaaactacagcctgagccactctcgtaccccgttctcgaatgggaggacataacctttgaggatctgattggggaggggaactttggacaagtgatccgggcgatgatcaagaaggatggacttaaaatgaacgccgccatcaaaatgttaaaggagtacgcttcagaaaacgaccaccgggacttcgcaggggagctggaggttttgtgcaaacttggccatcacccgaacatcatcaacctcttaggggcgtgcaagaatcgcgggtacttgtacatcgctattgagtatgccccatatgggaatctgctcgacttcctgagaaaaagtcgggtgctggagactgaccccgccttcgcaagagaacacggaacagcaagtacccttagctcgaggcagctcctccgctttgcctcagatgctgcgaatgggatgcagtatttatccgaaaaacagttcattcatcgggacctggcagcaaggaacgttttggtcggagagaacctggcctcaaagatcgccgattttggtctttctagaggagaagaggtctatgtgaaaaaaaccatgggcaggctccccgtgaggtggatggctatcgaaagtctgaactatagtgtctacaccactaaaagcgatgtctggtccttcggcgttctcttatgggaaatagtgtctctgggcggaacaccttattgcgggatgacctgcgccgaactgtacgaaaaactgccccaggggtataggatggagcagcccagaaactgcgacgatgaagtgtacgaattaatgcgtcagtgttggcgggatcgcccgtatgagcggccaccttttgcccagatagcactgcagttggggcgaatgctggaggctcgtaaggcttatgtgaacatgtctctcttcgagaacttcacatacgctgggatcgatgctacagctgaggaagcttag

SEQ ID NO: 26862 - DNA, 954 bp, synthetic construct
  misc_feature 1..954: note = Description of Artificial Sequence: Synthetic coding sequence
  source 1..954: mol_type = other DNA
atggtgtggcgggtgccccccttcctgctgcccatcctgttcctggcctcacacgtcggcgccgccgttgacctcaccctgctggccaacctgcggctcaccgacccgcagaggttcttcctgacttgcgtgtccggggaagcaggtgccggccgcggcagtgacgcatgggggcccccacttctgcttgaaaaagatgacaggatagtgagaacccccccagggcccccattgcgactggctcgaaatggaagccaccaggtcacccttaggggattcagcaagcccagtgacttagtcggtgttttttcttgcgtgggcggagccggagcacgacggaccagagtgatctacgtgcacaactccccaggagcccatctgctgcctgacaaagtgacacacactgtcaacaaaggggacaccgccgtcctatcagcaagagttcacaaggagaaacaaacagatgtaatctggaagtctaacgggagttacttttatacgctggactggcacgaagcccaagatggtagatttttgttgcaactgcccaacgttcagcctccgagttccggcatttactcagccacttatttagaggcgagtcctctgggttccgcttttttccggctgatagtgcgggggtgtggcgccgggaggtggggtccaggctgcacgaaagaatgtcctggatgtctgcacggtggcgtttgccacgaccacgacggagagtgtgtctgccctcccggcttcactggaactcgatgcgagcaagcctgcagagaggggaggttcggacagagttgccaagaacaatgtccagggatcagtggctgccgtggtctgactttctgtctgcctgacccctacggctgttcatgtggatcaggctggcgcggctcacagtgccaggaggtgcaccagggccactgcggggctagggaagaccatagctag

SEQ ID NO: 26863 - DNA, 1266 bp, synthetic construct
  misc_feature 1..1266: note = Description of Artificial Sequence: Synthetic coding sequence
  source 1..1266: mol_type = other DNA
atgcgggccagcatccagggcctgggcgactggagcaacaccgtggaggagtctactctgggtaacggcttgcaggctgaaggaccagtgcaagagagtagggcagccgaagagggacttgatcagcagttgatactcgcggtcgtgggctctgttagtgcaacatgcctaacaattctcgctgctctgctcacactggtctgcatccgaagatcctgtctgcataggcgacggacatttacataccagtctggcagtggcgaagaaacaatcctgcagttctctagcgggactctgacactgactcgccgccccaaactccaacccgaaccattgagctatcccgtgctcgagtgggaggatattacttttgaagacctgattggggaaggtaatttcggtcaggtgattcgggccatgatcaagaaggacggcctgaaaatgaacgcagctatcaaaatgctgaaggagtacgcctctgaaaacgatcacagagattttgcaggcgaactggaggtgctttgcaaattgggtcatcaccctaacataattaatctactgggagcttgtaaaaatcggggttatctgtacattgccatcgagtacgccccgtacggaaatctgcttgactttctgaggaagtccagagttctggaaacagaccctgctttcgcaagggagcacggcactgcttctactctaagctctcgccagctattgcggttcgccagcgatgccgccaacggcatgcagtatctgtcagaaaagcagtttatccatcgggacctggcagcccgcaatgtgctcgtcggagaaaacctagcaagtaaaatcgccgatttcgggctgtccagaggggaggaggtgtacgtcaagaaaacaatgggccgcttgccagtgagatggatggccattgagagcctgaattactccgtgtacacgacaaaatctgatgtttggtccttcggcgtgttgctctgggagattgtctccttgggaggcaccccatactgtgggatgacttgcgccgaactgtacgagaaactaccccagggctacagaatggagcagccaaggaattgtgacgatgaagtctacgaactgatgcggcaatgctggcgcgacagaccctatgaaagacctcccttcgctcaaattgctcttcagctgggtcggatgttggaagctaggaaggcctacgtaaacatgtcacttttcgagaatttcacctacgcaggcatcgacgctaccgccgaagaggcctag

SEQ ID NO: 26864 - DNA, 1140 bp, synthetic construct
  misc_feature 1..1140: note = Description of Artificial Sequence: Synthetic coding sequence
  source 1..1140: mol_type = other DNA
atggtgtggcgggtgccccccttcctgctgcccatcctgttcctggcctcccatgtcggtgcagccgtcgatctgactctcttggccaatctgaggctgactgacccccagagattttttctgacttgtgtgagcggcgaggctggggcgggacgtggaagtgacgcttggggcccccccctattgctagaaaaggacgaccggatagtgcgcacacctcccgggcccccattacgcttagctagaaatggaagccaccaggtcacgttaaggggcttttctaagccaagtgatctggtgggagtgttttcctgcgtcggaggggcaggagcccggcgtactagagtaatctacgtacataattctcctggggctcatcttctgcccgataaggttacgcataccgtgaacaaaggtgacacagccgttttatccgcacgcgtgcacaaagaaaaacagacagatgtgatttggaagagcaacgggagttatttctacacgcttgattggcatgaggcacaagatgggcgctttttactgcagcttccaaatgtgcaacctccctcctctggcatttactctgctacttacctggaagcctctccactcggatccgcattttttcgcctcattgttagaggttgcggagccggcaggtggggccctggttgtactaaagagtgcccaggctgcttacacggtggggtttgtcatgaccatgacggagaatgtgtgtgcccacccggttttaccggtacacgctgtgagcaagcatgcagggaaggccggttcggccagtcttgtcaagaacagtgccctgggatatccggctgtcgggggctgaccttctgtttgcccgacccctacggctgttcctgcggctccggatggcgcgggtcccagtgtcaggaagcatgtgcccctggacatttcggcgccgactgtcgcctacagtgccagtgccaaaacggcggcacgtgtgatagattctctggctgcgtctgcccaagcggctggcacggcgtccactgcgaaaagtcaggctggagagattgggtcgatacctccacagagaaacagaatactgatgagggaaggtttgggggacatgtcagcgcccctgtaggggctcccggttag

SEQ ID NO: 26865 - DNA, 819 bp, synthetic construct
  misc_feature 1..819: note = Description of Artificial Sequence: Synthetic coding sequence
  source 1..819: mol_type = other DNA
atggccctgctggtgcgggtgctgcggaaccagaccagcatcagccagtgggtccctgtatgcagccgcctcatccctgtgagccctactcaggggcagggggatcgagctctgagcagaacttcccagtggcctcagatgtcccaatctagagcctgcggaggatccgaacagatcccaggtatagatatccaattgaatcgaaagtaccataccacccggaagttatcaaccaccaaggacagtcctcagcccgtggaagaaaaggtcggggccttcacaaagattattgaggctatgggcttcaccggccccctgaagtaccgctgccagatgccagatacctttaacagctggttcctgatcactttactgcacgtgtggatgtgcctggtgagaatgaagcaggaagggcggtctggcaaatatatgtgccgaatcatcgtgcactttatgtgggaagacgttcaacaaaggggccgggtcatgggggtgaacccatacatattgaagaagaatatgatcttgatgactaaccacttttatgccgccattctcgggtatgatgaaggcattttgtctgatgaccacggtctggcagccgctctgtggcgaacatttttcaatcggaaatgtgaggatcctagacaccttgagttgcttgtggaatacgttcgcaaacagattcaatacttggactccatgaacggtgaggatctccttctcacgggtgaggtgtcctggcgccctctggtggaaaagaatccgcagtccattttgaagccgcatagcccaacctacaacgacgagggcttgtag

SEQ ID NO: 26866 - DNA, 564 bp, synthetic construct
  misc_feature 1..564: note = Description of Artificial Sequence: Synthetic coding sequence
  source 1..564: mol_type = other DNA
atgcagcccatcgacacctgcgtgagctacccccggaccggcggccagggatccgtgtcccactttcccggctgccaaatgcccgatacctttaactcatggtttctgattaccctcctacatgtgtggatgtgcctcgtgcggatgaagcaggaaggcagatctgggaagtatatgtgtcgaattattgtacacttcatgtgggaggatgtccaacagcggggacgcgtgatgggcgttaacccttatatccttaaaaagaatatgatcctcatgaccaaccatttctatgcagctatcctgggatacgacgagggaatcctctccgacgatcatggactggcagctgccctgtggcgcactttctttaatagaaagtgcgaagatccccggcacttagagctactggtagaatatgtgagaaaacagattcagtatctagatagtatgaatggagaagatctcctgctaacgggcgaagtgagctggaggccgctcgtcgaaaaaaaccctcagagtatccttaaaccacatagccctacatacaatgatgagggtctctag

SEQ ID NO: 26867 - DNA, 696 bp, synthetic construct
  misc_feature 1..696: note = Description of Artificial Sequence: Synthetic coding sequence
  source 1..696: mol_type = other DNA
atggccctgctggtgcgggtgctgcggaaccagaccagcatcagccaatgggtacccgtgtgttcacggctgataccggtatccccaacccaggggcagggcgacagggctctgtccagaaccagtcagaaaatcaagattgctgctttgcggatgtatactagctgcgttgaaaaaactgatttcgaagaatttttcctcaggtgtcagatgcccgatacttttaacagctggttcttaataaccctccttcacgtgtggatgtgcctcgttagaatgaagcaggaaggacgtagtggcaaatatatgtgtcggataattgtgcatttcatgtgggaggatgtccagcagcgggggagagtaatgggtgttaacccgtacatcctgaaaaaaaatatgatcctcatgaccaaccatttctacgccgctatcctcggctacgatgaagggatactttcagatgatcacggcctggcagctgccttgtggcgcacttttttcaacagaaagtgtgaggatccacgtcacctggaactactggtggaatacgttaggaagcagatccaatatcttgacagtatgaatggcgaggatctgcttctgaccggcgaggtttcttggaggcccttggtggagaagaaccctcagtccattttaaagccccactctcccacttataatgacgaaggcctgtag

SEQ ID NO: 26868 - DNA, 822 bp, synthetic construct
  misc_feature 1..822: note = Description of Artificial Sequence: Synthetic coding sequence
  source 1..822: mol_type = other DNA
atggccctgctggtgcgggtgctgcggaaccagaccagcatcagccagtgggtacccgtctgttccaggctgatcccagtcagccccacccagggccaaggggatagagctctgtcgcggacttctcagtggccccagatgagccaatccagggcctgcggaggttctgaacaaattccgggcatcgacatccaactgaatagaaagtaccacacgacgcggaaactttccactactaaagactcaccccagcccgttgaggagaaggtgggtgcgttcaccaagatcatagaggctatgggatttactggtcctctgaagtatagtaaatggaagatcaagatcgccgcgcttagaatgtatacatcatgtgtggagaagaccgacttcgaagaattcttccttaggtgccagatgccagacacctttaatagctggtttctcatcaccctccttcatgtgtggatgtgtctggtgagaatgaagcaagagggtcggagtgggaagtatatgtgccgcatcatcgtgcacttcatgtgggaggatgtgcagcagcgcggtcgggttatgggtggaattctttccgacgatcacgggctggctgctgcactctggagaactttcttcaatcgcaagtgtgaggacccaaggcacttggagctgctcgtggaatacgtgcggaaacaaatccagtacttggacagcatgaacggcgaggaccttctgctgaccggagaagtttcctggaggccactggttgaaaagaacccccagtccatattaaagcctcattcccctacttacaatgacgagggtctgtag

SEQ ID NO: 26869 - DNA, 900 bp, synthetic construct
  misc_feature 1..900: note = Description of Artificial Sequence: Synthetic coding sequence
  source 1..900: mol_type = other DNA
atggccctgctggtgcgggtgctgcggaaccagaccagcatcagccagtgggttcccgtgtgctctcgacttatccccgtgagccctacacagggtcaaggtgatcgagctctctccaggacctcacagtggccccagatgagtcagtcacgtgcttgtggaggctcagagcaaatcccgggtattgatatccaactaaatcgaaaataccacactacacgaaagttgtcgacaacaaaggattccccccagcccgtggaagagaaggtgggcgcgtttacaaagataatcgaggctatgggtttcacggggcccctcaaatactctaagtggaagattaaaatcgctgcccttagaatgtacacaagttgcgtggagaagaccgatttcgaagaattcttcctcagatgtcagatgcctgacactttcaacagctggttcttgatcacactgctgcacgtgtggatgtgcctcgtcaggatgaagcaggaaggtcggtctgggaaatacatgtgcaggatcattgtgcatttcatgtgggaagacgtgcagcagcggggcagagtgatgggtgtcaacccatatatccttaaaaaaaacatgatactaatgaccaatcacttctatgctgcaatcctggggtacgatgagggtatcctgagcgacgatcatgggctcgcagccgccctctggagaacattctttaacagaaaatgcgaagaccccagacacctggagctccttgtcgagtacgtgagaaagcaaatccagtacctagattccatgaacggggaagacctcctcctgaccggggaagtcagttggcggcctctcgtggaaaaaaatcctcagagcattctaaagccgcactcacctacctacaatgacgaaggcctgtag

SEQ ID NO: 26870 - DNA, 603 bp, synthetic construct
  misc_feature 1..603: note = Description of Artificial Sequence: Synthetic coding sequence
  source 1..603: mol_type = other DNA
atgggcttcaccggccccctgaagtacagcaagtggaagatcaagattgcagccctgagaatgtacacctcctgtgtcgagaagactgactttgaagaattttttctgagatgccagatgcccgacaccttcaactcttggtttctcattaccctgctgcacgtgtggatgtgtctggtgaggatgaagcaagagggaaggtccgggaaatatatgtgtaggataatcgtacattttatgtgggaagatgtccagcaaagaggcagggtcatgggcgtgaacccatacatactcaaaaaaaacatgatcctgatgactaaccacttctacgcagcaatcctgggctatgacgaaggtattctttccgatgatcacggacttgccgccgcattatggcgaacgttcttcaatcgtaagtgtgaggaccctcggcatctcgaactgctggtggagtacgtgcgcaaacaaatccagtatcttgacagtatgaacggtgaagatttgttgttaacgggagaggtgagttggcgtcccctcgtcgaaaagaatccacagagtatcctgaagccccatagccctacttacaacgatgaggggctctag

SEQ ID NO: 26871 - DNA, 489 bp, synthetic construct
  misc_feature 1..489: note = Description of Artificial Sequence: Synthetic coding sequence
  source 1..489: mol_type = other DNA
atggccctgctggtgcgggtgctgcggaaccagaccagcatcagccagtgggtgccagtatgcagcagattgatcccagtgtctccgacccagggccaaggagacagggcgctgagccgcacttcccagtggccccagatgagccagagcagagcatgtggaggatctgagcaaatccccggcattgatattcagctgaataggaagtaccataccactccaatcctaggctacgatgagggtatcctctcagatgaccatggtctggctgcagcactttggagaactttctttaaccgcaagtgcgaggacccccgtcacctggagcttctggtagagtatgtgcgaaagcaaatccagtatctcgactctatgaatggagaagatctgctgttgaccggtgaagtttcatggcgaccactagtggaaaagaacccccagtcaattttaaaaccccactcgccaacatacaatgacgagggactctag

SEQ ID NO: 26872 - DNA, 435 bp, synthetic construct
  misc_feature 1..435: note = Description of Artificial Sequence: Synthetic coding sequence
  source 1..435: mol_type = other DNA
atgtgcctggtgcggatgaagcaggagggccggagcggcaagtacatgtgtcgaattatcgtccattttatgtgggaggatgtgcagcaaagaggaagggtaatgggtgttaatccttacattttgaaaaaaaatatgattctgatgactaatcacttctatgcagcgatcctcgggtatgatgaggggattctgtccgatgatcacggactggcagctgccctgtggcgaacctttttcaacagaaagtgtgaggatcctaggcacctagaattattagtcgagtacgtcaggaaacaaatacagtacttggactccatgaacggcgaggacctcttgctgaccggcgaagtcagttggcgacctctcgtggagaagaatccccagtccattctgaagccacactcccctacctacaacgacgaaggactctag

SEQ ID NO: 26873 - DNA, 447 bp, synthetic construct
  misc_feature 1..447: note = Description of Artificial Sequence: Synthetic coding sequence
  source 1..447: mol_type = other DNA
atggccctgctggtgcgggtgctgcggaaccagaccagcatcagccagtgggtgccggtgtgttcccggctgatccccgtcagcccgacccagggacagggagaccgagccctatctcggacctctcagtggccacagatgagccaatcccgggcttgtggtggatcggaacagattccaggcatagatatccagctgaaccgaaagtaccacaccaccaggaaactctccacaaccaaagattcaccccagccggtggaagaaaaggtaggcgcattcacaaaaattatcgaggccatggggtttactggaccactgaagtacagcaagtgggacgtcagttcacccaacgaggccggacgacctgaatgggaggtgcacgtctcctaccactccagtttctatgtgggtggatgctccgcagcacggcagagccatggcggctag

SEQ ID NO: 26874 - DNA, 825 bp, synthetic construct
  misc_feature 1..825: note = Description of Artificial Sequence: Synthetic coding sequence
  source 1..825: mol_type = other DNA
atgctgagcgtggccagccggagcggccccttcgcccccgtgctgtcagccacctcccgtggagtggcgggcgccctcagaccgctggtgcaggctacggtccccgctaccccggagcagcccgttctcgaccttaagcggccatttctgtctagagaaagcctcagcgggcaggcggtgcgacgccctttggtggcgagtgtaggactcaacgtgcctgcatctgtatgctattcacacactgatataaaggtgccagatttctctgagtaccgaagactagaagtgttagactctacaaagagctcacgtgagagctccgaggctcgcaagggtttcagttacctcgtgacaggcgtcactacggttggggtggcatatgcagctaagaatgccgtcactcagtttgtgtcatctatgtcagccagcgccgatgtcctggctttggctaagattgaaattaagctttccgacattcccgaagggaagaatatggctttcaaatggcgagggaagcccctgtttgttaggcacaggacccagaaagaaattgagcaagaggcagcggtggaattgagccaattgagggatccccaacacgacttagatagagtgaagaagccggaatgggtgattctcatcggggtgtgtactcatcttggctgcgtcccgatcgcgaacgccggggatttcggagggtattattgtccgtgccatggatcgcactacgacgcaagcggcaggatccgactaggccccgcccctctgaatttggaggtgccaacttacgagttcaccagtgacgatatggttatcgtcggttag

SEQ ID NO: 26875 - DNA, 1221 bp, synthetic construct
  misc_feature 1..1221: note = Description of Artificial Sequence: Synthetic coding sequence
  source 1..1221: mol_type = other DNA
atggccgccggcgccggcgccggcagcgccccccggtggctgcgggctcttagcgaaccactgagcgcagcgcaattacgacggctggaggaacacagatactccgctgccggcgtgtctctgctggaaccccccctgcagctgtactggacttggctccttcaatggatacccttatggatggcccctaatagcataacgctgttggggctggctgtgaatgtggtgactactctcgtgctgattagctactgtcctacagcaactgaggaagctccatattggacctatctgctttgtgccctgggtctcttcatctaccagtcacttgatgcaatagacgggaagcaggctagacggaccaactcttgctcgcctctgggagaactcttcgaccatggttgtgacagtttaagtaccgtgttcatggcagtgggcgcttccatcgcagcccgtttgggcacatatcctgactggttttttttctgctccttcatcggtatgttcgtcttttattgtgctcattggcagacctatgtgagcggcatgctccgatttggtaaagtggatgtgacagagatacagattgcccttgtaattgtattcgtgctgtcggcctttgggggcgccaccatgtgggattataccatccctatcttagagattaaactcaagatactgccagttctggggttcctgggcggtgtaatatttagctgctctaactattttcatgtgatactacatgggggagtcggaaagaatggtagtaccattgccggcacctcagtgctctcacctgggctacatattggcttgattatcattctcgcaatcatgatctataagaaatctgctacagatgtgttcgagaaacacccgtgcctttatattctgatgttcggctgtgtgttcgctaaagtgagccagaaactcgtagtggctcacatgacaaagtcggaactgtacctccaagatacagtgtttctcggaccaggcctcctatttctggatcaatattttaacaactttatcgacgagtacgtggttctctggatggctatggtgatctcaagcttcgacatggttatctacttctcggctctgtgcctgcagatcagtcgccacttgcatctgaacatctttaagactgcgtgccatcaagcgccagagcaggtccaggtcctctcctctaaaagtcatcaaaacaacatggactag

SEQ ID NO: 26876 - DNA, 2508 bp, synthetic construct
  misc_feature 1..2508: note = Description of Artificial Sequence: Synthetic coding sequence
  source 1..2508: mol_type = other DNA
atggccgagctgagcgaggaggccctgctgagcgtgctgcccaccattcgggtccccaaggccggcgaccgggtgcacaaggatgagtgtgcctttagctttgataccccagagagtgaaggcggtctgtacatctgcatgaatacatttttgggtttcggcaagcagtatgtcgagagacattttaacaagacaggacaacgggtgtatctccacttgcgcaggacgaggagaccgaaagaagaggatcctgctactggaacgggcgacccgccacgcaagaagccaactaggctggccattggcgtagagggaggtttcgacctttctgaagagaaattcgagttagacgaggatgtcaagatcgtgatactgccggattatttggagattgctagagacgggctcggcggcctccccgatatcgttcgagaccgggtgactagcgccgtggaggccctcttgtcggccgattctgcaagtcggaaacaagaagtgcaggcctgggacggggaagtgcgccaggtgagcaagcacgcctttagtctgaagcagttggataacccagcgcggatcccgccctgcggatggaagtgttccaaatgtgacatgagagaaaatctttggctgaacctgaccgatgggagcattctttgtgggcgccgttactttgacggaagcggagggaacaatcatgctgttgaacactaccgggagaccggataccccctcgccgtcaagctgggcaccatcacacccgatggcgcggacgtgtatagctacgacgaggatgatatggtgcttgacccctcactcgcggaacacctgagtcactttggaattgatatgctcaagatgcaaaagaccgataagactatgactgaacttgagatcgacatgaaccagagaatcggagagtgggagctcatacaggagtcaggcgtgccactaaaaccgctattcggaccaggatatacaggcatccgcaacctcggtaacagctgttatctgaattccgtcgtacaggtgctgttctccatccctgacttccagcgcaagtacgtcgacaaacttgagaagatctttcagaatgcccccacggacccgacccaggattttagtacccaagtggctaagttaggacatggactgctgagcggcgaatattcaaaaccagtgcctgagtctggagatggagagcgggtgcctgagcagaaagaagttcaggatggaattgccccacgaatgttcaaggcccttatcggcaaaggtcaccccgagttcagcactaaccgccagcaggatgctcaggaatttttcctgcacttgatcaacatggtggagaggaattgccggtctagcgaaaaccctaacgaggtatttagattcttggtagaggaaaaaataaagtgcctggccacggagaaggtcaaatacactcagcgagtcgattacattatgcagctgcctgtgcctatggacgcagccttaaataaggaggagctgctagagtacgaggagaaaaagcggcaagcagaggaggagaagatggccctgcctgaactggtgagggctcaagtgccattcagctcctgcttggaggcatatggtgctcctgaacaggtggatgacttttggtccacagctctccaggccaagtccgtggctgtgaagactaccaggtttgctagttttcctgactacctggtcatacagattaaaaaattcacctttggtcttgactgggtgcccaaaaagctcgacgtaagtattgagatgcctgaggaattggatatcagtcagctgaggggaactgggttgcaaccaggagaggaagagttgcccgacattgccccacccctggtgactcccgatgaacctaaagcacctatgctggatgaatcagtaatcattcagctggtagaaatgggctttcctatggatgcctgtcgaaaagccgtgtactacacagggaatagtggagccgaagcagctatgaactgggtcatgagccacatggacgatccagacttcgctaatcctctgattttacctggatcttcgggcccgggctccacctctgctgctgctgaccccccacctgaggactgcgtcacaaccatcgtgtccatgggcttctccagagaccaagccctcaaggctctcagagcgaccaataactctctggaaagggccgttgactggatctttagccacatagacgacctggatgcagaagccgctatggatatatccgaggggagatcagccgccgattcaatcagcgagtctgtgccggtagggcccaaggtgcgggatggacccggcaaataccagctgtttgctttcatctctcatatgggaacgtccacgatgtgtggccattacgtctgccatataaagaaagagggcagatgggtgatatataacgaccagaaggtgtgcgccagcgaaaagccacccaaagacctgggctacatatatttttaccagcgtgtggcttcctag

SEQ ID NO: 26877 - DNA, 2385 bp, synthetic construct
  misc_feature 1..2385: note = Description of Artificial Sequence: Synthetic coding sequence
  source 1..2385: mol_type = other DNA
atggccgacgcctgggaggagatccggcggctggccgccgacttccaacgggctcagttcgctgaagccacacaacgcctcagcgagagaaactgtattgagatcgtgaataaactgattgcacaaaagcagctggaagtagtccacaccctcgacggcaaagaatacataactccggctcaaatcagtaaagagatgagagatgaattgcacgtgcgcggcggtcgtgtcaatattgtcgatctccagcaggtgattaatgtcgatctgatacacatcgaaaatcgcatcggggatatcatcaagtcggaaaagcacgtccagctcgtgctcggccagctaatcgatgagaattacctggatcggttagccgaggaggtgaacgataagctgcaggaatccggacaggtgactatctctgaactgtgtaagacctatgatctgcctggcaactttttgacccaggccctgacccagagactgggaagaatcatttccgggcacattgatctcgataatcgcggagtaatctttaccgaagcgtttgtagctaggcataaggctaggattcgcggcttgttctcagctattactagaccaactgctgtgaactcgctcattagcaaatatggctttcaagaacagttactctacagcgttctggaggagctcgttaacagcggccgtttaaggggcactgtggtcggggggcggcaggacaaagcagtgtttgttccagatatttactcccgcacccagtctacgtgggtggatagtttttttaggcagaacgggtatctcgaatttgacgccctgtctagactcggaatccccgacgccgtaagctatatcaaaaagcgatacaagaccactcagctgctgtttctcaaggctgcctgtgtcgggcagggcctggttgaccaagtggaggcctccgtggaagaggcgatttcctccggtacctgggtcgacatcgcaccactgcttcctacatccctgtcggtcgaggatgcggcaatactgctgcagcaggttatgcgggccttctcaaaacaggcatctaccgtggttttctctgacactgtggtggtctcagagaagtttatcaatgattgtaccgagctgttcagggagcttatgcaccagaaggctgagaaagaaatgaaaaataaccctgtccacttgattaccgaagaagacctcaaacaaatcagcacactggagtcagtctccaccagtaagaaagataagaaggacgagcgcaggagaaaggcaaccgaggggtcgggatctatgagaggggggggtggtgggaatgctcgcgagtacaagattaagaaggtgaaaaagaagggcagaaaggatgatgactccgacgacgagtctcaatctagccataccggcaagaagaagccggaaatcagctttatgttccaggatgaaatcgaggactttctacgcaaacacatacaggatgccccagaagaattcatttccgagttggcggaatacctgattaagcccctgaacaagacttatttagaggtagtgagatctgtatttatgtcttccacgactagcgccagcggaactggccggaaacgaactatcaaagatctgcaggaggaggtttctaacttatacaacaatatccggctgtttgagaaaggcatgaaatttttcgcagacgacactcaggccgcgctgacaaagcacctgctgaaatcagtatgcactgatattaccaatttaattttcaattttttggccagcgatctgatgatggcagttgacgatcctgcagccattacctccgaaatcagaaaaaagatcctgagcaagttatctgaggaaaccaaagtggccctcacaaaactacacaacagcctcaatgagaaaagcatcgaggatttcattagctgcttagactcagcagcagaggcttgtgacatcatggtcaaaaggggggacaagaaacgcgagcggcagattctctttcagcatagacaggcattggccgagcagttaaaggttactgaggatccagcactgatcttacacttgacgtcagtgttactgttccagttcagcacccattccatgctccatgccccaggtagatgcgtaccccagataattgccttcctaaattcaaaaatccctgaagatcagcacgccctactggtaaagtatcagggtttggtagtaaagcaactggtgtcccagtccaagaaaacaggacagggtgactatcccttaaacaacgaactggacaaagagcaggaggatgtggcctctactacaagaaaagagctgcaagagctaagcagctcaataaaagacctggttttaaagtcaagaaagagtagcgtgaccgaggagtag

SEQ ID NO: 26878 - DNA, 942 bp, synthetic construct
  misc_feature 1..942: note = Description of Artificial Sequence: Synthetic coding sequence
  source 1..942: mol_type = other DNA
atgatcggccagaagaccctgtacagcttcttcagccccagccccgcaagaaagcgccatgccccgagccctgaacctgccgtgcagggaactggtgtggcaggtgtccctgaagagtctggggacgccgccgcgattccggcgaaaaaagcccctgccggccaagaggaaccgggtacacccccgagtagtcctttgtctgccgaacagttagacaggatacagcgtaacaaagccgctgcactccttcggctcgcagctcgaaacgtcccagtgggcttcggagagtcgtggaagaaacacctgtccggagagttcgggaaaccatacttcataaagctgatgggtttcgtggccgaagaaaggaaacactatactgtgtacccacctcctcatcaggtgtttacttggacccagatgtgcgacattaaggacgtgaaggtggtgatactcggccaggacccctatcacggtccgaaccaggctcatggcctttgttttagtgtgcaacgacccgtcccgcctcctccctcactggagaatatttataaagagctctcaactgacatcgaagattttgtccacccaggacacggagatctcagtggctgggccaagcagggagtgctgttactcaacgcggtgctgaccgtcagggcccatcaggcaaacagtcataaggagcgcggctgggagcagttcactgacgcagttgtatcttggctgaaccagaacagtaatggcctagtgtttctcctatgggggtcatatgctcagaagaaagggtctgctattgaccgtaagcggcaccacgtgctccagaccgctcatccatcgcctctctcagtttaccgagggttcttcggatgcaggcacttcagcaagacgaatgagttgctgcagaagtcagggaagaagcccatagattggaaggaactatag

SEQ ID NO: 26879 - DNA, 915 bp, synthetic construct
  misc_feature 1..915: note = Description of Artificial Sequence: Synthetic coding sequence
  source 1..915: mol_type = other DNA
atgggcgtgttctgcctgggcccctggggcctgggccggaagctgcggaccccaggtaaggggccacttcagctgctgagcaggctctgtggagaccatctgcaggctatccctgccaaaaaggcacctgccgggcaggaggaacccggtacccctccttcatcccctttatccgccgaacagttggatagaatacaaaggaacaaagccgccgccctgctgcggctggcagcgcggaatgtccccgtcggatttggcgagtcttggaagaaacacttgtctggggagtttggcaaaccttacttcatcaaacttatggggttcgttgcagaggaacgcaaacactacactgtgtaccccccccctcatcaggtgtttacatggacacagatgtgtgacattaaggacgtaaaagtcgtaatccttggacaggacccgtaccacgggcccaaccaggcccacggcttatgcttctctgtgcagcggcccgtaccaccacctccaagcctagagaatatatacaaggagctgtccactgatatagaggatttcgttcatcccgggcatggagacttgtccggttgggcaaaacagggggtgttactgctgaatgctgtgctgactgtgcgggcgcatcaggccaattcccataaggagcgcggttgggagcagttcaccgatgccgtcgtgagctggctgaatcaaaacagtaatggtctggtgtttctgctgtggggctcttatgcacagaagaaggggagcgcaatcgatcggaaaagacatcacgtactgcaaactgcccacccctcccctctgagtgtttatcggggattctttggatgccgccacttttctaagacaaatgagttgctccaaaaatccggaaagaaaccaatcgactggaaggagctgtag

SEQ ID NO: 26880 - DNA, 813 bp, synthetic construct
  misc_feature 1..813: note = Description of Artificial Sequence: Synthetic coding sequence
  source 1..813: mol_type = other DNA
atgggcgtgttctgcctgggcccctggggcctgggccggaagctgagaactcccggcaagggacccttgtcagctgagcaattagataggatccagcggaacaaggcagctgctctgctcagacttgctgctagaaatgtgcccgtcggctttggcgagtcatggaagaagcatctcagcggcgaatttgggaagccctattttatcaaactgatgggctttgtggctgaggaacggaagcattatacggtttatccccccccccaccaagtcttcacttggacacagatgtgtgatattaaagacgtgaaggtggtgatcctgggccaggacccctaccatggccccaaccaagcacacggtttgtgcttctccgtccagcggccagtgcctcctccaccaagcttggagaacatatacaaggaattgagtactgacatcgaagacttcgtacatcctggacacggggacctaagtgggtgggccaagcaaggagtgcttctgctaaacgccgttctgaccgtgagggcccatcaggctaattcgcataaagaacgaggctgggaacagttcacagatgcggtggtgtcgtggctcaaccagaactcaaacggacttgtttttctgctttggggcagctatgcccagaagaagggttcagcaattgatcgaaaaagacaccacgtgctccagacagcacatccctcaccattgtccgtgtatcggggattttttggttgccgacacttctcaaaaactaacgagttgctgcagaagtctggaaagaagcccatagactggaaggagctctag

SEQ ID NO: 26881 - DNA, 9288 bp, synthetic construct
  misc_feature 1..9288: note = Description of Artificial Sequence: Synthetic coding sequence
  source 1..9288: mol_type = other DNA
atggtgttcgagagcgtggtggtggacgtgctgaaccggttcctgggtgactatgtagtagacctcgatacttctcaactgagtttgggcatctggaagggcgccgtcgccttgaagaaccttcagatcaaagaaaatgccctgagtcagctggatgtgcccttcaaagtgaaggtgggccatattggcaatctgaagcttataatcccttggaagaacctatatacccagccagtggaggccgtgctcgaagagatctatctgctaattgtgccaagctctcgcatcaagtacgatcccctgaaagaggagaagcaactgatggaagccaaacagcaggagttgaaacggatcgaagaagctaagcaaaaggtggtcgaccaggagcagcatctcccggagaaacaggacacctttgccgagaaacttgtcacccaaatcatcaagaacctgcaggtgaagatcagctcaatacatattcgttatgaagatgacataaccaaccgggacaagcctctatcattcggtattagtctccagaacctgtcgatgcagactaccgatcagtactgggtaccctgcttacacgacgagacggagaaacttgtgaggaagcttatccgcttagacaatctctttgcttactggaacgttaagagtcaaatgttctatctgtcagactatgacaatagcctcgatgatttgaaaaacgggattgtaaatgaaaacatcgtgcccgaaggatacgatttcgtttttcgccctatctcagcaaacgctaaactggtcatgaaccggcgctcagatttcgacttctcggcccctaagattaacctggaaattgagctgcacaatatcgccatcgagttcaacaagccacagtatttctccattatggagttgctagagtccgtggatatgatggcacagaacctgccttacaggaaattcaaacccgacgtgccgttacaccaccacgctcgggagtggtgggcttatgcgatccacggcgtgcttgaagttaacgtttgtccccgactgtggatgtggtcttggaagcacattcggaagcacagacaaaaggtaaaacagtacaaagaactgtacaaaaagaaactcacttctaagaagccccctggcgaactgctagtgagcctggaggaactggaaaagaccctcgacgtctttaatataactatcgcccgccagaccgccgaagttgaagtaaagaaggcaggttataagatttacaaagagggtgtcaaagaccccgaggacaataaagggtggttttcttggctgtggtcctggagtgagcagaatacaaacgaacagcaaccagacgtccagccagaaacactggaggagatgctgacaccagaagagaaggctctgctctacgaagccatcgggtatagcgagaccgccgtggaccccactctgctgaagacattcgaggctttgaagtttttcgtgcatctaaagtctatgtctatcgtcttaagagagaaccatcagaagcccgagctagtggatatcgtgatcgaggagttttccaccctgattgtgcagcggccaggggcccaagctatcaagtttgaaaccaagattgattctttccacattacaggacttcccgataactccgagaagccccggcttttgtcttctttggacgatgctatgtccctctttcagatcaccttcgaaattaaccccctggatgagactgtgtcccagagatgtatcattgaagctgaaccgctcgaaataatctacgacgccaggacagtgaatagtatcgtggagttttttcgccctcctaaagaagtgcacctggcgcagctgacagcggcaacactgactaaactcgaagagttccgctctaagacagccaccggtctactctatatcatcgaaacccagaaggtcctcgacttgaagatcaacttgaaggcatcatacatcatcgtacctcaggacggtattttttcgccaacctccaatcttctgctgctggatctaggtcatcttaaagtcacaagcaaaagcaggtccgaactgcctgatgtgaaacagggcgaagctaatctgaaggagatcatggacagggcatatgattcattcgacatccagctcacctctgttcagttgctgtatagcagggttggtgacaactggcgcgaggcccggaagttgagtgtgagcacgcagcacatacttgtccccatgcatttcaatttagagcttagcaaggccatggtgtttatggatgtgaggatgcctaaattcaagatctatggaaagctaccgctcattagcctgaggatcagcgataaaaaattgcagggcatcatggagctgatagagtccataccgaaaccagagccagtgaccgaggtgagtgctcctgtgaagtcctttcagattcagacatccacaagcctgggtacatcgcagatctctcagaagattattcccctgctggagctccccagtgtatccgaagacgactctgaggaagagtttttcgatgcaccttgctctccattagaagagcccctccaattccctactggtgtaaaatctattaggactcgtaaattacagaagcaggattgctctgtcaatatgacaacatttaagattcgcttcgaggtccctaaggtcctgatagagttttaccatcttgtgggagactgcgagttatctgtcgtggagatactagtcctagggcttggagctgagatcgagattagaacctacgatcttaaggccaacgcgtttttaaaggagttctgtttgaaatgcccagaatacctggatgagaacaagaaacccgtctacctggtgacaaccctggataacaccatggaggatcttctgacgttggagtacgtgaaggccgaaaagaacgtcccagacctgaagtccacctacaataatgtgctgcaactgatcaaggtcaacttttctagtctggatatccacctccacacagaagctttgctaaacactatcaattatctccataacatcctgcctcagtctgaagaaaagagcgctccagtgtcgacaacagagaccgaggacaagggcgacgtgatcaagaagttggcccttaagctgtctactaatgaagatatcattacactgcagatcctagcggagctaagttgtctgcagatttttattcaggaccagaaatgcaatatcagcgagatcaaaattgaaggactcgactctgaaatgatcatgcgcccttctgaaacggagattaacgctaagctgcggaacataattgtgctggattccgacatcacggccatctacaaaaaggccgtgtatatcacgggtaaggaagtgttttcctttaaaatggtcagctatatggatgctaccgccggctctgcctacacggacatgaacgtcgtggatattcaggtcaacctgatcgtgggctgcattgaggttgtgtttgtgacgaagtttctgtacagcattctggctttcatcgataactttcaggccgccaaacaggctctagctgaagccactgtccaggctgccgggatggccgccacgggcgttaaagagctcgcccagcgctcctcccgcatggcactcgacatcaacatcaaagcccctgtcgtggtaattccacagtccccagtgagcgaaaatgtcttcgtggcagactttggactaatcaccatgacaaacactttccacatgatcacagagagtcagagttcccccccacctgtgatcgatctgatcactataaaactctctgagatgcgattgtatcggagccgattcataaatgatgcataccaggaggttctggatctactgctgccactgaacctggaggtggttgttgagcgcaacctgtgctgggaatggtatcaggaagtgccctgcttcaacgtaaatgctcagttaaaaccaatggagttcatcctatcccaggaggatataacaaccattttcaaaacactgcatggtaacatctggtacgaaaaggatggatcagcctcgcccgcagtgactaaagaccaatatagcgctacctccggcgtgactaccaatgccagtcatcatagcggtggagccactgtcgttacagccgcggtcgtagaggtgcattcgcgggctttactggtaaagacgaccctcaatatttcttttaaaactgacgacctgaccatggtactatactcgccgggaccaaagcaggcaagttttactgatgtgcgggacccctctctcaagctcgccgagttcaagctggagaacatcataagcactttgaagatgtacaccgacggctcaacatttagctcattttcactgaaaaactgcatactggatgataagcgaccgcatgttaagaaggcaacccctaggatgatcggcttgacagtgggctttgacaagaaagatatgatggatattaagtaccggaaggtcagagacggttgcgtcacggacgctgttttccaggagatgtatatctgcgcctctgtggagtttttgcagaccgtagcaaatgtgtttctcgaggcctataccaccggcactgctgtggagacctccgtgcagacgtggactgccaaagaggaagtgcccacgcaggagtcagtcaagtgggagatcaacgtgatcattaagaacccagaaatagtgtttgtcgccgacatgaccaagaacgacgccccagcgctggtcattaccacgcagtgtgaaatctgttataaggggaatcttgagaactctaccatgaccgcagcaatcaaggacttgcaggtccgcgcttgtccgtttctccctgtgaagaggaagggcaagattaccactgtgctgcagccttgcgatctcttctaccagaccacgcagaaggggacagatcctcaggtcatcgacatgagcgtcaagtcactgacccttaaagtctctcccgtcatcataaacactatgattacaatcacatctgccctctacaccactaaggagaccataccagaggagactgcttcatcaacagcccacctgtgggagaagaaggataccaaaacactcaagatgtggttcttagaagagagtaacgaaactgagaaaattgctccaaccaccgaactggttccgaaaggcgagatgattaaaatgaacatcgattctatttttattgtcctcgaagccggaattgggcaccgcacagtgcccatgctgctagcgaaatccagatttagcggggaggggaagaattggtcctctctgattaacctgcactgtcagctcgagctagaagtacattactacaatgagatgttcggcgtttgggagccccttctggagccattggaaatagatcagactgaggatttccgcccctggaacttgggaataaagatgaaaaaaaaggcaaaaatggcaatagtggaaagcgatcccgaggaagagaactacaaagtacccgaatacaaaactgtgatttcattccactctaaggaccaactgaatatcactctcagcaagtgtgggctggtaatgttgaacaacctcgttaaggcattcactgaagccgcgacgggttctagcgccgattttgtgaaggacctggccccatttatgatactcaatagtctgggactcaccatcagcgtctctccatctgattctttctccgttctcaatatccccatggctaagagttacgtgttaaagaatggcgagtcactttcaatggattacattaggactaaagacaatgaccacttcaacgctatgacctctctgagtagtaagcttttcttcattctgcttactcccgtgaaccactccacagcagacaaaataccgctcaccaaagttggcaggcgcctttacaccgtgcggcaccgggagtccggcgttgagcgctccatcgtctgccagatcgacaccgtggaagggtccaagaaagtgacaatccgatcccccgtccaaatccggaatcatttcagtgtgcctctgtcagtgtacgagggcgatacactcctgggcaccgccagcccagaaaacgagtttaatatacctctcggctcttacagatcgttcatattcctgaagccagaagatgagaactaccagatgtgcgagggaattgactttgaggaaattattaagaacgatggggccttgctgaaaaagaaatgtagaagcaagaatccttccaaggaaagcttcctcattaacatcgtgcctgagaaggacaacctcaccagtttgagcgtgtactccgaggatgggtgggatctgccatatattatgcatctttggcctcctattctccttcggaatctgcttccgtacaagatcgcttactatatcgaaggcatcgagaacagtgtttttacactgtcagaaggacattcagctcagatttgcactgcgcagttggggaaggcccggttgcatctaaagctactcgactacctgaaccatgattggaaatcagagtatcacatcaaacctaaccagcaagatatttcttttgtgtccttcacctgcgtcacagaaatggaaaaaacagacctggacatcgccgtgcacatgacctacaacaccggccagactgtggtggcattccattccccgtactggatggttaacaagacaggacgcatgcttcagtacaaggctgacggtatccaccgcaagcaccctcccaactacaaaaagccggtgctctttagcttccagccaaaccatttcttcaacaataacaaggtccagcttatggttacagatagcgagttatcaaatcagtttagtattgatacagtgggatcacacggagctgtcaaatgtaaggggctgaagatggactaccaagttggagttactatcgacctgtcatcatttaacataactagaatcgtcaccttcactcccttttacatgatcaaaaacaaaagtaagtaccatatttccgtggccgaagaagggaatgacaaatggctaagtcttgacttggaacaatgtatccctttctggccagagtacgccagttccaaactgctcatccaggtggaacggagcgaggacccccctaagagaatctacttcaacaagcaagagaactgtattttactcagactcgataacgaattaggcgggatcatcgcagaagtgaacctcgctgaacattccacggttatcacgttcttggactatcacgacggagctgccaccttcttgttgattaatcacaccaaaaacgaactggtccagtataatcaatcttccctgagtgaaatcgaagactctctgccgcccggcaaagcagtattttatacgtgggcggatccagtcggctccagaaggctcaagtggcggtgccggaaaagccatggcgaggttacacagaaggatgatatgatgatgcctatcgatctgggcgaaaagaccatatatctcgtctctttctttgagggattacagcgcatcatattattcacagaagaccctagagtgttcaaagtgacctatgagagcgagaaggcggagctcgctgaacaggagatcgccgtggcgctgcaggacgtggggattagtttggttaacaattacaccaaacaggaagtcgcgtacattgggatcacctcctctgatgtcgtgtgggagacgaagcccaagaagaaagcccgctggaaacctatgagcgtgaagcatacagagaagcttgagcgcgagttcaaagaatacactgaatcttcccccagtgaagataaggtaatccagctggacactaacgtgcctgtccgcctgaccccgaccgggcataatatgaagattctgcaaccccatgtgatagcactgcgccgcaactatctccctgccttaaaggtcgagtacaataccagtgcccaccagtcaagtttccgaatacaaatttatcggattcaaatacaaaaccagatccacggtgcggtcttcccattcgtgttttaccccgtaaaacccccaaagtctgtcaccatggatagcgctcctaagccctttacagatgtgtctattgtgatgcggagcgccgggcattcccagattagcagaatcaagtattttaaggtgctcatccaggaaatggaccttcggctggaccttggcttcatatatgccctgacggatttaatgaccgaagcggaagtgacagagaatactgaggtggagctcttccataaggacatagaagctttcaaagaagagtataagaccgccagtctagtcgaccagtcacaggtctccctctacgaatattttcacatttcgcctatcaaactccacctgtcggtgtcactgagttcaggcagggaagaagcaaaagatagcaagcagaatgggggtctgatcccggtacactcattgaatctcttactaaaatctatcggagcaactcttacagatgttcaagatgtggtatttaaacttgctttcttcgaactcaactatcagttccacacaacaagcgacctgcagtctgaggtaatacgacactatagcaagcaggccatcaaacagatgtatgtgcttattctgggcctggacgtgttaggcaatccttttggtctcatcagagaatttagcgagggcgtcgaagcattcttctacgagccttaccagggggcgatccagggacccgaggaatttgtggaaggcatggcgttggggcttaaagccctcgttgggggggctgttggagggctcgccggggctgcctctaagataaccggggcaatggcaaaaggggtggcagcaatgacgatggatgaggattaccagcagaagaggcgcgaggctatgaataaacaaccagcaggcttccgggagggcatcactcgaggaggtaaagggttggtttcagggttcgtgtccggaattaccggcatcgttaccaagcccattaaaggcgcccagaaggggggcgcggccggcttttttaagggcgtcgggaaggggctcgtgggtgctgtggctcgacccacaggcgggatcatcgatatggccagtagcacatttcaggggatcaaaagagccactgagactagcgaagtggagtctcttagacccccccgattttttaacgaggacggcgtgatacgcccatatagactaagggacggcaccgggaaccagatgctacagaaaattcagttttatcgagagtggataatgacccactccagttcgagcgatgacgacgacgatgacgacgacgatgacgaatctgatctaaatcactag

SEQ ID NO: 26882 - DNA, 9525 bp, synthetic construct
  misc_feature 1..9525: note = Description of Artificial Sequence: Synthetic coding sequence
  source 1..9525: mol_type = other DNA
atggtgttcgagagcgtggtggtggacgtgctgaaccggttcctgggagattacgttgtggacctggatacctcacagctaagcctgggaatctggaagggtgccgtcgcacttaaaaatctgcagatcaaggaaaatgccttaagccagttggatgtccccttcaaagttaaagtgggacatatcgggaatctgaagcttatcataccttggaagaacctttatactcaacctgtcgaggcagtgctggaggagatttatcttttgattgtgcccagttctcgcatcaaatacgatcccctcaaggaggagaagcagctgatggaggctaagcagcaggagctcaagcggatcgaggaagccaagcagaaagtggtagatcaggaacagcatctacccgaaaaacaggatacctttgcagagaagttggtcacacaaatcatcaagaacctgcaggttaaaatatcatcgattcacattagatatgaggacgacattaccaatagagataagccactgagctttggaatctcactgcagaacctctccatgcaaaccacagatcagtattgggttccctgcctgcatgatgagactgagaaactggtcaggaagttgatcagactggataatctgtttgcctactggaatgtgaagtctcagatgttctatctcagcgactacgataatagcttagacgatctcaaaaatggcatcgtgaacgaaaatattgtgcctgaggggtacgacttcgtgttcaggccaatttctgctaatgccaaactggtgatgaataggaggagcgatttcgatttcagcgcaccaaaaattaacctagaaatagaactgcataacattgcaatagagttcaacaaaccacaatatttttcaattatggagctgttagaatccgtggacatgatggctcagaacctgccctaccgtaaatttaagccagatgtcccactacaccaccacgcacgcgaatggtgggcctatgcaatacacggagttctggaggttaatgtttgcccaagactttggatgtggagctggaaacacatccgaaaacatcggcagaaggtgaagcagtataaagaactctacaaaaaaaagctaaccagcaagaaacccccgggggagctcttggtttcgctggaagagctcgaaaagacactggacgtctttaacatcacgatagcacggcagacagccgaagtcgaagttaagaaggcaggctataaaatttataaggaaggcgtcaaagatccggaagacaataaaggttggtttagttggctgtggtcctggagtgaacagaacaccaatgagcaacagccagatgttcaaccagagacattggaagaaatgcttacccccgaggagaaggcccttctttatgaggctatcggatattccgaaactgcagtagaccctacgcttctgaagaccttcgaggccctcaaattcttcgttcatctcaaaagtatgtccatcgttctccgggaaaatcatcaaaaaccagagttggtagacattgtaatcgaggagtttagtacactgatcgtccagaggcctggggcacaggccatcaagttcgaaaccaagatagactccttccacattacaggcctccctgataacagcgaaaagcccaggctcctgagcagccttgatgacgctatgagcctcttccaaattacatttgagatcaatccactagatgagaccgtgagccagcgctgcattatcgaggcagagcccctggagatcatatatgatgcacgcacggtaaacagtatcgttgaatttttccgcccacctaaggaagtccatctggcccaactaacagctgctactcttacgaaacttgaagagttccgttcaaagactgccacagggctgttgtacattatcgagacgcagaaggtactggacttgaaaatcaacctgaaagcctcctatataatagttccacaggacggcatcttttccccaacaagcaacctattgctgctggacctaggccacctgaaggtaaccagtaaatcccgcagtgagctcccagacgtgaagcagggagaggctaaccttaaggagatcatggatcgagcctatgactctttcgacatccagctaacctcggttcaactgctctatagtcgggttggtgataactggcgggaagcaaggaaactgagtgtttccacacagcatatcctggttcccatgcattttaaccttgagttgagcaaggccatggtgttcatggacgttagaatgcctaaattcaaaatctatggcaagcttccgctcatttccctgcggatctctgataaaaagctgcaggggatcatggaactcatcgagtctattccaaaaccggaacccgtaaccgaagtctccgctcctgtgaaatccttccagatacagacgagtacatctttaggcactagccagatttctcagaagattatccccctgttggagttgccctccgtgtcagaagatgacagcgaggaagagtttttcgacgctccctgtagtcccctcgaagagcctctgcagtttccgacaggcgtgaaatccatcagaacacgaaaactgcagaagcaggattgcagtgtaaacatgacaaccttcaagatcagattcgaagtccccaaagtgctgattgagttctaccatctggtgggggattgtgaactgtccgtggttgagatcctcgttctggggctgggtgcagagattgaaatccgaacctatgacttgaaagcaaacgccttcctgaaggagttctgccttaaatgtccagaatatcttgacgagaacaaaaaaccagtctacctggttacgaccctggacaacactatggaagatctcttgactctcgagtatgtgaaggctgaaaagaatgtccccgacctcaaaagtacttacaataacgtgctacaactcatcaaggtgaacttctcctcgttagatattcatctccacaccgaggcgctgctcaacacaataaactatctccacaatattctcccacagtcagaagaaaaaagcgcccctgtgagcacaactgagacggaggacaagggggacgttatcaagaagctggcgctgaaactaagtactaatgaagacataattacactgcagattctggctgagctgtcttgcctgcagattttcatccaggatcaaaaatgtaacatcagcgaaattaaaatcgagggattggattccgagatgattatgagaccttccgaaacagagattaatgccaagttaaggaatatcatcgtcctggactctgacattaccgcaatttacaagaaggcagtgtacataactggaaaggaggttttttccttcaagatggtgtcatatatggacgccaccgccgggtcagcgtacacggatatgaatgttgtggacattcaggttaatctgatcgtgggatgtatagaagtggttttcgtgactaaattcctttactctatcctggctttcatcgacaattttcaagccgccaagcaggcactggcagaggctactgtccaggctgctgggatggccgccaccggggttaaggaattagcgcagcgcagcagtaggatggctctagatatcaacatcaaggccccagtggtggtgataccccagtcccctgtttctgaaaatgtcttcgtggccgactttggtctgattacaatgactaataccttccatatgattactgagagtcagtcaagccccccacccgtgattgacttaattactataaaactaagcgagatgcgactatataggagccggttcatcaatgatgcctaccaggaggttcttgacctgctgctccctcttaacttggaagttgtggttgagcggaatttgtgttgggagtggtatcaggaggtaccttgcttcaacgtgaacgcacaactcaagccaatggaattcatactctcccaggaagacatcacgaccattttcaaaacattacacggtaatatttggtacgagaaggacggctctgcgtcccctgcagttacgaaagatcaatactcagctactagcggagtgacaaccaacgcgtcacatcattcagggggggcaacagtcgtgacggcagcagtcgtggaagtgcactcacgagcgctgctagtgaaaaccactctgaatatcagcttcaaaacggatgatctgaccatggtgctgtattcccctggccctaagcaggcatccttcacagacgtacgtgacccctcactgaagctggcagagttcaagctcgaaaatattataagcaccctcaagatgtataccgacgggtccaccttctcctctttttctttaaagaactgtatcctggatgataagaggcctcacgttaagaaagccaccccccggatgatcggcctgacggttggcttcgataagaaagacatgatggacatcaagtaccgtaaggtgagggatggatgcgtgacagacgccgtgtttcaggaaatgtacatatgcgcatcagtggagttcctgcagaccgttgcaaacgtctttctcgaggcatacactacgggcaccgcagtggaaacctccgtgcagacatggacagctaaggaggaagtccccacacaggaatccgtgaaatgggaaatcaacgtgataataaagaaccctgagatagtgtttgtagccgacatgaccaagaacgatgccccggccctggttataaccacgcagtgtgagatctgctataaagggaatctcgagaactccactatgactgctgctataaaagatttgcaagtgcgagcttgtccattccttcccgtcaaaaggaaggggaagatcaccacggtcctgcaaccctgtgacctgttttaccagacgactcagaagggcaccgaccctcaggttatcgatatgagcgttaaatcccttacactcaaagttagccccgtgatcatcaataccatgatcacaataacatccgcactgtatacaactaaagagacaatccctgaggagactgcatccagcaccgctcatctgtgggagaaaaaggatacgaagaccttgaagatgtggtttttagaagaatcaaatgaaaccgagaaaatcgctccaacaaccgagcttgtgccaaagggcgaaatgatcaaaatgaacattgattcaattttcatagttcttgaagccgggatcgggcacaggaccgtaccaatgctgctggccaagtccaggttctccggagaagggaagaactggtcatccctaattaacctgcattgccagttggagctagaggttcattactataatgaaatgtttggtgtgtgggaacccctcctcgagcccctagaaattgatcagactgaggactttaggccttggaaccttggtatcaagatgaagaagaaggccaagatggccatcgtcgaatcagatccagaagaggaaaattataaagtgcctgagtacaagactgttatctcttttcactcaaaagatcagctcaatataactctatccaagtgcggcttggtgatgcttaacaacctggtcaaggcttttaccgaagcagctacaggttctagtgcggatttcgtgaaagacttagctcccttcatgattctgaactccctgggtctaaccatcagcgtaagcccctctgacagcttctccgtcttgaatataccaatggccaaaagttacgtgctgaaaaacggcgagagcctgtccatggactatatcagaactaaggataatgaccacttcaatgctatgactagtctgtctagtaaattgtttttcatcttgctgacccccgtgaaccactcaaccgccgacaaaatcccgctgacgaaagtggggagaaggctatacaccgtgcgacacagggagagcggcgttgaaaggtcaatcgtgtgccagatagacaccgttgaagggtcaaagaaggtcactatccgcagtcctgttcaaatcaggaatcacttctctgtccctctgtcagtttacgagggcgacactcttttgggcaccgcctctcccgagaacgaattcaacatccctctaggttcttaccgcagttttatctttctcaaacctgaagacgagaattatcaaatgtgcgagggaatcgattttgaggaaataattaagaacgatggagccctcttgaagaagaaatgccgctcgaaaaatccttccaaggagtcttttctcatcaatatcgttcccgaaaaggataacctgacatctctttccgtatatagtgaggacggctgggacctcccttacattatgcatctgtggccccctattctgcttcgtaatctcctgccctataagatcgcgtattacatcgagggcatcgagaacagtgtgttcacactgtctgaaggccattctgcacagatctgtactgctcagctcggaaaggctcggttacatctaaaactcctggattacctcaatcacgattggaaaagcgaataccacattaagcccaaccaacaggatatctctttcgtgtcattcacgtgcgtaacagagatggaaaaaacggacctggatatcgcagtccacatgacatacaacactggccagactgttgttgccttccattctccatactggatggtcaacaaaacaggaagaatgctacagtacaaagccgacggtatccatcgaaagcatccccctaactataagaagcctgtgcttttctccttccagcccaaccacttctttaataacaataaggttcagctcatggtgaccgactccgaactttctaaccagtttagtatcgataccgtcggctcccatggcgccgtcaagtgcaagggcctcaagatggattatcaggtgggcgttacaattgatcttagcagcttcaacatcaccaggattgttacttttactcccttttacatgattaagaacaaaagtaagtaccacatttcagtcgcagaagaaggcaacgataagtggctttcactagatttagagcagtgtattccgttctggcctgaatatgcctcttcaaagctgctgatccaggtggagaggagcgaggaccctccaaagagaatatactttaataagcaggagaattgtatactcctaagattggacaacgagctcggcggaatcatcgccgaagtcaacctagcggaacattctacagtgattaccttcctggattaccacgatggggccgccactttccttcttattaaccacaccaaaaacgaacttgtccagtataaccagagtagtctcagcgaaattgaggacagcctgcctccagggaaggctgtcttttacacctgggccgacccagtcggatcaaggcgattgaaatggcggtgtaggaagagccacggggaagtgacccagaaagacgatatgatgatgcccatcgacctgggggagaaaaccatctatctagtctccttttttgaaggtctccaaaggattatcctcttcactgaagatcccagggtgtttaaagttacctacgaatccgaaaaagccgagctggccgagcaggaaatagctgtggctctgcaagacgtgggaatcagtctggtgaataattacaccaaacaggaagtggcgtacatcggcataacctccagcgatgtggtttgggaaacaaagcctaaaaaaaaggccaggtggaaacctatgtctgttaagcacactgagaagctggaaagagagtttaaggagtatacggagtctagcccatccgaggacaaagttatccagctggataccaatgttcccgtccgccttacacccacaggtcataatatgaaaatactccagccccacgtgatagctctgcgtaggaattatctccccgctctgaaggtcgagtataatacaagcgcgcatcagtccagtttcaggattcagatttacaggattcagattcagaatcagatccatggtgctgttttccctttcgttttctaccccgtaaagcctccaaaatcggtcactatggactctgcgcccaagccattcaccgacgtaagcatcgttatgcggtccgccggccacagccagatctctaggataaagtacttcaaggtcctgattcaggagatggacctgcgccttgacctcggattcatttacgccttgacagatcttatgaccgaggccgaagttaccgagaacacagaggtggaattgttccacaaggatatcgaggcgtttaaggaagaatataaaactgcgagtctggtggaccaaagccaagtgtcactctacgaatattttcatatctctccaattaaactccatctgagcgtctcgctctcatcagggcgggaggaagcaaaggactcaaagcagaatggcggcttgattcccgttcattcactgaatctgctgcttaaaagcattggcgcaacgctgacagatgtgcaggacgtggtttttaaactcgcattttttgagttgaactaccagttccataccacctcagatcttcaatctgaggtgatcagacattattccaagcaggccatcaaacagatgtacgttctcatcctcgggttagacgtgctggggaacccgttcgggctgattagggaattctcagagggcgtggaagcttttttctatgaaccctatcaaggtgctattcagggacctgaggaatttgtcgaaggcatggccctcggcttgaaagccctggtcggtggcgccgtcggcggcctggccggcgcagccagcaaaatcacaggagccatggcgaaaggagtagcagctatgactatggatgaggattatcagcagaaacggcgggaagccatgaataagcagccggctggcttcagagagggcatcacaaggggcggcaagggcctggtctccgggttcgtaagtgggattacaggcatcgttaccaagcctatcaaaggggctcaaaaaggcggagccgcgggtttctttaaaggcgtgggcaagggactggttggcgcggtggcccgaccaacaggcggcatcatcgacatggcaagttctaccttccaaggcatcaaaagagccacagaaacctccgaggtggagtccttgcgtccaccaaggttttttaacgaggacggcgttatccgaccttatcggcttagggacgggaccggaaaccagatgctccaggtgatggaaaacggccggttcgccaaatataaatatttcacccacgttatgatcaataagacagacatgttgatgatcactaggagaggtgtgctgttcgtcactaaaggtacattcggtcagctgacttgcgaatggcagtacagttttgacgagttcacaaaggagccattcatcgtccacgggcgcaggctgcggattgaagctaaggagagagtgaagagtgtctttcatgccagagaatttggtaaaatcatcaatttcaagactcctgaagatgcgaggtggatcctgacaaaacttcaggaagctcgggagccaagcccaagtttatag

SEQ ID NO: 26883 - DNA, 9210 bp, synthetic construct
  misc_feature 1..9210: note = Description of Artificial Sequence: Synthetic coding sequence
  source 1..9210: mol_type = other DNA
atggtgttcgagagcgtggtggtggacgtgctgaaccggttcctgggagactatgtcgtcgacctggacaccagccagttgtccctgggcatctggaagggggcagtagctctgaaaaacctgcaaatcaaggagaacgccctgagccaactggatgtccccttcaaggttaaggtcggccatatcgggaacctcaagctcatcattccatggaagaatttgtatacccagcccgtcgaagccgtgctcgaggagatctatcttctgattgtcccttcaagtaggatcaaatatgatccgcttaaagaggagaagcagctcatggaggcgaagcaacaggagttgaaacgcatcgaggaggctaagcagaaagtggtcgatcaagagcagcacctgcctgaaaaacaggacacttttgcagagaaattggtcacccagatcatcaagaatctccaggtgaagatctcttctatccacataagatacgaggatgacattacaaacagggacaaaccactgagctttggcatttctctccaaaatcttagtatgcagaccacggaccagtactgggtcccatgccttcatgacgagacagaaaagctggtacgcaaacttattcgacttgacaatctctttgcttactggaacgtcaaaagccagatgttctatctctctgattatgacaattcactagacgaccttaaaaacggaattgtgaacgagaacatcgtgcccgagggctacgacttcgttttcaggccaatctcagccaatgcaaagcttgtgatgaaccgacggtccgattttgatttctcagctccaaagataaatctagaaattgagcttcacaacatcgcaattgaatttaataagccccaatacttttccattatggaactactcgaaagcgttgacatgatggctcagaacctcccttatagaaagtttaagccagacgtgcctcttcaccaccatgctagagagtggtgggcgtatgccatccatggggttctggaggtgaacgtatgccccaggctgtggatgtggtcttggaaacacatcaggaagcatcgacagaaagtgaaacaatataaggagctgtacaagaaaaagctgacgtccaagaagcctcccggggagctgctcgtctcactggaagaactcgagaagactctggacgtatttaatatcactattgccaggcagaccgcagaggtcgaagtgaagaaagccgggtacaaaatatataaagagggtgtgaaagaccccgaagataacaagggctggttctcatggttgtggagctggagcgaacagaatactaatgaacagcaaccagacgtgcagcccgagaccttagaggagatgctgacccccgaagagaaggctctcctgtacgaggccatcggttatagtgagacagccgttgaccccacactattaaagacatttgaagccctgaaatttttcgtgcacctgaaatcgatgagtattgtcctccgggagaaccatcagaagcctgagctcgttgatatcgtgattgaggaattctccactcttatagtacagaggccaggagcccaggctattaagtttgagaccaaaattgattcattccatattacgggcctgccagacaatagtgaaaagccccgactcctgtcttcactggatgatgcaatgagcctttttcaaattactttcgaaatcaatcctctggacgagacagtgtctcagcggtgtattatagaggcagagcctctcgagattatctacgacgcccgcactgtcaacagcatcgtagaatttttccggccacctaaggaggttcacctggcacagctgactgcggccactcttaccaaactcgaagagttcaggtcaaaaacggccaccggcctgctgtatattatagagacccagaaagttcttgaccttaagataaacctcaaagcttcctatatcatagtgccgcaggacggcattttttcccccacatctaatctccttctgctggatctgggccatctaaaagtaacgagtaagtcccgttccgagctccctgatgtgaagcaaggagaagctaatcttaaagaaatcatggacagggcttacgactcatttgacattcaactgaccagtgttcagctcctgtacagccgcgtcggggataactggcgggaagcccgcaagctgtcggtaagcacacaacatatactggtgcccatgcacttcaatctggaactgagtaaggctatggttttcatggatgtgcgcatgcccaaattcaaaatatacggaaaacttccactgattagtctcagaatcagtgataaaaaacttcaagggattatggagctcatagagagtatccccaaacctgaacccgtgactgaggtgtccgcgcccgtcaagtctttccagatccaaacctcaacaagtctgggcacgtctcagatctcgcagaagatcatccctttgttggaactgccatctgtttctgaagacgacagcgaggaggaattcttcgacgcaccgtgttctccgctcgaagagcctctccagtttcctaccggtgttaaatcaataaggacacgaaaactccagaagcaggattgctcagttaatatgacgactttcaaaatccggtttgaagttccaaaagtgctcatcgaattctatcaccttgtgggagactgcgagcttagcgtcgttgagatactggtgcttggcctaggcgctgagattgagatacggacatatgaccttaaggcaaatgcattccttaaagagttttgcctgaaatgccccgagtacctagacgaaaataaaaagccggtgtatctggtcactacccttgacaacacaatggaagatctgctgactctggagtacgtgaaggccgagaaaaacgtgcccgatctcaaatccacctacaataatgtgctgcagctcatcaaggttaatttctcctctctcgacattcacctacacaccgaagcgctgctgaacaccataaactatcttcacaacattctccctcaaagcgaagagaaatctgctccagtatctacaacggagactgaggacaagggagacgtcatcaagaagctggctttaaagctgtctactaacgaggatattataacgctccagatcctggccgagctcagttgtctgcaaatcttcattcaggaccagaaatgcaacatctcagagatcaaaattgaggggcttgacagtgagatgattatgcgacccagcgaaacggagatcaatgcaaaattgaggaatattattgttctcgactctgatataactgctatctacaagaaagccgtctacatcaccgggaaggaagtgttctcattcaagatggtgtcatacatggatgccacagctggctccgcctacacggacatgaacgtagtggacattcaggtcaacctcattgtgggctgcattgaggtggtgttcgtgactaagtttctttacagcattttggcctttatcgacaatttccaggctgccaagcaggccctggctgaggcgaccgttcaggctgctggcatggcagctaccggagtcaaagaattagcccagaggtcttcaagaatggcccttgatattaatatcaaagctccagtggttgtgatccctcagtcgcccgtgtctgagaacgtttttgtcgcagacttcggcctcatcacgatgaccaatacctttcatatgattacagagtcccagtcatctccacctccggttatcgatctgattaccattaagttgagtgaaatgagactatatagatcaaggttcatcaacgacgcatatcaggaagtgttggacctccttctcccactgaatctggaagtagtcgtggagagaaacttgtgctgggaatggtaccaggaggttccctgctttaatgtcaacgcccagctgaaacctatggagtttatcctttcgcaagaggatatcactactatcttcaaaacgctgcatggcaacatttggtacgagaaggatgggtccgcctcaccagccgtgacgaaggatcagtactccgctacgtctggtgtcaccaccaacgcttcccatcactccgggggtgccacagtggttacggccgccgtggttgaggttcacagccgcgcactgctggtaaaaacaactctgaatatttcatttaagactgacgatcttacaatggtcctgtactcccccggacctaaacaggccagcttcaccgatgtgagggatccctcgctaaagctggcagagttcaagctggaaaatattattagtacactgaaaatgtacactgatggcagtactttttcttccttcagcctgaaaaactgcatcctggatgacaaaagaccccacgtcaaaaaggctaccccaaggatgatcggccttacggtaggtttcgacaagaaagacatgatggacattaaataccgcaaggttcgcgatggttgcgtcaccgatgccgtctttcaagagatgtacatctgtgcttctgttgaattcctccagactgtcgctaacgtcttcctcgaagcttacacaactggcactgctgtggagacaagcgtgcagacctggacagccaaagaagaagtccctactcaggaaagcgtcaagtgggaaatcaatgtcataattaagaatccagagattgttttcgtagcagacatgacgaaaaatgatgcccccgctctggtgatcaccacccaatgtgaaatttgttacaaagggaacctcgagaacagcacaatgactgccgctattaaggacctccaggttcgtgcctgtccattccttcccgttaagcggaagggtaagatcactacagttctgcagccttgtgacttattttatcagactacacagaaaggcacagacccccaagtaattgacatgagtgtcaagtcactcaccctgaaggtgtcacctgttattatcaacacaatgatcactattacgtcggcgctgtatactaccaaggaaactatccctgaggaaaccgcctcttctaccgcccacctgtgggaaaagaaagatactaagactctaaagatgtggtttctggaggagtccaacgagacggagaagatcgcgcccactaccgaattggtccctaagggagagatgattaaaatgaacattgacagtatcttcattgttttggaggcaggaattggtcaccgtactgtgcctatgttgcttgccaagagtaggtttagtggcgaaggcaaaaattggtcaagcctgataaacctgcattgtcagctggaacttgaagtccattactacaacgaaatgttcggggtttgggaacccctcctcgagccacttgaaatagaccaaaccgaagactttcgtccgtggaacttgggcatcaaaatgaagaagaaagcaaagatggctatcgttgaatccgatcctgaagaggaaaattataaggtccctgagtataagactgtgatctcttttcacagcaaggaccaacttaacatcaccctctccaaatgtgggttagtaatgctcaacaatctggtgaaagctttcacagaggcggcaactggctccagcgctgacttcgtgaaagatctggctcctttcatgatcctgaattcccttggacttactatttccgtttcaccttctgactccttctcggtgctgaacataccaatggcaaagagctatgtcttaaagaacggcgagtcactttccatggactacattcgcactaaggacaacgaccatttcaacgccatgacatcactgagcagcaaactgttcttcattctactgacacccgtgaaccacagtaccgccgacaagatacccttaaccaaggttggccgcagactgtatacagtgcggcatagggagtccggagtggagaggagtattgtctgtcagattgataccgtagagggaagtaaaaaagtcaccatccggagccctgtacagattaggaatcatttcagtgtgcccctcagcgtttacgaaggcgatacactgcttggcactgcatctcctgagaatgagttcaatatccctcttggatcctaccggtccttcatattcctcaagccggaggacgaaaactatcaaatgtgcgagggtatcgactttgaagaaattatcaaaaatgatggggcgctgctgaaaaaaaaatgccgaagcaagaatccatcaaaggagtcgtttttgatcaacattgtgcccgaaaaagacaatctgacatcgttaagtgtctacagcgaggacggatgggatctcccatacattatgcacctctggcccccgatcctactgagaaatcttctgccttacaagattgcctactacatcgagggtatagaaaactctgtctttactcttagtgagggtcacagcgctcaaatctgtacagcccagctcggcaaggcgcgactccatttaaagctcctcgactatcttaaccacgattggaaatccgaataccacatcaaaccaaatcaacaggacatttccttcgtatccttcacttgtgtcaccgagatggagaaaactgacttggatatcgcggttcacatgacctataacactggccagaccgtggttgcattccactccccgtattggatggtgaacaagacaggccgaatgctgcagtataaggctgatgggatccaccggaaacacccaccaaactataagaagccggttttgttttcattccaacctaatcatttcttcaacaataataaggtgcagttgatggttaccgattctgagctgagtaatcagtttagcatcgacactgtggggagtcacggcgctgtaaaatgcaaggggctcaagatggactaccaggtaggcgtcacgatagatttgagttcctttaatataaccaggattgtgacatttacgccattttacatgatcaaaaacaagagtaaataccacatctctgtggccgaagagggtaacgataagtggctcagtctggacttggagcagtgcattcccttttggcccgaatacgcttccagtaagctcctcatccaagtcgaaagatctgaggacccccccaagaggatttacttcaacaagcaggagaattgcatattgttacggctcgataatgagctcggaggaatcatagctgaggtgaacctggccgaacattccaccgtgataactttcctcgactaccatgacggcgccgccactttccttctgatcaatcacacaaaaaatgaactggttcaatacaaccagtcgagtctgtctgagatcgaggactcactacctcccggtaaggccgtattctacacttgggcggatccagtgggtagtcgcaggctgaaatggcgatgtaggaagagccacggcgaggttacacagaaggacgacatgatgatgcccattgatttgggtgagaaaaccatctatcttgtatcattctttgagggcttgcagcggattatactgttcacagaggatccacgtgtattcaaggttacatatgaaagtgaaaaggctgaactggcagagcaggagatcgctgtcgcccttcaagacgtcggcatctcccttgtgaacaactataccaaacaggaggtggcttacattggcatcacaagcagtgatgtagtttgggagaccaaacccaaaaagaaggcccgatggaaacccatgtcagtgaagcacaccgagaagctcgaacgggaatttaaggagtacactgagtccagcccttctgaagataaggtaatccagctggatactaatgtcccagtgcgcttgactccaaccggccacaatatgaagatcctacagcctcacgtgatcgcactgcgtaggaattaccttccagctctcaaagtggaatataacacatctgctcaccagtcttcattccggatacaaatctaccgcattcaaatacagaatcagattcatggtgctgtgtttccttttgttttttatccggtgaagcctcctaagtcggttacgatggattcagccccgaagccttttacagacgtgagtattgtgatgcggagcgcgggccacagccagatctctcgcattaagtacttcaaagtgcttatccaagagatggatctgagactcgatctggggtttatttacgctctgaccgatctcatgaccgaagcagaagttaccgagaacaccgaggtggagctgttccataaggacattgaagcatttaaagaagagtataagaccgcgtcactggtcgatcagtctcaggtctctctgtacgaatacttccatattagcccaattaagttgcatctcagcgttagcctctctagcggacgagaagaagctaaagattccaaacaaaatgggggcctcatccccgttcactctttaaacttgctgctcaagagcataggtgccactctcactgacgtgcaagacgtagtatttaagctcgctttcttcgaactgaactatcagttccatactacatccgaccttcagtcagaagtaatacgccactactccaagcaggccatcaagcaaatgtacgttttgattctgggcctggacgtgttagggaacccttttggcctcattcgcgagttttccgaaggagtagaggcatttttctacgagccataccagggcgcaatacaaggccccgaagagttcgtggaggggatggccttaggcctcaaagctttagtgggaggcgccgtgggcggcctcgccggggctgctagtaagattactggggccatggcaaaaggcgtggcagcaatgacaatggacgaggactaccaacagaaaagaagagaggctatgaataaacaaccggccggattccgagaggggattacacgtgggggaaagggacttgtctccggtttcgtcagcggaatcaccggcatcgtcaccaagccgatcaagggtgcccagaaggggggagccgcaggcttctttaagggggtcggaaagggcctggttggtgctgtcgcccggcctaccgggggcataattgacatggccagtagcacgtttcagggaattaagcgagcaacggagacatctgaagtcgagagccttcgtcctccacgattcttcaacgaagacggcgtgattcgtccttaccgacttagagacgggaccggtaaccagatgctgcaggcatctaaaagtctcatttag

SEQ ID NO: 26884 - DNA, 9408 bp, synthetic construct
  misc_feature 1..9408: note = Description of Artificial Sequence: Synthetic coding sequence
  source 1..9408: mol_type = other DNA
atggtgttcgagagcgtggtggtggacgtgctgaaccggttcctgggagactatgtcgtggatttggatacctcccagctgtctctcgggatctggaagggtgctgttgccttaaaaaatctgcagataaaagaaaatgctctgtcacagctcgacgtgccattcaaggtaaaggtcggccacatcgggaatctgaaattaattatcccctggaaaaatttgtatacacaacctgttgaggccgtgctggaagagatatatcttcttatagtgcccagcagccgcatcaagtacgatccgctgaaagaggaaaagcaactcatggaagctaaacagcaggaactcaagaggatcgaggaagcaaaacaaaaggtcgtcgaccaagagcagcatctgccagaaaagcaggacacattcgctgagaaactagtgacccagattattaaaaatctgcaggtgaaaatctcttctatacatattaggtacgaggatgacattacaaaccgggacaagccactgtctttcggcatatcattgcaaaatctttccatgcagactacagatcaatactgggtgccttgcctgcatgatgagacggagaagttggtacgtaagttgatcagacttgacaacttgttcgcatactggaacgttaagtctcagatgttctatttgtctgattatgataacagcctggatgacctgaaaaacggaatcgtgaacgagaacatcgtgcctgagggatacgatttcgtgttcagaccgatcagtgctaacgccaagctcgtgatgaaccgacgatcagacttcgatttcagcgcaccaaaaattaaccttgagatagaattgcataacattgccatagagttcaacaaaccacaatatttttctatcatggaacttttggagtcagtggatatgatggcacagaatcttccttatcggaaattcaagccagacgttcccttgcaccatcatgcacgtgagtggtgggcatatgctatccatggcgtattggaggtaaatgtgtgcccaaggctctggatgtggtcttggaagcatattcgaaaacatcgtcagaaagtgaaacaatacaaggagctttataaaaagaaattgacgagtaaaaagccgccgggagagctgctggtctctctggaagaacttgagaaaactttggatgtgtttaatataacaattgcccgtcagaccgcagaagtggaggttaagaaggctgggtataagatctacaaagagggtgttaaagacccggaggacaataaagggtggttctcttggctgtggtcttggagtgagcagaatactaacgagcaacaaccagatgttcagcccgagactttggaagaaatgctgacccccgaagaaaaggcactcctctacgaggccatcgggtactcagaaaccgctgtagatccgaccctgctcaagacatttgaagctcttaaattttttgtgcacttaaagagcatgagtatagttttaagagagaatcatcagaagcccgaactggttgacatagtcattgaggaattctcgaccttaattgttcagcgtcccggcgcccaggcaatcaagtttgaaactaaaatcgacagctttcatattaccggattgcctgataactcggaaaagccgcgattgctaagttccctcgacgatgccatgtcactgttccagattacatttgagataaatcctctcgacgagacagtcagccagcggtgcattatcgaggcggaaccccttgagattatatatgatgcacggaccgtcaatagcatcgtggagtttttccggcctcctaaagaggtgcatttagcccagcttacagccgcaacactgaccaaacttgaggagttcaggagtaagacagctactggactgctgtacattatagaaactcagaaggtgctggacttgaagattaacctcaaagccagctacataatcgttcctcaggatggcatcttcagccctacaagcaatctccttctcctagatctgggacacctcaaagtaaccagcaagtcgaggtcagagctgccagatgtaaaacaaggggaggcgaatctgaaggaaatcatggatcgagcttacgattcgttcgatatccagttaacctccgtgcagctgttatactcccgcgtgggggacaactggagggaggcgcggaagttatccgtgtctacacagcacattttagtaccaatgcacttcaatctggaactgagcaaagccatggtgttcatggacgtgagaatgcccaaatttaagatctacgggaaactgcccctgataagcctgcggattagtgataaaaaactgcaaggcattatggagctgatcgaaagcatccccaagcctgaaccagtaaccgaagtatccgcaccagtgaaatcatttcagatccagacctcaacctccctgggcacgtctcagatctcacaaaaaatcatccctctgctggagctccccagcgtgtcagaggatgactcagaagaagagttctttgatgcgccctgctctcccctggaagagccactgcaattccccactggcgtcaaaagcattagaaccagaaaactacaaaagcaggactgttcggtcaacatgaccacgttcaagattagatttgaggtgccaaaagtactgatagagttctaccatctggttggcgattgcgagctctcggttgtcgagatcctggtcctcggactgggcgcagagattgagatccggacttatgacctgaaagcaaatgcttttctaaaagagttttgtcttaagtgtcctgaatacttggacgaaaacaagaaacccgtctatcttgtgacgaccctcgataacaccatggaagacctgctgactttagagtatgttaaggcggagaagaacgtgcccgatctcaaaagtacctacaacaacgttctgcaactcattaaggtcaactttagcagcctcgatatacacttgcacacagaagccttgcttaatactataaattatctgcacaatatccttccacagagcgaggagaagagtgcccccgtaagcacaacggaaactgaggacaagggtgacgttatcaaaaaactgggtctggactctgaaatgataatgcgcccttctgagactgagatcaatgccaaattgcgtaacattatagtgctggacagcgatatcactgcaatctacaaaaaagccgtttacataacaggaaaggaagtcttctctttcaaaatggtgtcgtacatggatgccacagcaggcagcgcctatacagatatgaacgtggtcgatatacaagtgaaccttattgtaggatgtatagaagtggtgtttgtaacgaagttcttgtactcaattttagcttttattgacaatttccaggcggccaagcaggctctcgcggaggccaccgtacaggctgccggaatggcagctacaggagttaaggagctagcccaacgcagttctaggatggccctggatattaacatcaaagcccccgtagtggtcattccacaatcacctgtctccgagaatgtattcgtggcagactttggactgatcacaatgaccaacactttccacatgattaccgaatcgcagtcaagtcctccacctgtcattgatttgatcaccattaagttgtctgaaatgcgcctgtacaggagtagattcattaatgacgcatatcaggaggtgctcgatctgctgctgccactaaatctcgaggttgtggttgagaggaatttatgttgggaatggtaccaggaagtcccctgcttcaacgtaaacgctcaattaaaaccaatggagtttatcctcagccaggaagatattactacgattttcaagactttgcacgggaatatatggtacgagaaagacgggagcgctagtcctgccgtcaccaaggaccagtactccgcgactagtggagtcactactaacgctagtcatcatagcgggggggctaccgtggttacggctgctgtcgttgaggtgcactccagggctctgctggtaaagaccacgctgaatatcagtttcaagaccgatgacctgaccatggttttgtatagtccgggccccaagcaggcgtcttttaccgatgtgcgagatccatcactgaagctcgccgaatttaagttggaaaatattatttcaacattaaagatgtataccgacggctccaccttctcttcattttccttaaagaattgcatcttggacgataagcgtccccacgtgaaaaaagctaccccgaggatgatcggcctgacagtgggctttgacaaaaaggacatgatggatattaagtacaggaaggtccgagacggttgcgtgacagatgcggtattccaggaaatgtacatctgtgccagtgtagagttcttgcagaccgtggccaacgtctttcttgaggcatacaccaccggcactgcagtagaaacctcggtacagacatggacagctaaagaggaggtcccaacccaagagtccgtgaaatgggaaattaatgtaattatcaagaacccggagatagtgttcgtcgccgacatgaccaaaaatgatgctcctgctctggttatcactacacaatgcgagatatgttacaagggaaatctggagaattctacgatgactgcagccataaaagatctgcaggtgcgcgcgtgccccttcctacctgtaaaacgaaagggtaagattacaaccgtgctgcagccctgtgacctgttctaccagactacacagaaggggacggacccccaagtgatcgatatgagcgtcaaatcccttactcttaaagtctcacctgtgatcatcaatacaatgattacaataacttcagctttgtataccactaaagagaccataccagaggagactgcttccagtacggcccacctgtgggaaaagaaagatactaagacgctcaagatgtggttcctcgaagagtctaatgagacagaaaaaatcgcacccaccactgagctggtgccaaagggcgaaatgattaagatgaatatcgactctattttcatcgtgttggaggccggtatcggacatcgcaccgtacctatgctgcttgccaagtcgagattttctggagaagggaagaactggtcttccctgataaacctgcactgtcagttggagctggaagtccattattacaatgagatgttcggagtttgggagccactcctggagcctctggagattgaccagacggaggacttcagaccctggaatctcggcatcaaaatgaagaagaaggccaagatggccattgtggagtcagatcctgaggaggagaactacaaggttcccgaatacaagaccgttatctctttccacagcaaggaccagcttaatattacgctcagcaagtgcggccttgtgatgctcaacaatctcgtgaaagctttcacagaagccgctaccggctcttctgctgactttgtgaaggacctcgcacccttcatgatcttaaacagccttggcctgacgatctctgtgagtccgtctgactctttctctgttttaaatataccaatggctaagtcctatgtgctgaaaaatggagagtcattgtccatggactatattcggacaaaagataacgatcatttcaacgccatgacatcgctcagctcgaaattgttttttatcctgcttacgcccgtcaaccattctacggctgacaagatcccgctgacgaaggtaggaagaagattatataccgttaggcacagagaatcaggagtagagcgatcaattgtgtgtcagatcgataccgttgagggttctaagaaagtgaccatccgcagcccagtgcaaatccgtaaccacttcagtgtgccccttagtgtgtacgagggcgataccttacttggcactgcatcacctgaaaacgaatttaatattccactgggaagctatcgcagcttcattttccttaagcctgaggatgaaaattaccagatgtgtgaaggaatcgatttcgaggaaataattaaaaacgacggcgccctgttaaagaagaagtgccgctccaaaaacccaagtaaagaatctttcctgatcaatatcgtgcctgagaaagataacctgacaagccttagtgtgtacagcgaggacggctgggacttgccttatattatgcacctgtggcctccaattcttctaagaaatctgctgccttataagatcgcctattacattgagggaatagagaactctgtgtttacactgtctgagggccattctgcccaaatctgcactgcacagctgggaaaagcccgcctgcacctcaagctgctggactatctgaatcatgactggaagagcgaataccacatcaaacccaaccagcaagacatcagtttcgtcagctttacttgtgtgactgagatggagaaaacagatcttgatatcgccgtccacatgacatacaatactggacagaccgtcgtggcctttcatagcccctactggatggtgaacaagaccggccggatgttgcagtataaagcagatggcatccacaggaagcaccctccaaactacaagaaaccggtactcttcagtttccaaccaaaccacttttttaacaataacaaagtacaactcatggtgacagattcggagcttagtaaccaattctctattgataccgttggatctcacggagcagtgaagtgcaaaggcttgaagatggattaccaggtgggagtaaccatcgacttaagttcttttaatattactaggattgtgacattcactcctttctacatgatcaaaaacaagtccaagtaccatatctctgtggccgaagaagggaacgataaatggctgtctttggatctagagcagtgtatccctttttggcctgaatatgcatcctccaaactgctcattcaggtcgagaggagcgaagaccctcccaaacgtatatatttcaataaacaggaaaattgtatcttgctcaggctcgacaacgaactcggtggtatcattgctgaggtgaacctggccgaacattctactgttattacgttcttggattatcatgatggcgcagcaaccttcctcctcatcaaccatactaagaatgagctggtacagtataaccaatcctccctgtcagaaattgaggactccctcccaccaggtaaggccgtgttctacacgtgggcagatccagtgggatctaggagactgaagtggagatgcagaaaatcccacggcgaggttacccaaaaggacgacatgatgatgcctattgacctgggcgagaagacaatctacctcgtgagctttttcgaaggactacagaggatcattctgttcaccgaggatcccagggtctttaaggtgacttatgaatccgaaaaagccgagttagcggagcaggagattgccgtcgcgctgcaggacgtggggatcagcttagtaaataactataccaagcaggaggtggcctatattgggatcacatctagtgacgtagtctgggaaactaagcctaagaaaaaagctcgctggaaaccgatgtcggtgaagcataccgagaaattagaaagggagtttaaggagtatacagaatctagcccatccgaagataaggtgatccagctggacacgaatgtgccagtccgattgacaccgaccgggcataacatgaagatccttcagccccatgtaatcgccctccgaagaaattacttacctgcccttaaagtagagtacaacacttccgctcaccaatcaagcttcaggatccagatttaccgaatccaaatacagaaccagatccatggtgcggtcttcccatttgtgttttaccccgtgaagcccccaaaaagcgtgactatggactccgcacctaagccctttacggatgtaagcatcgtgatgcggagcgctggccattcccagatttccagaataaaatatttcaaagtcctgatccaggagatggatctgcgcctcgacttgggcttcatttacgcactgacagaccttatgacggaagcagaggtgacagagaatactgaagtggagctatttcataaggacatcgaggcattcaaagaggaatataaaaccgctagcttggttgaccaatctcaggtcagcctatatgaatacttccatatatctccaattaagctgcatctgagtgtgagcctgagttcaggccgcgaggaggccaaggatagcaagcagaacggcgggctgatacccgtgcactctttgaatctactgctcaaatctataggagctaccctgaccgacgtgcaagacgtcgtctttaagctggctttttttgaactgaactatcagttccacaccacctctgacctgcagtcagaggtcatccgacactatagtaaacaagccattaagcagatgtatgtcctcattctaggtttggacgttctgggtaaccctttcggtcttattcgcgaattcagcgaaggagtggaggcattcttctacgagccttatcagggtgccatccagggacccgaggaattcgtcgaaggcatggccctgggcctgaaggccctggtggggggggcagttggtggattagcaggcgcagcctccaagatcacaggcgccatggcaaagggggtggccgcgatgaccatggacgaggactaccagcagaaaaggcgagaggctatgaataagcaacccgcaggttttagggagggcatcactcgtggagggaagggacttgtgagcggtttcgtgtctggaataaccggcattgtaacaaaaccaataaagggggcccaaaagggcggtgccgcaggcttctttaagggcgttgggaagggcttagtgggtgcagtcgcccgcccaactggaggcatcattgacatggcaagcagcacctttcagggaatcaagagagcaaccgaaacatcagaagtggagtcattaaggccccctaggttctttaatgaggacggtgtgattaggccataccggctacgggacggtaccggcaaccagatgctacaggtgatggaaaacggtcggttcgccaagtataagtacttcacacacgtgatgattaataagaccgatatgttgatgatcacgcggcggggcgtgctgtttgtcaccaaggggacctttggccagctgacatgtgaatggcagtacagcttcgatgaattcaccaaggaacctttcattgtgcatggccggcggctgcggatcgaagcgaaagagcgagttaaaagcgtgtttcatgcacgggaatttggcaagattatcaactttaagaccccagaggacgcaaggtggatcctaacgaagctccaagaagctagggagccctctcctagcttatag

SEQ ID NO: 26885 - DNA, 1317 bp, synthetic construct
  misc_feature 1..1317: note = Description of Artificial Sequence: Synthetic coding sequence
  source 1..1317: mol_type = other DNA
atgaacgaggtgagcgtgatcaaggagggctggctgcacaagcggggtgaatacatcaaaacctggcgtccgcgctattttctgcttaagtctgatggatcgttcatcgggtacaaagagcgtcctgaagcgccagaccaaactctccctccacttaataacttctcagtggccgagtgtcagcttatgaagaccgagcggccccgccccaatacttttgtaataagatgcctgcagtggaccactgttatcgagcgtacctttcacgtggactctccagacgagagggaagagtggatgagggcaatacagatggtggctaattccctcaagcagagggcaccaggcgaagacccaatggattataagtgtggttcccccagtgactcctcaaccacggaggaaatggaggtagccgtgtcaaaggcccgggccaaagtgaccatgaacgattttgactacctgaaattactcggcaaagggactttcgggaaggtgattcttgtgcgggagaaggccactggccgatattacgccatgaaaatcctgagaaaggaagtcattatcgctaaggatgaagtggcccataccgtaacggagtctcgtgtgttgcaaaacacaagacaccccttcctgaccgcactgaagtatgcttttcagacccacgaccgtctgtgcttcgttatggaatatgccaatggaggggagctgttcttccatctcagccgtgagagagtttttaccgaagagcgggctagattttacggtgcagagatcgtgtccgccctggagtatctccactctcgggatgtcgtgtaccgagatattaaggtattagaggacaacgattacggcagggccgtggactggtggggcctcggtgtggtaatgtatgaaatgatgtgcggacgcctacccttctacaatcaggaccacgagcggctgttcgaactgatcctcatggaggagatacgattccctcggactctatcacccgaggctaagtccttgttggccggcttactgaagaaggatcctaaacaaagattgggcggtggccctagcgatgcaaaagaagtcatggagcatcgcttctttctgtccatcaattggcaagatgtggtgcaaaagaagctgctacccccatttaagccacaggtgacaagtgaggtggacactagatacttcgatgacgaatttaccgctcaaagcatcaccattacaccccccgataggtacgacagcctggggctgctggaacttgaccaaagaacccactttcctcagttttcctacagcgctagcatcagggaatag

SEQ ID NO: 26886 - DNA, 444 bp, synthetic construct
  misc_feature 1..444: note = Description of Artificial Sequence: Synthetic coding sequence
  source 1..444: mol_type = other DNA
atgcggtgcctgagcagcaagaaggccggcagcaccagcgtggtgaagtacatcaagacctggcggcctaggtatttcctgttaaaaagcgacgggtcctttattgggtacaaggagagaccagaagcccctgaccagaccctgcctcctctaaacaacttttctgtggctgaatgtcagttgatgaagactgagcgccccaggccaaatacctttgttattcgctgtctgcagtggacaactgtaatcgaacgaacctttcatgtggactctcctgacgaaagggaggaatggatgcgcgccatccagatggtggcgaatagcttacagccgcacctgtgcgcccaaacccggatctggaagaccccccccccagcccaggcctgggccgtggggcgtcttgaaatccaggttctgatacatacctccccatccgagggctag

SEQ ID NO: 26887 - DNA, 1149 bp, synthetic construct
  misc_feature 1..1149: note = Description of Artificial Sequence: Synthetic coding sequence
  source 1..1149: mol_type = other DNA
atgcgggccatccagatggtggccaacagcctgaagcagcgggcccctggcgaggatcccatggattacaaatgcggcagtccatctgatagttctaccaccgaagagatggaggtcgctgtcagcaaggcacgtgcaaaagttactatgaacgatttcgattatcttaagcttctcggcaagggcactttcggcaaggtgattttggtccgggagaaggctactggtcgatattacgccatgaagattctgaggaaagaagtgatcatcgctaaggacgaagtggcccacaccgtgaccgaatccagggtactgcagaacacccgccatccgtttttaaccgcacttaagtacgctttccagactcacgacaggctgtgttttgtgatggagtacgctaacggtggcgaactcttttttcatctgagccgcgagcgagtgtttacagaggagcgcgcaagattctacggcgctgaaatcgtttcagcactcgagtatctgcactcacgggacgttgtttaccgtgacattaagctagaaaacctcatgctggacaaggacgggcacatcaaaattaccgacttcggattgtgtaaggaaggcatcagtgacggagcaactatgaagactttctgcggaacccctgaatacctggctccagaagtgttagaggacaacgattacggaagggctgtggactggtggggcttgggtgtggtcatgtacgagatgatgtgcggacgactgcctttctacaatcaggaccacgagcgtctgttcgaactgattcttatggaagaaatcagattccccaggactctttctcctgaagccaagagcttactggccggtcttctcaaaaaggacccaaaacagaggctcggcggcggcccctctgatgcaaaagaagtcatggagcaccgcttctttttgtctattaactggcaggatgtagtccaaaagaagctactcccaccctttaagccccaggtcacatccgaggtggatactcgatactttgacgacgaattcacagcccaatctatcacaataacgcctccggatagatacgacagtctggggctactcgaacttgatcagaggacgcatttccctcaattcagttactccgctagtatccgcgaatag

SEQ ID NO: 26888 - DNA, 402 bp, synthetic construct
  misc_feature 1..402: note = Description of Artificial Sequence: Synthetic coding sequence
  source 1..402: mol_type = other DNA
atgaacgaggtgagcgtgatcaaggagggctggctgcacaagcggggggagtacatcaagacgtggagacctcgttactttctgctaaagtcggacggatccttcatcggatacaaggagagaccagaggccccagatcagaccctccctcccttaaacaattttagcgtcgctgagtgccagttgatgaaaacagaaagaccaaggcccaatactttcgtgatcaggtgtctgcagtggaccactgtgatcgagcggactttccacgtggacagccctgacgagcgggaagagtggatgcgcgcgatccagatggtcgcaaatagtctcaaacaaagggctccaggagaagacccaatggactacaaatgcggaagtccttcagattcgtcaaccacgtag

SEQ ID NO: 26889 - DNA, 1446 bp, synthetic construct
  misc_feature 1..1446: note = Description of Artificial Sequence: Synthetic coding sequence
  source 1..1446: mol_type = other DNA
atgaacgaggtgagcgtgatcaaggagggctggctgcacaagcggggggaatacataaagacctggaggccccgctacttcctgctcaagagcgacggatctttcatcgggtataaggagagaccggaggcccctgaccagactttaccgcccttgaataatttcagcgtggccgagtgtcagctgatgaaaaccgaaaggcctagacccaacacatttgtgatccgctgcttgcagtggacaaccgtgatcgaaagaacttttcacgttgattcccctgacgagagagaggaatggatgcgagcgatacagatggtagccaattctctaaaacagcgggcacctggtgaagaccctatggactacaagtgtggaagcccgagtgattcttctacgaccgaggaaatggaggtcgccgtgagcaaggcccgggcaaaagtcaccatgaatgattttgactacctcaaactgttgggcaagggaaccttcggcaaagttattctggtcagggaaaaggccactgggaggtactacgcgatgaaaattctgcgaaaagaagtcatcatagccaaggacgaggtcgcacatacggtgaccgaatctcgggtccttcagaatacaaggcatcctttcctcactgccctcaagtatgcttttcagactcacgacaggttatgttttgttatggaatacgcaaatggcggagagctcttctttcatttgtctcgcgaacgggttttcactgaagaacgagcacggttctatggcgccgaaattgtatctgcattggagtacctccactcccgggacgtggtctaccgggacattaagctggagaacctgatgctagacaaggacggccacatcaagataactgacttcggattatgtaaagaaggtatttctgatggtgcaacaatgaagaccttttgcggaacacctgagtacctggctcccgaggtgctggaagataacgactacggcagagccgtggattggtggggattgggagtggtaatgtatgagatgatgtgcggaagactccccttttataatcaggaccatgagcggctgtttgagctgatcctcatggaagagattcgcttccccagaacgttatctcctgaggccaagtcactgctggccggactcctaaaaaaagacccgaagcaaaggctgggaggcggtccctctgacgcgaaggaggtgatggagcaccgcttttttttaagcatcaactggcaggatgtggttcagaagaagctgctgcctccatttaaaccacaggtgacttcagaggttgataccagatattttgatgatgaattcactgctcagagtatcactatcaccccacccgatcgctatgattcactaggcctcctggagctggatcagaggacacatttcccacagttttcctacagcgctagtatcagagaatag

SEQ ID NO: 26890 - DNA, 402 bp, synthetic construct
  misc_feature 1..402: note = Description of Artificial Sequence: Synthetic coding sequence
  source 1..402: mol_type = other DNA
atgaacgaggtgagcgtgatcaaggagggctggctgcacaagcggggagaatacattaagacttggcgtccgagatattttttgctcaagtcagatgggtctttcattggatacaaggaaaggcctgaagcacccgatcagaccttgccaccactcaataacttcagcgtagcggaatgccagctgatgaagacagagagacccagaccaaacacattcgtgatccgctgccttcagtggacaaccgttatcgagcggacttttcatgtggattctcctgatgaacgagaggaatggatgcgggctatccagatggtcgctaacagtctcaaacagagggctccaggagaggacccaatggactacaagtgcggtagtccaagcgactctagcaccacttag

SEQ ID NO: 26891 - DNA, 291 bp, synthetic construct
  misc_feature 1..291: note = Description of Artificial Sequence: Synthetic coding sequence
  source 1..291: mol_type = other DNA
atgaacgaggtgagcgtgatcaaggagggctggctgcacaagcggggcgagtacataaaaacgtggagaccccggtattttctactgaagagcgacggtagctttattggatataaagaacgccccgaagcccccgaccagaccttaccaccactgaacaatttttccgtcgctgagtgccagctcatgaagactgagcgcccgaggcctaacacttttgtgatccgttgcctgcagtggaccactgtcatcgagcgcacattccatgtggattctcccgatgaacggtag

SEQ ID NO: 26892 - DNA, 360 bp, synthetic construct
  misc_feature 1..360: note = Description of Artificial Sequence: Synthetic coding sequence
  source 1..360: mol_type = other DNA
atgaacgaggtgagcgtgatcaaggagggctggctgcacaagcggggggaatacattaagacctggagaccgcgctactttctgctgaagtctgacgggagctttatcggctacaaggagagaccggaggctccagaccagacactacctcccctgaacaatttctcagttgccgaatgccaattaatgaaaaccgagagaccccgccctaacacgttcgtcattcgctgtctgcagtggaccactgtgatcgagagaacatttcacgtggacagccctgacgagcgagaggagtggatgcgtgcgatccaaatggtcgctaacagtctgaagcagcgggcccctggcgaggacccctag

SEQ ID NO: 26893 - DNA, 1446 bp, synthetic construct
  misc_feature 1..1446: note = Description of Artificial Sequence: Synthetic coding sequence
  source 1..1446: mol_type = other DNA
atgaacgaggtgagcgtgatcaaggagggctggctgcacaagcggggcgaatacatcaaaacttggcgcccacggtatttccttctcaagtctgatgggtcgtttatcggatataaagagcgcccggaagcccctgatcaaactctgccgcccttaaataacttttcagtggcagagtgccagttaatgaaaacagagcggcctagacccaacacattcgttatcagatgtctgcagtggaccacggttatcgaacgcacattccacgtagactcccctgatgagcgcgaggagtggatgcgtgctattcaaatggttgctaactctctgaaacaaagagcccccggagaggaccctatggactataaatgcggaagtcccagtgactcgagtaccactgaggaaatggaagtcgctgtttcaaaagcacgggcaaaggtgacgatgaacgattttgactacctgaaactcctaggtaagggcactttcggaaaggtgattctcgtgcgagagaaggccactgggcgttattatgccatgaagatcttgcggaaggaggtcatcattgccaaggatgaggtggcgcatactgtcacagaaagtcgcgtcctgcaaaacaccagacacccttttttgaccgccctgaagtacgcttttcaaacacacgatcgactatgttttgtcatggagtacgccaacggcggggagctcttcttccacctcagccgcgaacgtgtatttaccgaggaacgcgctagattttatggagcagagatcgtctctgccctggagtacctccattcccgcgacgtagtctacagggacatcaaactggagaatctcatgctagacaaggatggtcacatcaagataacggactttggcctgtgtaaggagggcataagcgatggagccaccatgaaaactttttgcgggacccccgagtatcttgcccctgaggtattggaagacaatgactatggaagggctgtggattggtggggcttgggtgtcgttatgtacgagatgatgtgcggcaggttacccttctacaatcaagaccacgaacgactttttgagcttatcttaatggaggagattcgatttccacgaacactgtcccctgaggcaaaatctctgctggcgggactgctaaagaaagaccccaagcagcgcctgggcggtggaccttccgacgcgaaagaagtcatggaacatcggttcttcttgtctatcaattggcaggatgtggtccagaaaaagttgctcccccctttcaagccccaggtgacctctgaagtagatacacgctatttcgacgacgagttcacagcccagtcaattaccatcacgcctcccgatcgctatgacagtctggggctgctcgaactggatcagagaacacacttcccccaattcagttatagtgcttcaatacgagaatag

SEQ ID NO: 26894 - DNA, 204 bp, synthetic construct
  misc_feature 1..204: note = Description of Artificial Sequence: Synthetic coding sequence
  source 1..204: mol_type = other DNA
atgaacgaggtgagcgtgatcaaggagggctggctgcacaagcggggcgaatacattaagacctggagaccacgctatttcctcctgaaatctgatggctcctttatcggctataaagagagacctgaagcaccagaccagactctccccccactgaataactttagtgttgcggagtgtcagctaatgaagacagagaggtag

SEQ ID NO: 26895 - DNA, 144 bp, synthetic construct
  misc_feature 1..144: note = Description of Artificial Sequence: Synthetic coding sequence
  source 1..144: mol_type = other DNA
atgaacgaggtgagcgtgatcaaggagggctggctgcacaagcggggggagtatattaagacgtggcggcctcggtacttcctgctgaaatcggatggctcgttcatcggctataaagagcgccctgaagctcctgaccagtag

SEQ ID NO: 26896 - DNA, 405 bp, synthetic construct
  misc_feature 1..405: note = Description of Artificial Sequence: Synthetic coding sequence
  source 1..405: mol_type = other DNA
atgaacgaggtgagcgtgatcaaggagggctggctgcacaagcggggggaatacattaagacctggcggcctagatattttctcctgaaatccgatggctcattcatcggctacaaagaacggccagaggcacccgatcagacactgcctcctttaaataacttctctgtcgccgagtgtcagctgatgaaaacagagcgcccgaggccaaacacgttcgtgattcgctgcctgcaatggacgacagttatagaacgaactttccatgtggatagccccgacgaaagagaagaatggatgagggcaatccagatggtcgccaactccttaaagcaacgcgctccaggcgaggatccaatggattacaagtgcggctctccatccgacagcagcaccacagagtag

SEQ ID NO: 26897 - DNA, 324 bp, synthetic construct
  misc_feature 1..324: note = Description of Artificial Sequence: Synthetic coding sequence
  source 1..324: mol_type = other DNA
atgaacgaggtgagcgtgatcaaggagggctggctgcacaagcggggagagtacatcaagacctggagaccccgctactttctcctgaagtcagacggctccttcataggctataaggagcgaccggaggcacctgaccagaccttgccccccttaaacaacttctccgtggctgagtgccagctaatgaagacagaacgccctcgccccaacactttcgtgattcggtgcctgcagtggaccactgtgatcgagaggacctttcatgtcgatagccctgatgagagagaagagtggatgcgcgcaatccagatggttgcctag

SEQ ID NO: 26898 - DNA, 867 bp, synthetic construct
  misc_feature 1..867: note = Description of Artificial Sequence: Synthetic coding sequence
  source 1..867: mol_type = other DNA
atgaacgaggtgagcgtgatcaaggagggctggctgcacaagcggggagaatatattaaaacatggcggcccagatactttctcctgaaatctgatggaagcttcattgggtataaagagagaccagaggcccccgatcagacccttccaccactcaacaatttctccgttgcagagtgccagctcatgaagactgagcgacctcggcccaacacttttgtgattcggtgtcttcagtggaccactgtcatcgagcggacatttcatgtcgattcccccgatgagagggaagaatggatgagagcaatccaaatggttgcgaacagtctcaagcagagggctccaggcgaggaccctatggattacaaatgcggttcgccaagcgatagcagtaccaccgaagagatggaggtggccgtttccaaagccagagccaaggttaccatgaacgatttcgattacctgaaattactcggaaaggggacctttggaaaagtcattctagtacgcgagaaggccacagggcgatactacgccatgaagatcctccgaaaagaggtaatcatagcaaaggatgaggtggctcacactgtgactgagagccgcgtgctgcaaaacacccgccatcctttcctgacagtctcttgtcctccattgccccgacagtgtgaagcgagcctgtggacggaactgcgggagcgagccttaattttttggtataaggcccagtcatggggcaggcccggggggcaaggtaaggtgctgctgagacctgccaaatcttcagaacctaggcacgtcgttggcgtctctcggcttggagagtgggagggggatagttttttcatcgatggggggttcatgtag

SEQ ID NO: 26899 - DNA, 1440 bp, synthetic construct
  misc_feature 1..1440: note = Description of Artificial Sequence: Synthetic coding sequence
  source 1..1440: mol_type = other DNA
atgagcgacgtgaccatcgtgaaggagggctgggtgcagaagcggggagaatatatcaagaactggaggccccggtattttctcttaaagacagacgggtcattcattggctataaggagaaacctcaggacgtggacctgccgtaccccttgaacaacttctctgtggccaagtgccaactcatgaagactgagaggcctaagcctaatacgttcattataaggtgccttcagtggaccaccgttattgaacggactttccacgtcgacacaccagaggaaagagaagaatggacagaggccatccaggctgtggcggaccggcttcaacgtcaagaggaagagaggatgaactgcagccctacttctcagatagataacattggggaggaagagatggacgcttcaactactcaccataagaggaaaaccatgaatgactttgattacctgaagcttctaggtaaaggaactttcggaaaggtgatcctggtgcgagagaaggcttccggtaagtactatgcgatgaagatactgaagaaggaggtcatcatcgccaaagacgaggtcgcccatactctcactgagtctagggtgttgaagaacacccggcacccgtttctgacaagcctcaagtactcctttcagactaaggaccgtctttgcttcgtcatggagtacgtcaatggaggcgagctgttttttcatctgtcccgggaacgcgtcttctcagaggatcggacccggttctacggtgcggaaatcgtgagcgctcttgactaccttcactccggtaagattgtgtaccgggacctcaagttagaaaacctgatgctcgacaaagacggtcacataaagataacagactttggattgtgcaaagagggaataactgacgcagccacgatgaagacattttgtgggactccagagtaccttgctcccgaggttcttgaagataatgactacggccgggccgtggattggtggggattaggggtagtaatgtacgaaatgatgtgcggcagactgcctttctataatcaggatcatgagaagctatttgagttaatcctaatggaggacataaaattcccgcggacgctttcaagcgacgctaagagtctcctgtctggccttctaatcaaggacccgaacaaaaggcttggcggcggacctgacgacgctaaagaaatcatgagacacagctttttttcgggcgttaattggcaggacgtgtacgacaaaaagcttgtgccccccttcaagccacaagtgaccagcgagactgacacaaggtacttcgacgaagagttcacagcacaaacaattaccattactccgcccgagaagtatgatgaggacggaatggactgcatggacaatgagcgaagacctcacttcccccagttttcttacagcgcaagcggccgtgaatag

SEQ ID NO: 26900 - DNA, 1398 bp, synthetic construct
  misc_feature 1..1398: note = Description of Artificial Sequence: Synthetic coding sequence
  source 1..1398: mol_type = other DNA
atgagcgacgtgaccatcgtgaaggagggctgggtgcagaagcggggggagtacattaaaaactggcggccccgatacttcctactcaaaaccgacggatcttttatcggatataaggaaaaaccacaggatgttgacctgccttacccccttaataatttttcagtggccaaatgtcagttgatgaagaccgagcgaccaaaacctaatacattcataatccggtgcctacagtggacgaccgtgattgaaagaacttttcatgtcgatacacccgaggaacgtgaggagtggacagaggccatccaagctgtagcggatcggctgcagcggcaggaagaagagaggatgaactgttctcctactagtcagatagacaatatcggtgaggaggagatggacgccagtactactcaccacaagcggaagacaatgaatgatttcgattacctcaaacttctcggaaaaggcacgtttggcaaagttattcttgttagggagaaagcctcagggaagtactatgccatgaagattttgaagaaggaagtgatcatcgccaaggatgaagttgcccacactctcaccgagagtcgggtgctgaagaacacccggcacccgttcctgacttccctgaagtactccttccagacaaaagatcgactgtgctttgtcatggagtacgtcaacgggggcgaactatttttccatttgtccagagagagggtgttctctgaagacagaacaagattttacggtgctgagatcgtgtccgctctcgattaccttcatagcggcaaaattgtctaccgagatttgaaacttgagaaccttatgctggacaaagacgggcatatcaagatcaccgattttgggctgtgtaaggagggaattaccgacgccgctacaatgaaaaccttctgtgggacacctgagtatttagctcctgaagtgctcgaggataacgactatgggagggctgtggactggtggggcctcggggtagtgatgtacgagatgatgtgtggaagattacctttttacaatcaggatcatgagaaactgtttgaattgatccttatggaagatataaagtttccaaggaccctcagctccgacgcgaagagcctcctttcaggactcctgattaaggatccgaacaaaaggttaggaggcggcccagatgatgccaaagagatcatgagacacagttttttctctggtgtgaattggcaggacgtctatgataaaaagctagttcctccattcaaaccacaagtgacttccgagactgatactagatattttgatgaggaatttactgctcagacaataaccataactccaccagaaaaatgtcagcaaagtgactgtggaatgctcggcaattggaagaaatag

SEQ ID NO: 26901 - DNA, 1440 bp, synthetic construct
  misc_feature 1..1440: note = Description of Artificial Sequence: Synthetic coding sequence
  source 1..1440: mol_type = other DNA
atgagcgacgtgaccatcgtgaaggagggctgggtgcagaagcggggagaatatatcaaaaattggaggcctaggtatttcctcctcaagactgatggctcgtttatcggatataaggagaagcctcaggatgtggatcttccttatccactgaacaactttagcgttgcaaagtgtcaactaatgaagacggagcgcccaaagcctaacacttttattataagatgtctacaatggaccacagtaattgagcgcacgttccatgtagacactccggaggagcgagaagagtggaccgaggcaatccaggcagtggcagataggctccaacggcaagaggaggagagaatgaactgttcccccacaagccagatcgacaatatcggggaggaagagatggacgctagtactacacatcataaacggaaaacgatgaatgacttcgactaccttaaactgctgggcaagggaactttcggcaaggtgatacttgttcgagaaaaggcttccgggaaatactatgccatgaaaatcttgaagaaggaggtgatcatcgcgaaggacgaagtcgcccacacattgactgagtccagagtccttaagaacacccggcacccatttctgacaagtctgaagtactcattccagacgaaagatcgcttatgtttcgtgatggaatacgttaatggcggcgagttgtttttccacctttcacgagagcgggtcttcagcgaggatcggacacgcttttacggcgcagaaatcgtgtcagcgctggattatttgcactcaggaaagattgtctaccgggacctcaagcttgagaacctgatgctggataaggatggccacattaaaattactgacttcgggctgtgcaaagaaggtattactgacgcggccaccatgaagaccttttgtggtacccccgagtatcttgctcccgaagtgctggaagataatgattacggtcgtgccgtcgactggtggggactgggggtggttatgtatgaaatgatgtgcggccgtctgccattctacaaccaggaccacgagaaactgtttgaacttattctgatggaggacatcaagttccccaggaccctcagtagcgacgccaaatcacttctttcaggtctcctcataaaagaccccaacaaaagattggggggcgggcccgatgatgccaaagagattatgcggcacagcttcttctccggtgtcaattggcaggacgtctatgataaaaagctggtgccaccctttaaacctcaggtgacgagcgagaccgacacccgctacttcgatgaggagtttacagcgcagacaataacgatcaccccgcctgagaagtatgacgaagacggaatggactgcatggataatgaaagacgcccccacttcccacagttctcttatagcgcaagcggcagggaatag

SEQ ID NO: 26902 - DNA, 1398 bp, synthetic construct
  misc_feature 1..1398: note = Description of Artificial Sequence: Synthetic coding sequence
  source 1..1398: mol_type = other DNA
atgagcgacgtgaccatcgtgaaggagggctgggtgcagaagcggggcgaatatattaagaactggaggcctcgatattttctcctcaaaacagacggaagctttatagggtacaaggagaaacctcaggatgtggatctgccttacccattgaacaacttcagcgttgctaaatgccagctcatgaagactgaacgtccgaaacccaacactttcattattcgatgcctacagtggactacagtcattgaaaggaccttccatgtggacacaccagaagagagagaggaatggaccgaagccattcaggctgtagccgaccggctccaacggcaggaagaggaaaggatgaattgttctccaacctcccagatcgacaacatcggggaggaggaaatggacgcatctacaacccaccataagcgaaagacaatgaatgactttgactatttgaaactcttgggcaagggcactttcgggaaagtgatactggtgagagagaaggccagtggaaagtattacgccatgaaaattttgaagaaagaagttattatagccaaggacgaagtggcccacaccctgacagagtctcgcgtcttgaaaaacacacgtcacccatttctcacttccctaaaatattcctttcaaaccaaagaccggctgtgctttgttatggaatacgtcaatggtggggagctattctttcatctgtctagggaaagggtttttagcgaagataggacgaggttctatggcgctgaaatagtatctgcactggactatctgcattccggcaaaatcgtgtaccgagacctcaagcttgagaacttaatgctcgataaggacggacacataaaaattacagacttcggactatgcaaagaaggcataactgatgccgctacaatgaagacgttctgcggaaccccggagtaccttgcccctgaggtgttggaagacaatgactacggccgcgccgttgattggtgggggttgggggtagtgatgtacgagatgatgtgtgggcgcttgccattctataaccaggaccatgagaagcttttcgagctgattttaatggaggatatcaaatttcccagaaccttgagtagcgatgccaaatctttactgtccggcctgctgatcaaggaccctaacaagcgcctcgggggcggccccgacgacgctaaagagatcatgcgacactcattcttcagtggtgttaattggcaagacgtgtatgacaaaaagttggtgccaccttttaaacctcaagtcacaagcgagaccgacacccggtatttcgacgaggagtttacagctcagactatcactatcacgccgccagaaaagtgtcaacagagcgactgcgggatgcttggaaattggaaaaagtag

SEQ ID NO: 26903 - DNA, 420 bp, synthetic construct
  misc_feature 1..420: note = Description of Artificial Sequence: Synthetic coding sequence
  source 1..420: mol_type = other DNA
atgagcgacgtgaccatcgtgaaggagggctgggtgcagaagcggggagaatatatcaagaactggcgacctagatatttcctgctgaagaccgacggttctttcatagggtacaaagagaagccccaggatgtggatctcccttaccctctgaacaacttttcagtagctaagtgccagctgatgaagactgaaaggcccaaacctaacacgtttattatacggtgccttcaatggacaactgtgattgagcggacttttcacgtggatactccagaggagcgggaagaatggaccgaggcgatccaggccgtcgccgacagattacagaggcaggaggaggaacggatgaactgcagtcctaccagccagattgataacatcggtgaggaagagatggacgcctcaaccacccactag

SEQ ID NO: 26904 - DNA, 624 bp, synthetic construct
  misc_feature 1..624: note = Description of Artificial Sequence: Synthetic coding sequence
  source 1..624: mol_type = other DNA
atgagccccctgctgcggcggctgctgctggccgccctgctgcagctggcccccgctcaggcccccgtgtcccagcccgacgcccccggacaccaaaggaaagtggtctcctggattgacgtgtacaccagagctacttgccagcccagggaggtggtcgtgcccctgaccgttgagctcatgggaacagtggcaaaacagctcgtgcccagctgtgtaaccgtacaacgatgcgggggctgctgcccagatgatggcttggagtgcgtgccgactggacaacaccaagtgcggatgcagatcctgatgataagatacccctcctcacagctgggagagatgtctctggaagaacactcacaatgcgaatgtagaccaaagaagaaagattccgccgtgaagcctgatagagcagccactcctcaccaccggcctcaacctcggtctgtccccgggtgggacagcgcacctggagccccatcgcctgctgacattacacatcctactccagccccaggcccttcggcccatgccgccccctctaccactagcgctctgactcccggaccagccgctgcagctgccgacgctgcggcttctagcgttgctaaaggaggggcctag

SEQ ID NO: 26905 - DNA, 567 bp, synthetic construct
  misc_feature 1..567: note = Description of Artificial Sequence: Synthetic coding sequence
  source 1..567: mol_type = other DNA
atgagccccctgctgcggcggctgctgctggccgccctgctgcagctggcgccagctcaggcccccgtgtcacaacccgatgctcctgggcatcagcgaaaagtcgtaagctggattgatgtctacacacgtgctacatgtcagcctcgcgaggtggtggtgcctcttacagtagagctgatgggtacagtcgcaaagcagctcgtaccctcctgtgtgacagtccagcgatgcgggggttgttgccctgacgacggtttggaatgcgtgcctacaggacagcatcaggtgcgaatgcaaatcctgatgatcagatacccctcctcacagcttggtgaaatgtctcttgaagaacatagccaatgtgagtgccggccaaagaaaaaagattccgcagtgaagccggatagcccaaggccactatgcccccgctgcacgcaacaccaccaaagacccgaccccagaacttgtaggtgtaggtgtcgcagacgcagtttcctccgatgccagggccgggggctggaactcaacccagatacttgccggtgtaggaagttaagacggtag

SEQ ID NO: 26906 - DNA, 1143 bp, synthetic construct
  misc_feature 1..1143: note = Description of Artificial Sequence: Synthetic coding sequence
  source 1..1143: mol_type = other DNA
atgagcgagaccgtgatctgcagcagccgggccaccgtgatgctgtatgatgatggcaacaagcgctggctacccgccggtactggccctcaagccttcagccgtgttcagatttaccacaacccaacggccaactcctttcgggtcgtgggtagaaagatgcagcccgaccagcaggtggttatcaactgcgctattgtccgcggtgtcaagtacaaccaggctacacctaacttccatcagtggagggatgccaggcaggtgtgggggctgaatttcggatcgaaagaggacgcagctcagtttgctgcgggaatggccagcgctctcgaggccctggaaggtggaggcccgcccccaccccccgccctcccaacatggtctgtccccaacggaccatcacccgaggaagtggagcagcagaagcgtcagcaacccggcccaagtgaacacatcgagcgccgtgtgtccaatgccggcgggcctccagctcctcctgctggtggacctccccctcctccaggccctccgccaccacctgggcctccgccacccccagggcttcctccatcaggagtgcccgctgctgcccacggtgctggtgggggcccacctccggctcctcccctccctgctgcacagggaccgggaggaggcggggccggtgctccgggcctggccgcggctattgctggcgcaaagttacgaaaagtgtccaaacaggaagaggcatccggaggccccacagcccccaaagcggaaagtggccggagcgggggaggtggcttgatggaggagatgaacgccatgttggccagacgccgaaaggcaacccaggttggcgaaaagaccccaaaagacgagtcagccaatcaagaggagcccgaagctcgagtgccggcccaaagcgaaagtgtgcgccggccatgggaaaagaacagtactacactgccgcgtatgaaatccagttcgtcagtgaccaccagtgagacgcagccatgtactccatctagctctgattatagtgatctccagagagtgaagcaggagttgctagaagaggtcaagaaagagctgcaaaaggtcaaagaggagataatagaagccttcgtccaggagctgcggaagcgcggaagcccctag

SEQ ID NO: 26907 - DNA, 915 bp, synthetic construct
  misc_feature 1..915: note = Description of Artificial Sequence: Synthetic coding sequence
  source 1..915: mol_type = other DNA
atggccggcaacttcgacagcgaggagcggagcagctggtactgggggaggctttccagacaggaagccgtggctctgttgcaaggacagaggcatggcgtgttcctggtccgagatagctccacctctcctggcgattatgttctcagcgtgagcgagaactcccgcgtatctcattatataatcaactcctccgggccccggcccccagtgcctccttctcctgcacagcccccacccggagtatccccgtcaagacttcgcataggtgaccaagagttcgactctctacctgctcttcttgagttctacaaaattcattatcttgatactactacactgatcgagccagttagccggagtcggcagggtagcggcgtgattctgcgacaggaagaggctgaatacgtcagagcgttgttcgacttcaatggaaatgatgaggaagacttaccatttaagaaaggtgatattctgcgcatcagggataagccagaggaacagtggtggaacgccgaggattctgagggcaagcgtggaatgattcctgtgccctatgtcgaaaaatatagaccggctagcgcttcagtgtctgcactaataggaggaaatcaagagggtagccatccgcagccactgggaggaccagaacccggaccctacgcccagccctctgtcaatactcccctacctaatctgcaaaatggccctatatatgcccgagtgattcagaagagggttcccaacgcctatgacaaaactgcgctggccttggaggtgggagaattggtgaaggtcacgaagatcaacgtgtctgggcagtgggaaggcgaatgtaatggcaaacggggtcactttccttttacacatgtgaggctcctagaccagcagaatcctgacgaagacttctcttag

SEQ ID NO: 26908 - DNA, 615 bp, synthetic construct
  misc_feature 1..615: note = Description of Artificial Sequence: Synthetic coding sequence
  source 1..615: mol_type = other DNA
atggccggcaacttcgacagcgaggagcggagcagctggtactgggggagacttagccgtcaagaagccgtggcccttctgcaagggcagcgccacggtgtgtttcttgtccgcgatagttccacctcaccgggggattatgtgctgtcggtttctgagaattcccgagtgtcccactacataatcaacagttctggcccgcgccctcccgtccccccaagccccgcacagccaccacccggtgtttccccatcgcgtctccgcatcggggaccaggaatttgattctctccctgctctgctggagttctataagattcactacttagacaccaccacactcattgaaccagttagccgcagccgtcaggggtctggtgtgatcctgcgccaagaagaggctgagtacgtgagggctctctttgatttcaatggtaatgatgaggaagacctgccttttaagaagggtgatattctaagaattcgggataagcccgaggaacaatggtggaacgctgaggattccgaagggaagcgcggaatgattccagttccttatgtggagaagtaccgccccgcaagcgcctctgtttctgctctgatcggagggagatag

SEQ ID NO: 26909 - DNA, 2196 bp, synthetic construct
  misc_feature 1..2196: note = Description of Artificial Sequence: Synthetic coding sequence
  source 1..2196: mol_type = other DNA
tgaaagcccgccaccggcctgtgggtgtgggtgagcctgctggtggccgcagggacggtccagccctctgacagccagtcagtgtgcgccggcacagagaataagctttcatccctgagcgatctggagcagcagtaccgggctctcagaaaatactacgaaaactgcgaggtagttatgggcaatcttgagatcactagtattgaacataaccgggacctgtcatttctgcgaagcgtacgggaggtcactggctatgtccttgtcgcgctaaaccagtttcgctaccttccactcgagaaccttaggatcattaggggaactaagctttacgaggatagatatgcgctggcgattttcttgaactataggaaggatggcaacttcgggctgcaggagctcggccttaaaaaccttaccgagattctgaatggcggcgtatatgtggaccaaaataaatttctgtgttatgccgatactatccactggcaagacatcgtcaggaacccatggccatctaacctgactctggtctctacgaacggatccagcggctgcggaaggtgccacaaatcctgcaccggtcgctgttggggtcccacagagaatcattgccaaaccttaacccggacagtttgcgcagaacagtgtgacggtcgatgttacggcccctacgtgtctgactgctgtcacagagagtgcgccggtggctgttctgggccaaaagatactgattgcttcgcttgtatgaacttcaatgacagtggcgcttgcgtcactcagtgcccgcaaacattcgtctataatcccacaaccttccagttagagcacaactttaacgctaaatatacctacggagccttttgtgtcaagaagtgccctcataacttcgtcgttgactcgtccagttgcgtgcgtgcttgcccaagcagcaagatggaggtggaggagaatggcattaaaatgtgcaagccatgtaccgatatttgccccaaggcttgcgatgggatcggcactggttcccttatgtctgctcaaacagtggactcatccaatatcgataaatttattaattgcaccaagattaacgggaacttgatttttttggtcaccggaattcatggcgatccctataatgcaattgaagccatcgaccctgaaaaattgaatgtttttcggacagtccgagaaattactggtttcctaaacatacagagctggccgcctaacatgaccgacttctctgtcttctctaatctggtcacaatcggtggcagggtgctctatagcgggcttagccttttgatcctgaaacagcagggaatcacctcgctgcaatttcaatctctcaaagagatctccgccgggaatatatatatcaccgataattcaaacctgtgctattatcatactataaactggaccaccctcttttccacaataaaccagcgaattgttatcagagataaccggaaagcagaaaactgtacagccgaaggcatggtgtgcaaccatctgtgcagttcagacgggtgctggggcccaggccctgaccaatgcttgtcctgtaggcgattcagccgcggcaggatttgtattgagtcatgcaatctttatgacggcgaattccgggagtttgagaatggatccatttgcgtggaatgcgatccacagtgcgagaaaatggaagacggccttctgacttgtcatggacctggacccgacaattgcaccaagtgctcccactttaaagatggccctaactgtgtggagaaatgtcccgacgggctgcagggcgcaaactctttcatttttaagtatgcagatccggatagagaatgccacccttgtcatccaaattgcactcagggctgcatcggctcaagcatcgaggattgcataggactgatggatcggactcccctgatagccgccggtgtaattggcggtctcttcatcctcgtaatcgtggggctgactttcgctgtctatgtcaggagaaagtccattaagaaaaaaagagccttgcggcggttcttggagactgagctggtggaacctctgacaccatcggggactgccccaaatcaggctcagctgcgcatattgaaagagactgagctgaagcgagtcaaggtgctggggtctggagctttcgggactgtctacaaagggatttgggtgccagaggggtag

SEQ ID NO: 26910 - DNA, 3927 bp, synthetic construct
  misc_feature 1..3927: note = Description of Artificial Sequence: Synthetic coding sequence
  source 1..3927: mol_type = other DNA
atgaagcccgccaccggcctgtgggtgtgggtgagcctgctggtggccgcagggacagtgcagccgtctgactcccagtctgtgtgtgctgggacagaaaacaagctatcctcactgagtgacctggaacagcagtacagagctctgcgcaagtactacgaaaattgtgaggttgtcatgggtaacctcgagatcacaagcattgaacacaacagagatctaagcttcctcagatcagtacgggaggtcactgggtacgtgctggtcgccttgaaccaattcaggtatttgccactagagaacctgcggattattcgcggcaccaagttatatgaagaccgctatgccctggccatctttcttaactacaggaaggatggaaacttcggcctgcaggagctgggtttgaagaacctgacagagatccttaacggcggggtctacgtggatcagaataaatttctgtgttacgccgatactattcactggcaggacattgtgcggaatccgtggcctagtaacctcaccctcgtgtcaactaacgggtcttctggatgcggacgttgccataagtcctgtaccggaagatgctggggaccaactgagaaccattgtcaaacactgacccgtaccgtatgcgccgaacagtgcgacggtagatgctatggcccctacgtgagcgattgttgccaccgtgagtgcgctgggggctgcagcggcccgaaggacaccgactgcttcgcctgcatgaacttcaatgactctggagcctgtgtcacacagtgtccacagacattcgtatacaaccctaccacctttcagctcgaacataactttaacgccaaatacacctatggagcattttgcgtgaagaaatgcccacacaacttcgtcgtcgatagcagcagttgcgtccgagcatgccctagttcaaagatggaagtagaggaaaatggcatcaaaatgtgcaagccctgcactgacatctgccccaaggcttgcgatggcatcggtacagggtctctgatgtcagcccagacggtggacagtagcaacattgataaatttattaattgcaccaaaataaacggtaacctgatcttcttagttacagggattcacggagatccctataacgccattgaagccattgaccccgagaaactcaatgtatttcgcactgtgagagagatcacgggattcttgaacattcaatcttggcccccgaatatgactgacttcagtgtcttctctaatttagtgaccataggtggcagagtgctctatagtggactgtcactgctgatcctgaaacagcaaggcattactagtctccagttccagagcctcaaggagatttctgcaggcaacatctacatcacagataattccaacctgtgttactaccatacaatcaactggaccacactattctcaactattaatcagcggatcgtgatccgcgacaatcgcaaagccgaaaactgcaccgccgaaggaatggtgtgtaatcacttatgtagctccgatggttgttggggtccaggacccgaccagtgcctctcatgtaggcggttttcgaggggccgaatttgtatcgaatcttgtaacttatatgatggcgaatttcgagaattcgaaaacggctccatttgcgtggagtgcgatccccagtgtgagaagatggaggacgggctgcttacttgccacggacctggccccgataactgtaccaagtgcagccatttcaaggatggacctaattgtgtggaaaagtgtcccgatggtctacagggcgccaacagcttcattttcaagtacgctgaccccgatcgggagtgtcacccttgtcatcctaactgcacacaggggtgtaacggcccaacgtctcatgattgcatctactatccttggaccggtcactccaccctgcctcagcatgccaggacacctttgatcgccgccggggtgataggggggttgttcattctggtaatcgttggtctcaccttcgctgtgtatgtacgccggaagtcaatcaagaaaaagagggccttgaggagattcctggagactgagttagtggaaccccttactcccagtggtacagccccaaatcaagcccagctgcggatcctgaaggagaccgagctgaagcgcgtcaaggtattgggatcaggtgcctttgggactgtctacaaagggatctgggtgcccgaaggggaaactgtaaaaatacctgttgccatcaagattctgaacgagaccacaggccccaaagctaacgtggaattcatggacgaagcactgattatggcaagcatggatcacccccaccttgtgcggttgctgggcgtatgccttagccctacaattcagttggtgacgcagctcatgccacatggctgcctgctggagtatgttcatgaacacaaagacaatattggatctcaattgctgctgaattggtgcgtgcagatcgcaaagggcatgatgtacctggaggagcgaagactggtacatcgtgacctggcagccaggaatgtattggttaagtcccccaatcacgtcaaaattactgattttggcctcgcccgactactggaaggcgatgagaaggagtataatgctgatggagggaagatgcccataaagtggatggcgcttgagtgtattcactataggaaattcacgcatcagtctgacgtttggtcctacggcgtgactatttgggagctcatgacctttggagggaagccatatgatgggattccgactcgcgaaatcccagacttgctcgagaaaggggaacgattaccacagccgcccatctgcacaattgacgtatacatggtgatggtgaaatgttggatgatagacgcagattctcggcctaagtttaaggagctggcagcggagtttagcaggatggcccgggatcctcagaggtacctggtgatacagggtgatgataggatgaaactgccctcacccaacgattcaaagttcttccagaatcttctggacgaagaggacttggaggacatgatggacgccgaggagtacctcgttccccaggcattcaatatccctccgcccatttacactagtcgtgcccgaattgatagcaacagaagcgagatcggacattcaccacctcctgcttacactcctatgtccggcaatcagtttgtttacagagatggtggatttgctgccgagcagggcgtgtctgtgccatacagagctccaacctctacaatccctgaagcgcccgtggcccagggcgccactgcggaaatcttcgacgactcctgctgtaacggtactctccgcaagcccgtcgccccccacgtgcaggaggatagctctactcagagatattccgccgatcctaccgtctttgctcctgagcggagccctagaggcgagctggatgaagaaggttatatgactccaatgcgcgacaaacctaagcaggagtacctgaatcccgtggaggaaaatccttttgtctccagacggaaaaacggagaccttcaagcactggataatcccgagtaccataatgcgagcaatgggccacccaaggccgaagacgaatacgtcaatgagcccctatatctgaacaccttcgccaataccctggggaaggccgaataccttaaaaacaatatcctgtccatgcctgagaaagccaagaaagcatttgacaatcctgactattggaaccattcccttccgcctaggagcacacttcagcatcctgactacctccaggagtatagcacaaagtatttctacaagcaaaacgggagaatacgaccaatcgttgcagagaacccagagtacctgagtgaattcagtctgaagcccggaactgtattgcctccccccccatatcgccatcgcaatactgtggtgtag

SEQ ID NO: 26911 - DNA, 3897 bp, synthetic construct
  misc_feature 1..3897: note = Description of Artificial Sequence: Synthetic coding sequence
  source 1..3897: mol_type = other DNA
atgaagcccgccaccggcctgtgggtgtgggtgagcctgctggtggctgcaggcaccgtacagcctagcgatagccagagtgtctgtgctgggacagagaacaagctgagtagtcttagcgatcttgaacagcagtaccgcgcgctgcgaaagtactacgagaattgcgaggtggtgatggggaacctcgaaataacgtctatcgagcataaccgtgacctgagcttccttagaagcgtccgggaagttacagggtatgtccttgttgccttaaatcagttccgctatctgccacttgaaaacctgaggatcattcggggcactaaattatatgaggaccggtatgctctagcaattttcctgaattacaggaaagacggcaatttcgggttgcaggaactgggtcttaaaaatctgacggagatcctgaacggaggtgtctacgtggaccagaacaagtttctctgttacgcagatacgattcattggcaggatatcgtgcggaacccctggccatccaacctgacactggtcagcactaatggctcttccggctgtggcaggtgtcataagtcctgcaccgggcggtgctggggacctaccgagaaccactgtcaaaccctgactcgcaccgtctgcgccgagcagtgtgatgggagatgctacggtccgtatgtctctgattgttgtcatagggagtgtgccggcggctgtagcgggccaaaggacacggactgcttcgcatgtatgaactttaatgattcaggtgcctgcgtgactcagtgcccacagacattcgtctacaacccaactacgtttcagttggaacacaattttaacgccaaatacacctatggcgcattttgtgtgaagaaatgcccccataatttcgtagtcgattctagcagctgcgtgcgtgcctgcccgagttcaaaaatggaagtggaggaaaacggtatcaagatgtgtaagccctgcacggatatatgccctaaggcctgcgacggtatcggcacgggcagtcttatgagcgcacagactgtcgacagctctaacattgataagtttataaattgtacaaagatcaatgggaacctgattttcctggtgaccggcatacatggcgatccctataatgccattgaggccatcgatcctgaaaagcttaacgtgttccgcacggttcgggaaattacaggtttcctgaatatccagtcatggccacccaacatgactgacttctctgtgttttctaacctggtgactattggggggcgggttttgtactctggcctgagcttactgatcttgaaacagcaaggtattacatctctgcagttccagtcactcaaagaaatctcggcagggaacatctacataactgataactccaacttgtgttattatcacaccatcaactggacaaccctcttttcgaccatcaaccaaagaatcgtgataagagacaacaggaaggccgagaactgtactgcagagggaatggtgtgcaaccatttgtgtagttctgatggttgctggggccctgggcctgaccagtgtctttcttgtagacgcttttcgcggggaaggatctgcattgagtcctgtaatctgtacgatggggagtttcgcgaattcgaaaacggcagcatctgtgtggagtgtgatccccagtgtgagaagatggaggacggtttgttgacatgccatgggcccggtccggataactgcacgaaatgctcccattttaaagatgggcctaactgcgttgaaaaatgccctgatgggttacaaggagctaattccttcatctttaaatacgccgaccccgacagagaatgccacccctgccaccccaactgcactcaaggctgtatcggatcctctattgaggactgcattgggctcatggataggacccccctgatcgctgctggcgtcatcgggggtctgttcatattagtcatagttggcctgacttttgccgtgtacgtgcggcgcaaaagtatcaaaaagaaacgggctctgagacggttcctcgagactgagcttgtggaacccctgacaccttccgggactgctcctaaccaggcccaacttcggatcttgaaagagacagaactaaagcgagtgaaggtgctggggtctggcgccttcgggacggtgtacaaaggcatatgggtgccagagggcgaaacagtaaaaattccagtggccattaaaatccttaacgaaaccacaggcccaaaggccaacgtcgaatttatggatgaggcactgattatggccagcatggaccacccgcatcttgttcgcctgctgggtgtgtgtctttctcccacgatacaactggtgactcagctgatgccacacggatgtctgctggagtacgtgcacgaacacaaggataacattggatcccagttgctcctgaactggtgtgttcaaatagccaaggggatgatgtacctagaagagaggcggctcgtccaccgcgaccttgcagcccggaacgtattggttaagtcccccaatcacgtaaaaattacggattttggcttggctcgacttttagaaggggatgaaaaagagtacaatgccgatggtggcaagatgcccattaaatggatggctctcgaatgcatccattacaggaaattcactcatcagtcggacgtgtggtcgtatggagttaccatctgggaattaatgacattcggggggaaaccttacgacggcatacctacaagagagattccagaccttctggagaaaggggagaggttgcctcagcctccaatttgcacaattgatgtctacatggtgatggtgaagtgttggatgatcgacgccgacagtcggccaaaatttaaagaattagcggccgagttttccaggatggcccgggatccccagcgctacctcgtcatccagggagacgatcggatgaagctgccctcgcctaatgatagcaaattcttccagaacttgttagacgaggaggacttagaagacatgatggacgccgaggaatatttggttccccaggcctttaacatcccgccccccatctacacttcccgcgcccgcatcgatagtaatcggagtgagatcgggcattccccaccccctgcgtacaccccaatgtccggcaatcagtttgtgtatcgcgacggtggcttcgcagccgagcagggcgtttccgtaccttaccgcgcccctacctcaaccattcccgaggcccccgttgcccaaggagctactgcagaaatctttgatgacagttgctgtaacggcactctcaggaaacccgtggctccacatgttcaggaagattcatctacccagcgatattcagccgatccgactgtctttgctccagagagatccccacgtggagagctcgacgaggaggggtatatgacgccaatgcgcgacaaacccaagcaagagtatctgaaccccgtcgaagagaaccctttcgtaagtcgccggaagaacggagatttgcaggcattggacaaccctgagtaccacaatgcgtccaacggcccacccaaggccgaggacgaatacgtgaacgaacctttatatctcaacacctttgcgaacaccctgggaaaggcagaatatctgaagaataatattctcagcatgcccgagaaggcaaaaaaggcttttgataatcccgactactggaaccacagccttccacccagaagcactcttcaacatcccgactaccttcaggagtactccacgaaatacttctataagcagaacggaaggataagacccatcgttgcagagaacccggaatatttgtccgagttcagcttgaaacctgggacagtcctgcccccgcctccatatcgacataggaatacagtagtgtag

SEQ ID NO: 26912 - DNA, 387 bp, synthetic construct
  misc_feature 1..387: note = Description of Artificial Sequence: Synthetic coding sequence
  source 1..387: mol_type = other DNA
atgggcaacctggagatcaccagcatcgagcacaaccgggacctgtcattcctgcgaagcgtgcgcgaagtgacaggttatgttctggtcgctcttaatcaattccggtatttacctttggagaatttgagaatcattagaggcaccaaactgtatgaggatagatatgcccttgctatattcctaaactatagaaaggacggcaactttgggctccaggagctgggattgaagaacctgaccgagatcctcaacggcggagtgtatgtggatcagaacaagttcttgtgctatgccgacactattcattggcaggacatcgtgcgtaacccgtggccgtcgaacctgaccctcgtgagcacaaatggcagtagcgggtgtggctag

SEQ ID NO: 26913 - DNA, 3879 bp, synthetic construct
  misc_feature 1..3879: note = Description of Artificial Sequence: Synthetic coding sequence
  source 1..3879: mol_type = other DNA
atgaagcccgccaccggcctgtgggtgtgggtgagcctgctggtggcagccggcaccgtccaaccctccgactcccagtccgtctgtgcaggaacagagaacaagctgagctccctatccgacctggagcagcagtatcgggcactgcggaaatactatgaaaattgcgaggtggtgatgggcaatctggaaatcacaagcatagaacataacagggacctctcctttctgagatcagtgcgggaggttacgggctatgtgttagtggcactcaaccagttccgatatctgcctttggaaaacctgaggatcattcgcggaacgaagctctacgaggacagatacgctcttgccatcttccttaactaccggaaagacgggaattttgggctacaggagctcggactgaagaacctcactgaaatattgaacgggggggtgtacgtggaccaaaataagttcttatgctacgccgacaccatccactggcaggacattgttcgtaatccctggccctccaacctcacactggtgtctaccaatggctcctccggctgcggtcgctgccataagtcttgtacaggtcgctgttggggccctaccgagaatcattgtcagactctgacccggaccgtgtgtgcagaacagtgtgatggtcgctgctacggaccctatgttagtgactgctgccacagggaatgcgctggagggtgtagcggcccgaaagacaccgactgcttcgcgtgtatgaacttcaacgactccggagcgtgtgtgacgcagtgtccgcagactttcgtgtataaccctacaacctttcaacttgagcacaactttaacgcaaaatatacctacggagccttctgcgtaaagaagtgtccacataactttgtcgtggactcgagctcatgtgtacgagcctgtccatccagcaagatggaggttgaagagaacggcatcaaaatgtgcaaaccatgtaccgatatttgtcctaaagcatgcgacggaatcggtaccggcagtctaatgtctgctcagactgtggattccagcaatatcgacaaatttataaattgtactaagattaacggcaatcttatcttcctagtcacggggattcacggcgatccctataatgcaatcgaggccattgaccctgaaaagctgaacgttttccgaacagtgcgggagattaccgggtttctgaatattcaatcatggcctcctaacatgaccgatttctccgtgttttccaacctcgtcacgatcggcggccgcgtcctgtattctgggcttagcctcctgattctcaaacagcagggaattacaagcctccagttccaatccctaaaagagatctctgctggcaatatatatatcacagataattcaaacctgtgctattaccacactattaattggactacactcttctcaacaatcaaccagagaattgtgatccgagataaccgcaaggccgaaaattgcaccgccgagggcatggtgtgtaaccatttatgctctagtgacggatgttggggcccagggcccgatcagtgtttatcctgtagacggtttagcagaggccggatttgtatagagtcatgtaacctttatgatggagagtttagggagttcgagaacggcagcatttgcgtggagtgcgatccacaatgcgagaagatggaggatggcctgctcacttgccatggtcccgggcccgataattgcaccaagtgctctcatttcaaggacggacccaattgcgttgagaagtgccctgacgggctgcaaggcgcaaactccttcatattcaaatacgcagacccggaccgggaatgccacccttgccatcccaactgtacacaggggtgcaacggcccaacatctcacgattgcatatattatccctggactggccacagtactttgcctcaacatgcacggactcctctgattgctgctggagttatcggcggactgttcatactggtgatcgtcgggctcactttcgctgtctacgtcagacggaagagtattaagaaaaagcgtgctcttcgccggtttttagagaccgagctagtggaacccctcacaccctcaggaactgcccccaaccaggctcaacttcgtatacttaaggagacagagctcaagcgagttaaggttctggggtcgggcgcatttggaacagtctataaaggcatttgggtacccgagggagagacggtcaaaatcccggtagccattaagattttgaacgaaacaacaggcccaaaagctaatgtggagtttatggatgaggccctgatcatggcgtcaatggaccatccacatctcgtgcggcttttgggtgtgtgcctgtcgccaactattcaacttgtaacccagctgatgcctcacggatgcttgctcgaatacgttcatgagcataaagataatattggtagccagcttctcctcaattggtgcgtgcagatcgcgaagggcatgatgtatctggaggaacgtcggttggtgcatcgggacctggctgcacggaacgtcctcgtcaagagccccaaccatgtgaagattacagatttcggactggcaagacttctcgagggagacgagaaagaatataatgccgatggcggaaagatgcccatcaaatggatggcccttgagtgcatccactacagaaagttcactcaccagtccgatgtgtggtcctatggggtaaccatctgggagctaatgacctttggagggaaaccttatgatggcattccaacccgtgagattcccgatctgctggaaaagggcgagcggcttccccagcctccaatctgcacaatcgacgtgtacatggtcatggtcaaatgctggatgatcgacgctgattcgagaccgaagttcaaggaattagcagccgaattcagccgtatggcgagagatccgcagcgctatctggtgatccagggcgacgaccggatgaaactgccatctcccaacgattcaaagtttttccagaatctgttggacgaagaagacttggaggacatgatggacgctgaggaatatctggtccctcaggcttttaacatcccgcccccaatctatacatctcgtgcacgtatcgactccaacagaaaccagtttgtctatcgcgatggcggcttcgccgcagaacagggggtcagcgtcccttacagggcaccaaccagtacaattccagaggcaccagtcgctcaaggagccaccgctgagatctttgacgacagctgttgcaacggtactctgcggaagccagtcgcaccccatgtgcaggaagattcatctacgcagcgctacagcgccgacccgactgtgttcgcccccgaaaggagcccacgcggtgagctcgatgaggaggggtatatgacacctatgagagacaagcctaaacaggaatatctcaacccagtcgaagagaatcccttcgtgtcgaggagaaaaaacggcgacctgcaggccctggataaccctgagtaccacaatgcgagtaacggacctccgaaggccgaggatgaatatgtaaatgagccactgtatttgaacacctttgccaacacactgggcaaggcagagtacctgaagaacaacattctgtctatgcccgagaaagctaaaaaggccttcgataatcctgactattggaatcattctctaccaccccgctccacgctgcagcaccccgattatcttcaggaatactccaccaaatacttttacaagcagaatggccgcattaggccaatcgtcgccgaaaacccggagtatcttagcgaattcagcctgaaacctgggaccgtgctgcctccccctccttataggcatcggaacactgttgtatag

SEQ ID NO: 26914 - DNA, 4029 bp, synthetic construct
  misc_feature 1..4029: note = Description of Artificial Sequence: Synthetic coding sequence
  source 1..4029: mol_type = other DNA
atgcgggccaacgacgccctgcaggtgctgggcctgctgttcagcctggctcgcggttctgaggtcggaaacagccaggccgtgtgcccaggcactctcaacggcctctccgtgacaggcgatgcagagaaccagtatcagactttatacaaactgtacgaaagatgcgaggtcgtcatgggaaatctggagattgtgctgacagggcataatgctgatctttcctttctgcagtggatcagagaggttactggatacgtcctggttgcaatgaacgaattctccaccctgccgctgccgaatctcagggtggtgcgggggacccaggtgtacgacggaaagttcgccatcttcgtgatgctgaactataatacaaatagcagccacgcgttgcgtcagcttcgcttgacacaactgacggagatactgtcaggtggtgtgtacatcgaaaagaacgataagctctgccacatggacacaattgattggagagacatcgtgcgagaccgggacgcggagatcgttgtgaaggataacggaaggtcatgcccaccttgccatgaagtgtgtaaaggacgttgttggggaccgggtagcgaagattgtcagaccttaactaaaaccatttgtgcgccacaatgcaatggccactgcttcggcccaaatccaaatcagtgttgccacgatgagtgtgccggcggctgtagcgggccccaggataccgactgcttcgcctgtagacacttcaatgatagcggtgcgtgcgtcccccggtgcccccagccccttgtctacaataaactaaccttccagctggagccaaacccgcacactaaataccagtacgggggggtgtgtgtggctagctgtcctcataacttcgtcgtggatcaaacaagttgtgtccgggcctgtcctccggataaaatggaggtagacaaaaatggcctcaagatgtgtgagccatgtggaggcctgtgtcccaaggcatgcgagggcacgggatccggatctaggtttcaaactgtagatagctctaatattgatggatttgttaactgtactaagatcctcggcaatttggacttcctgatcaccggccttaatggcgacccctggcataaaatcccggccctagaccccgagaaacttaatgtgtttaggactgtgagggagataactgggtacctgaatatacaatcatggcccccgcacatgcacaatttctccgtgttcagcaatctcaccactattggtggtcgatcattgtataatcggggattctccctgctgattatgaaaaacctgaatgtcacttcactggggtttaggagcctcaaggaaattagcgccggccgcatctatatctccgcaaaccgccagttgtgttaccatcatagcctcaattggacaaaagttctgagagggcctacggaggagagacttgacattaaacataaccggcccaggagggattgcgtcgccgaaggcaaagtttgtgatcctttgtgctcgtcaggcggatgttggggaccaggtcccggacaatgtttgagttgccgtaactactcacgtggtggggtctgtgtcacccattgcaatttcctcaacggggagccccgagagttcgcccatgaggctgagtgtttttcttgtcacccagaatgtcagcccatggaaggaaccgccacatgtaacggcagcggatccgacacctgcgcacagtgcgcccacttcagagatggcccacattgtgtgagcagctgtccccacggggtgctgggcgctaagggtcctatttacaaataccccgacgtgcagaacgagtgtcgaccttgccatgaaaattgtacacagggttgcaaggggcccgaacttcaggactgtttaggccagacactcgtgctgatcggtaaaacccacctgaccatggcactgactgtgatcgccggcctggtggtcatttttatgatgttggggggaaccttcctctattggagagggagaaggatccagaacaagagggccatgaggaggtacctggaacggggagagtctattgagccccttgaccccagcgagaaggccaataaggtcctggcccggatctttaaggagactgagttgagaaagcttaaagtcctcgggagcggggtatttgggacagttcacaagggcgtgtggattccggagggtgagtcaattaaaattcctgtgtgcatcaaagttattgaagataagagtgggcggcagtcgttccaagctgtgacagaccacatgctcgccatcggaagtttggatcatgctcacattgtgcggctcttgggactttgccctggcagcagcttgcagctcgtcacccagtacctgcccctggggtcattgctcgatcatgtgagacagcataggggcgctcttggcccgcagctgttgctgaactggggggttcaaatcgcgaagggaatgtattatctagaggagcacggaatggtccaccgcaacttggccgcccgaaacgtgcttctgaagtcaccttctcaggtgcaagttgccgactttggcgttgccgatttgttgccgccagatgataagcagctgctgtactctgaagccaaaacacctattaagtggatggcgctggagtcaatccactttgggaagtatacccatcagtcagacgtgtggagttacggcgttactgtttgggaactgatgacatttggggctgagccctatgcaggattgagactggccgaggttcccgacctgctggagaagggcgagcggttagcacagccacagatctgtacaatcgacgtttatatggtgatggtgaaatgttggatgattgatgaaaacatcaggccgacatttaaggagttggcgaacgagtttacaagaatggcacgagaccctccaagatacttggtgattaagcgcgagtccggcccagggattgcacccggacccgaaccgcatggtctgacgaataagaagttggaagaagtggagctggagccagagttggatctggatctggatctggaagccgaggaggataatttagccacaaccaccttagggtccgccctgtcgctgccagtagggactctgaaccgccctagaggctcccaaagtttgctgtcaccatctagtggatacatgcctatgaatcaagggaatctgggcgagtcctgtcaagagagcgctgtctcagggagcagcgaaagatgcccgcggccagttagccttcacccaatgccccgagggtgtttggcctcagagtcctctgagggtcatgtcacgggctcagaagcggagctccaagagaaggtttccatgtgccgcagtcggtcccggagtcgctctccaaggccaagaggggactcggcttatcacagtcagcgtcatagtctcctgacccctgtgacaccactttcaccacccggactcgaagaagaagatgtaaacggctacgttatgccagacacacacctaaaaggcaccccttcaagccgggagggcacgcttagcagtgtcgggctatcctccgtgctaggcactgaagaggaagatgaggatgaagaatacgagtatatgaatagacggaggaggcattccccacctcacccaccgcgcccctctagcctggaggaattggggtatgagtacatggatgtgggctcagatctgtccgcctctttaggctcaacccagagttgtcccttgcaccctgtgcctattatgccaaccgccgggacgacccccgatgaggactacgagtatatgaatcggcagcgtgacggaggggggccaggcggggactacgccgctatgggagcttgcccggcctctgaacaggggtatgaggaaatgagggctttccagggcccaggccaccaagcccctcatgtacactatgcaagactcaagactctgcggagcttagaagctactgactctgctttcgacaaccccgactactggcactcccgcctcttcccgaaggctaatgcccagcgtacttag

SEQ ID NO: 26915 - DNA, 996 bp, synthetic construct
  misc_feature 1..996: note = Description of Artificial Sequence: Synthetic coding sequence
  source 1..996: mol_type = other DNA
atgcgggccaacgacgccctgcaggtgctgggcctgctgttcagcctggctcgtggctccgaagttggcaattctcaagccgtctgccccggaacactcaatggactgagtgttacaggggatgcagagaaccagtaccagacactatacaaactgtacgagcgttgtgaggtcgttatggggaatctggagattgttctaaccgggcacaacgccgacctgtcattccttcagtggattcgcgaagtcacggggtatgttttggtggcaatgaacgagttcagtactctgcccttgccaaatctgagggttgtgcgtgggacgcaggtgtacgatggcaagtttgctatttttgtgatgctgaattacaacactaattcctcccatgcactgcgccagctgaggcttacacagttaaccgaaatcctgtcagggggcgtctatatcgagaagaacgataagttgtgtcacatggatacaatcgactggcgggatatagttcgcgatagagacgctgagatagtggttaaagacaacggccgatcatgccctccttgtcatgaagtgtgtaaaggtaggtgttggggaccaggatcggaggactgccagacactaaccaaaactatttgcgccccgcagtgcaacgggcactgtttcggccccaacccaaaccaatgttgccatgatgagtgtgccggcggctgtagcggccctcaagacactgactgcttcgcgtgtagacactttaatgactcgggagcctgcgtacctcgctgtcctcaaccactggtttataataaactcactttccagcttgagcccaatccacatactaagtaccaatatggtggagtctgtgtcgctagctgtcctcacaattttgtggttgaccaaacgtcttgtgtgcgtgcgtgccctcccgataagatggaagtagataagaacggactaaagatgtgcgagccttgcggcgggttgtgtcctaaggtcttttag

SEQ ID NO: 26916 - DNA, 552 bp, synthetic construct
  misc_feature 1..552: note = Description of Artificial Sequence: Synthetic coding sequence
  source 1..552: mol_type = other DNA
atgcgggccaacgacgccctgcaggtgctgggcctgctgttcagcctggcccggggctccgaagtaggcaactcacaagctgtgtgccctggaacgctgaatggcctgtctgtaaccggcgacgcagaaaaccagtaccagactctatacaagctgtacgagagatgtgaggtggtgatgggcaatttggagatcgtccttacgggacacaatgccgacctatcctttctacagtggatcagagaggtgacaggttacgtcctagtcgctatgaacgaattttccactctcccactacccaaccttagagttgtccgaggaacccaggtatacgatggaaaattcgcaatcttcgtgatgttaaattacaacaccaattcttcacacgctctccggcagctccggctcacacaacttacaggtcagttcccaatggttccttccggcctgacgccccagccagcccaggattggtatctgctggacgatgatcctcggttactcaccctgagcgctagctccaaggtcccggtgacactggccgcagtgtag

SEQ ID NO: 26917 - DNA, 3852 bp, synthetic construct
  misc_feature 1..3852: note = Description of Artificial Sequence: Synthetic coding sequence
  source 1..3852: mol_type = other DNA
atgggcaacctggagatcgtgctgaccggccacaacgccgacctgtcttttctgcagtggatccgtgaggttactggctacgtgctagttgcgatgaacgagttctcgacccttccacttcccaacctaagagtcgtgcgaggaacacaggtttacgatggcaaattcgcgatttttgtcatgctaaactacaacaccaattccagccatgcactacggcagttgcgccttacacagctcacggagatcctcagcggcggagtatatattgagaaaaacgataagctgtgccacatggacacaattgattggcgggatatcgttagagaccgcgatgccgagatcgtcgtgaaagacaatggcaggtcttgcccaccttgtcacgaagtgtgtaaaggccgttgctgggggcctggttctgaagactgtcaaaccttaaccaagactatttgcgctcctcagtgtaatggtcactgttttggtcccaatcccaaccaatgctgccacgatgaatgtgctggcggctgtagcggtccgcaggatactgactgcttcgcttgtagacattttaacgactcgggtgcttgtgttccaagatgtccacagcctttggtctataataaactcacgttccaactggagcccaacccacacactaaataccaatatggcggcgtctgcgtggcaagctgtccccacaactttgtcgtggatcagacttcctgcgttagggcctgccctcctgacaagatggaggtggacaagaacggcctgaaaatgtgcgagccatgcggcggactatgtccaaaggcctgcgagggcaccggaagtggctctcgcttccagacagtcgatagctccaatatcgacggttttgtgaactgcaccaagatattaggcaacctagattttctcataacaggcctgaacggcgacccctggcacaaaattccggctctggatcctgagaaactcaacgtgtttagaaccgtgcgagagatcacgggctatctgaacatccagtcgtggccaccgcacatgcataacttcagcgttttctccaatctcaccacgattgggggaaggtccctgtacaacagaggcttttccctgctgattatgaagaatctgaatgttaccagtctcggttttaggtccctgaaagaaatctctgccgggcggatctacattagcgccaatcggcagttatgctatcatcacagcttgaactggaccaaagtcttacgcggacccacagaggaaaggctggacatcaagcacaacagaccaaggagagactgtgtcgctgaagggaaggtgtgcgacccactatgtagcagcgggggctgctggggccctggtccagggcaatgcttaagctgcagaaactattcaaggggaggagtctgcgtgactcattgcaatttcctcaatggcgaacctcgcgagttcgcgcacgaagccgagtgcttcagctgccatccagaatgtcagcctatggagggcaccgcgacttgtaatggtagcgggagcgacacctgcgcccagtgtgcccactttcgagatggccctcactgcgttagctcttgtccacacggcgtcctcggagcaaagggccctatctataagtatccagacgtgcaaaatgagtgtcgtccttgccacgagaattgcactcagggctgtaaagggcctgagcttcaggattgtttggggcagaccctggtgctcatcggaaagacgcaccttaccatggcgctcacagtgattgctggcctggttgttatatttatgatgctggggggtactttcctgtactggcggggacggagaatccagaataagagggcaatgcgccgctacttggagagaggcgagtctattgaaccccttgacccatcagaaaaggctaacaaagtgctggctagaatattcaaggagacagagttgaggaaactcaaagtactggggtcaggcgtgtttggaacagtccacaaaggcgtctggatcccggaaggggagagcattaagatcccagtctgtatcaaagtgatcgaggacaagtccggcaggcagagttttcaggccgtgacagatcacatgctcgccatcggatcactggaccatgctcatatcgtgcgtttactgggcctttgcccaggatcctctctccagctagttacccagtatctgcctctgggaagcttgttggaccacgtcaggcaacatcgtggcgccctgggcccccagctcctactgaattggggagtgcaaattgccaaaggaatgtattacctggaggaacacggaatggtacacaggaatctggctgccaggaatgtgctcttgaaatctccctcacaagtgcaggtggcggatttcggcgtggccgatctcttgcctcctgacgacaaacagctgttgtactccgaagctaagacgccaataaaatggatggctctagagtccatccattttggaaaatacactcatcagagtgacgtttggtcatatggagtaacagtgtgggaattgatgacatttggagcggagccatatgccggattaaggttggcagaggtgccagacctgctagagaagggcgagaggctcgcccagccccagatctgcacaattgatgtgtacatggtgatggtgaagtgctggatgatcgacgagaatatcaggcccacttttaaggagctggcgaatgagttcacccggatggctcgagatcccccccgatatctggtgatcaaacgagagtccgggccagggatagctcctgggccagagccacacggcctgactaacaagaagctcgaggaggtggagctcgaaccagagctggacctggacttggatttagaagccgaggaggacaatctcgctactactaccttgggctccgccctgagcctcccggttggaacactaaacaggcctaggggttctcaatcgctgctctcacctagtagtggctatatgcctatgaatcagggcaacctgggagaaagttgccaagaaagcgctgtctctggcagcagcgagcggtgcccacggccagtttctctgcacccaatgccacgcggatgccttgcatctgaatctagcgagggccacgtgacaggttctgaagcggagctgcaggaaaaagtctctatgtgccggtctcggtcccgtagtcgatcacctcgcccccggggcgattctgcctatcactcccagcgacacagcctgctgaccccagtaaccccactcagcccccctggcttagaagaggaggatgtcaacggttacgtcatgcccgatactcatcttaagggtactccaagcagcagagaaggtaccttgagctccgttggactcagttcagtactaggtacagaggaagaggatgaggatgaagagtatgaatacatgaaccggcgtcgccgacattccccaccgcatcccccacggccctcatcgctcgaggagctgggctatgagtacatggacgtgggatctgacctcagcgcgagcctgggatcaacccagtcgtgtcctctgcaccctgtgcccatcatgcccactgccggaaccacccccgacgaggattatgaatatatgaatagacagcgggacgggggcgggcctggcggggattacgccgccatgggcgcttgtcccgcctccgaacagggctatgaggaaatgcgcgcctttcaaggtcccggccaccaagcacctcatgtccactacgcacggctcaaaaccctgaggtctctagaggccaccgatagcgcgtttgataacccagattattggcatagccgcctcttcccgaaggccaacgctcaacggacctag

SEQ ID NO: 26918 - DNA, 2100 bp, synthetic construct
  misc_feature 1..2100: note = Description of Artificial Sequence: Synthetic coding sequence
  source 1..2100: mol_type = other DNA
atggccctgaccgtgatcgccggcctggtggtgatcttcatgatgctgggcggaacttttttgtactggcggggtcgacgcatccaaaataaacgggcgatgcgacggtacctggaaaggggggaatctatcgagcctcttgatccatctgagaaggccaataaagtcctcgcacggatctttaaagaaaccgaattgcgcaagctcaaagtgctcgggtctggggtgttcggaaccgtgcacaaaggcgtctggatccccgaaggagaatcgattaagatccctgtttgtattaaggtgatcgaagacaaaagtggtagacagtcgtttcaggccgtgaccgatcacatgctggctatcggatccctcgaccacgcacacattgttcgactcttaggactttgccccggtagctccctccagctggtcacacagtatcttccccttgggagcctattggaccatgtgcggcagcacaggggggccctggggccacaacttctgctgaactggggcgtccagattgcaaaaggtatgtattacctcgaagaacacggcatggtgcaccgtaatctggccgcgcgaaatgtcctcctgaagtcaccatcgcaggtccaggtggccgattttggggtggccgatttgttacccccagacgacaaacagctcctttactccgaagcaaaaacgcctattaaatggatggctctcgagagtatacactttgggaaatacacgcaccagagtgatgtctggagctatggagtaaccgtgtgggagttgatgacttttggggctgaaccttatgccggcctccgtctcgccgaggttcctgacttattagaaaaaggagagagactagcgcagccccagatttgcactatcgatgtttacatggttatggtgaaatgctggatgattgacgaaaatatccggccgactttcaaagaacttgctaatgagttcacacggatggcccgggatcctccacgatatttggtcatcaaaagggagtcagggcctggaattgcaccaggacctgaaccacatggcctgaccaataaaaaactggaagaggttgagctcgagccagaactggatctcgatctggatctggaggctgaggaggataatctagcgacaaccaccctgggctcagctctgagtctgcctgtcggcacactgaatcggcccaggggctcgcagagcttgctaagccctagctcagggtacatgcccatgaatcagggtaacctcggcgaaagctgccaggagtctgcagtgtcgggctcttccgagagatgccctagacccgtgagcctgcaccccatgccacggggctgcttggcaagtgaaagttccgaaggacacgttacagggtccgaagctgaactgcaggaaaaagtgtcaatgtgcaggtctaggtcccggagcaggtctcctcgcccacgcggggattctgcctatcacagtcagaggcattccttactgacccccgtgaccccactgtctccgcctgggctagaagaggaagatgtgaacggctacgtgatgcccgacacgcacctgaagggcacaccttccagtcgcgagggcaccctcagctcagtcggactgtctagtgttcttggcaccgaggaggaagatgaggacgaggaatacgaatatatgaaccgacgaagaagacactctcccccgcatcctccgcggcctagtagccttgaggaactggggtacgaatacatggatgtgggttcagacctgagtgcctctctgggatctacccaatcatgtccacttcacccagttcctataatgccaactgcgggcacgactccggatgaggattacgagtacatgaacaggcaacgggatggcgggggacccgggggggattatgccgcaatgggggcctgccccgcttctgaacaggggtacgaggaaatgcgcgccttccaaggcccagggcaccaggccccacatgtacactatgcccggctgaagacactccgttcccttgaggccactgactcagcgttcgataatccggattattggcactctcgactctttccaaaggccaacgcacagagaacatag

SEQ ID NO: 26919 - DNA, 381 bp, synthetic construct
  misc_feature 1..381: note = Description of Artificial Sequence: Synthetic coding sequence
  source 1..381: mol_type = other DNA
atgcgggccaacgacgccctgcaggtgctgggcctgctgttcagcctcgcaagggggtccgaagttggcaattctcaggccgtatgccccgggacactgaatggcctgtccgtaaccggcgatgccgagaaccaatatcagacattgtataagctgtatgaaagatgcgaagtcgttatgggaaacctcgagatcgttctaacagggcataacgcggacctgtcgttcctgcagtggatcagagaagttactggctatgtcctggtggccatgaacgagttttcaacactccccttacccaacttgcgcgtcgttcggggtacacaggtttatgacggaaaatttgctattttcgtcatgttgaattacaataccaactag

SEQ ID NO: 26920 - DNA, 2766 bp, synthetic construct
  misc_feature 1..2766: note = Description of Artificial Sequence: Synthetic coding sequence
  source 1..2766: mol_type = other DNA
atgcgggccaacgacgccctgcaggtgctgggcctgctgttcagcttagcgcgcggaagcgaggtgggcaattcccaagccgtgtgccccgggactctgaacggcttgtctgtgactggcgacgccgaaaaccagtaccaaacattatataagctttatgaacgatgcgaagtggtaatggggaatctcgagatcgttctcaccggtcacaatgcagatctgtcattcttgcagtggattagagaggtgactggctacgtgttagtagcaatgaatgaatttagtaccctgcccttgcccaatttgcgggtggtgcggggcacacaggtgtatgacggaaagtttgcgatctttgtgatgctcaactataacacaaattcatcgcatgctctgagacagctgaggcttactcagctgacggagatcctgtccggcggtgtgtacatagaaaagaacgacaagctgtgccacatggataccatcgactggagggatattgtgcgagatcgggatgccgaaattgtggttaaagacaacggacggtcctgcccaccatgtcacgaagtatgtaaagggcgctgctggggtcctggatctgaagattgtcaaaccctcacaaaaactatatgcgccccacaatgcaacggacattgcttcggtccaaatccaaaccaatgctgtcacgacgagtgtgccggcgggtgctctgggcctcaagacaccgactgttttgcttgcagacatttcaatgactctggtgcttgtgtccctcggtgtcctcagcccctggtttacaacaaactgacgttccagctggagccaaatcctcacactaaataccagtacgggggcgtctgcgtagcctcttgcccccacaacttcgtcgtggatcagacaagttgtgtccgggcttgtcccccagacaagatggaggtcgacaagaatggcctgaagatgtgtgaaccatgcggtgggctgtgcccgaaggcatgcgaggggacagggtcaggttcccggttccagacagtcgactcatcaaacatcgatggcttcgttaattgcaccaagatcttaggaaaccttgactttttaattactggcctcaacggagatccttggcacaaaatccccgcactggacccggagaaactgaacgtctttagaaccgttcgagagatcaccgggtacctcaacatccagtcatggccacctcacatgcacaatttctctgtattctccaatctgacaacaattggaggtcggtccttgtacaatcgtggattctctctgctgatcatgaagaatctcaacgtgacatctctaggatttagaagcctgaaggagatctctgccggccgcatctacatcagtgcaaacaggcaactttgttaccaccattcactaaattggacaaaggtcttaaggggaccaacggaagagcgtcttgatattaaacacaataggccacgccgtgattgtgtcgccgaaggcaaagtgtgcgacccgctgtgttcctcaggagggtgctggggtcccggccccggtcagtgcctttcctgtaggaattacagccgcggcggagtgtgtgtaactcattgcaactttctaaacggcgagcctcgggaatttgcgcatgaagctgagtgcttcagctgtcatccagaatgccaacccatggaggggactgcgacgtgtaacggttcgggttctgatacatgcgcacagtgcgcccatttccgtgatggccctcactgtgttagcagttgtcctcatggagtgctgggcgccaaggggcctatatataagtatcctgatgtccagaatgagtgtagaccttgccacgagaattgcacgcagggttgtaagggccccgagctgcaggactgcctggggcagactttggtgctgattgggaagacacatttgactatggcattaacggtgattgccggactggtggtcattttcatgatgctgggcggtacatttctttattggcggggtcgcaggatacagaataagagggctatgagaagatatctggagcgcggggagtcaatcgagcccctggatccatccgaaaaggcaaataaggtgctggcacgcatcttcaaagagaccgaattgcgcaagctcaaggttctgggatctggagtgtttgggactgttcataagggcgtgtggatccctgagggagagtccatcaagattccggtttgcattaaagtcatcgaagacaaatccggaagacagtcatttcaggccgtgaccgaccatatgttagccattgggagccttgaccacgcgcacatcgtacggctgttaggcctgtgtccagggagctcgctccaacttgtgacgcagtatctgcccttaggctcattacttgaccacgtcaggcaacacaggggagctctgggcccacagctcctgctgaattggggcgtgcagatcgctaaaggtatgtactacttggaagaacatgggatggtccatcgaaacctggcagcccgcaatgtcctgctgaagtccccgagccaggtgcaagtcgcggacttcggggtggccgacttgcttccaccggacgataaacagctgctctatagcgaggcaaaaactcctataaaatggatggcccttgaatcaatccacttcggcaagtatactcatcagagtgatgtttggtcctatggacaatgtatctggatgccctcactgccttcactggcaccggtgagtaacctaccttttgagaccccttcgtag

SEQ ID NO: 26921 - DNA, 10191 bp, synthetic construct
  misc_feature 1..10191: note = Description of Artificial Sequence: Synthetic coding sequence
  source 1..10191: mol_type = other DNA
atgttcatcaacatcaagagcatcctgtggatgtgcagcaccctgatcgtaacccatgccctgcataaggtcaaggttggaaaaagccctcccgtccgaggttccctgagcggcaaggtgagtctgccctgtcatttttctacaatgccaaccctgccaccatcctataatacctctgaattcctcaggatcaagtggtccaaaattgaagtggataagaatggtaaggatctgaaagaaacaaccgtgctcgttgcacagaatggaaatatcaaaatcggtcaggactacaaaggaagggtaagtgttcccacacatccggaagccgtaggcgatgctagccttactgtggtcaagctgctggcctccgatgcaggtctgtatcggtgcgatgtaatgtacggcattgaggacactcaggataccgtttcccttactgtggatggcgtggtgttccattaccgggctgccacttcaagatatacactaaattttgaggccgctcagaaggcctgcttggatgtgggcgcagtcattgcaactcccgagcagttgttcgccgcctacgaggacggttttgagcagtgtgatgcaggctggcttgcggatcaaactgtgcgttatccaatccgagcccctcgggtgggatgttacggggataaaatgggcaaagccggcgtacggacatatggttttcggtcaccacaggaaacctatgatgtctattgttatgtcgatcatctcgacggagacgtctttcatctgacagtgcctagcaagttcacattcgaggaagctgctaaggagtgtgaaaatcaggacgcccgattagctacagtcggcgagctccaggcggcatggaggaacggctttgatcagtgcgattatgggtggctgtcggatgcctcagtgcgacatccggtgaccgtggcccgagcccaatgcggggggggtctgctgggagtgcggactttgtacagatttgagaatcagacaggcttccctccccctgacagccgctttgatgcctattgcttcaagccaaaagaggcaactaccatcgatttgtcaattctagctgagacagcatccccctcgttgagcaaagagccacagatggtttccgaccgtactaccccgattattcccttagtagatgagctgcctgttattccaacggaattcccgccagtcggcaacatagtgagtttcgaacagaaagcaaccgtgcagccacaggctatcacagactctctcgctacaaaactccctacgccaaccggatctaccaaaaagccttgggacatggatgactactctcctagcgcttccggtcctttaggtaaattggacattagcgaaattaaggaggaagtgcttcaatccaccactggcgtgtcacattacgcaacggactcttgggatggggtcgtggaagacaagcaaactcaggagtcggtcacccagattgaacagattgaggtaggccccctcgtcaccagcatggagattctgaagcacattccaagcaaggagttccccgttaccgagacccctctagtaacggcgcgtatgattcttgagtcaaagaccgagaagaaaatggtctctactgtgagtgaattagtgaccaccggccactacggatttacccttggagaagaggacgacgaagacagaaccttaaccgtggggagcgacgagtccaccctgatattcgatcaaatcccagaggtaattaccgttagtaagacttcagaggatacaattcacacgcatctggaagaccttgaatctgtgtccgcgagcactacggtgagccccctcattatgccggataacaatggctcctcaatggacgactgggaagagcgccaaactagtgggcgaatcaccgaagaattcctcgggaagtacctgtctacaacaccatttccctctcagcaccggaccgaaattgagctgtttccttacagcggagataagatcctcgtggaaggcatcagcacggtcatttatccaagcttgcaaaccgaaatgacccacagacgagagaggaccgaaactctgattcccgagatgcgaacggacacctatacggacgaaattcaggaagagatcaccaagagccccttcatgggaaaaactgaggaagaagtctttagcggaatgaaactgtcaacctccctgagtgagccgattcacgtgacggagtcctctgttgagatgactaaaagcttcgatttccctacactcattactaaactcagtgccgaacccaccgaagtgagggacatggaggaagacttcaccgcgacgcctggaaccacaaagtatgatgagaacatcaccaccgtgctcctagcccacggtactctgtctgtagaggcagccactgtgagtaaatggagctgggacgaggataacacgacaagcaagccgctggaatccactgaaccgagcgcgagttctaagctaccaccagccctcctcactaccgtggggatgaacggtaaggacaaggacatcccctcgttcaccgaggatggggctgacgagttcacccttattcccgactctacacaaaagcagctcgaagaggtgaccgatgaggacattgccgcacacggaaagtttactataagatttcagcctactaccagcacagggatcgcagagaagtcaacacttcgagactccactaccgaagaaaaggtgcccccgatcacaagcaccgagggtcaggtttacgcgaccatggaggggtcggccctgggggaagtggaggacgtggatttaagcaagcctgtgagcactgtcccacagtttgcacacacttccgaggtcgaaggactggcattcgtgagttacagttccacccaggaacctaccacgtatgttgactcttcccatacaatcccattgagcgtcataccaaagacggactggggtgttctggtgccctctgtcccatccgaggatgaggttttgggagaaccctcacaagacatcctggttattgaccagacccgattggaagcaacaatctctccagagacaatgcgcacaacgaagatcaccgagggtaccacccaggaggaattcccttggaaggaacagacagctgaaaaacccgtgccagctctcagcagcacagcttggacgccgaaagaagcggttactcccctcgacgaacaggagggcgatggcagcgcttacaccgtgtccgaagatgaactattgacggggtccgagagggtgcctgtgttggagactacaccagtggggaagattgatcatagcgttagctacccgcccggagctgtgacggaacacaaagttaaaactgatgaagtcgtgacactgacaccgcgtatcgggccaaaagtgagcttaagcccggggcctgaacagaagtacgagacagagggaagtagcaccacaggcttcacaagcagtctgtctcccttctctactcatattactcagctcatggaggaaacgacaaccgagaagacttctctggaggacattgatctggggagcggcctgttcgagaaaccaaaggccaccgaattgattgaattttccaccataaaggtcaccgtgcccagcgatataacaactgctttctccagcgttgacagactacataccacttctgcctttaagccaagttctgccataactaaaaagcctccactcattgatagggagccaggcgaagagaccacaagtgacatggtgatcattggggagagtaccagccatgtcccgcccactactctcgaggatattgtggctaaggagacagagacggacattgaccgggagtatttcactacctcctccccacccgcaacacaaccaactcgtccaccgacggtggaagacaaagaggctttcgggcctcaggccttatctacaccccagccacctgcatccactaagtttcaccctgatatcaacgtttatatcatagaggtgagagagaacaaaacgggtcggatgtctgacttgagtgtcatcggccaccctattgactctgaatcgaaggaagatgagccctgctccgaggagacagatcccgttcatgacctgatggcggaaatactgcctgagtttccagacataatcgaaatcgacctctaccactccgaggagaatgaggaagaggaggaggaatgcgccaacgctacagacgtgactacaactccttcagtgcagtacataaatggaaaacatctggtaactacagttcccaaagatcccgaggccgccgaggcgaggcggggccagtttgagagcgtggccccaagccagaacttctctgactcttccgaatccgacactcacccattcgttattgctaagacagagttatccacagccgtacagcctaacgagagtacagaaacaacagaaagtttagaggttacttggaaacccgagacctatccggaaacttctgagcatttttcaggtggtgagcctgatgttttccctacagttcccttccatgaagagtttgaaagtggcacagccaagaaaggagccgagtccgtgaccgagagggacactgaggtggggcatcaagcccacgaacataccgaacctgtgtcactgttccccgaggaaagctccggcgaaattgcaatcgaccaggagtcccagaaaatcgcatttgcccgagctaccgaagtgactttcggcgaggaggtagagaaaagtacatccgtaacatatacgcctacaattgtcccttcttctgcttcagcatatgtgagcgaggaggaggccgtgacactgatcgggaacccttggcctgacgatctcctctccacgaaggagagctgggtagaggccaccccaagacaggttgtggagctctccgggtccagctccatcccgattacagagggaagcggcgaggcagaggaagacgaagacacgatgttcactatggtgaccgacttgtcacagagaaacacaacagacaccctgattaccctggacacgtcccggataatcacggagagcttcttcgaggttcccgcgaccacaatttaccccgtgtctgaacagccttctgcgaaggtcgtccctacaaagttcgtctcagaaacggacacatccgagtggatctcgagcactactgtagaggaaaaaaagcgcaaagaagaagaaggcacgacagggactgcaagcacttttgaagtttacagctcgacacagcggagcgatcagctaatcctcccattcgagttggaatctccgaatgtcgccacaagctcagatagcggtacacgaaaaagcttcatgtccctgaccacccctacccaatctgagcgggaaatgaccgatagcactcctgtgttcacagagacgaatacactcgaaaacctgggggctcagacaacggagcacagttccatccaccagcccggagttcaggaaggtctgactacacttccacggtcccctgcatcagtgttcatggagcagggaagcggcgaggctgccgcagatcccgagacaactactgtgtcttctttcagcctgaacgttgaatatgctatacaagcagaaaaggaggtagcaggcaccctaagcccccacgttgaaactaccttctctacagagcccacagggttggtactgtctactgtgatggatcgcgtagttgcagagaatatcactcagacttccagagagattgttatatccgagcgtttgggcgagcctaattatggagcagagattcggggtttcagcacaggcttcccgctcgaagaggatttttcaggcgatttccgggagtatagcaccgtctctcacccaatcgccaaggaagagacagtcatgatggaaggtagtggagacgctgcttttagagacacacaaacctctccgtctacagtgcctacttcagtgcacatctcgcatatcagcgacagcgaaggaccttccagcaccatggtgagcactagcgcttttccttgggaggagttcacaagttctgccgaaggcagcggcgagcagctggtgaccgtgagttcctctgtggttcccgttctccccagtgccgtccagaaatttagtggaacagccagcagcattatcgatgaaggtctgggtgaggtgggaactgtcaacgagatcgatcgcaggtccaccatccttccaacagccgaggttgagggcaccaaagcaccggtagaaaaagaggaagttaaggtgtctggaactgtaagcactaatttcccacagactatcgagccagccaagctatggtctcggcaagaagtgaaccctgtgcgccaggagattgagagcgagactacctctgaggagcaaatccaagaagagaaatcctttgaatctccacaaaactccccagccaccgagcaaacgattttcgattcccagacttttacggagaccgaactcaagaccactgattactccgtcttgactactaagaagacatatagcgatgacaaggagatgaaagaagaggataccagtcttgtcaacatgtccactcctgatccagatgccaacggactggaatcttataccactctccccgaggccactgaaaagagtcattttttcctcgcaactgcgctggttacggaatctattcccgcagaacacgtggtgacagatagtcctatcaaaaaagaagagagcacaaagcattttcccaaagggatgcggcctacaatccaggagtccgatacggaactgcttttttcaggcctcggcagtggcgaagaagttctacctactctgcctaccgagtctgtcaatttcacagaggtcgagcagatcaataacactctttatccacatacttcacaggtggaaagtacctcctcagacaaaattgaagacttcaaccggatggagaatgtagctaaagaagtcggccctctggtttctcagactgatatcttcgaaggttcaggcagcgtgacttcaacaaccctgatagagatattatcagataccggcgctgaggggccgacggtagccccactgccttttagcaccgacattggacatccccagaatcagaccgtgaggtgggccgaagagatccagacatccaggcctcagaccattactgagcaggacagcaataagaacagttccaccgcggagattaatgagactactactagttctaccgattttctggcgagagcttacggattcgagatggccaaggagtttgtcacttcagcacccaaaccaagtgatctttactatgaaccttcaggagagggaagcggggaggtcgatattgtggacagcttccacacatcagccactacccaggctacaagacaggagtcgtccacaaccttcgtgtccgatggatccctagaaaagcaccctgaagtcccaagcgccaaggccgttactgccgatggatttcccacagttagtgtgatgttgcccttgcattcagagcagaataaaagctccccagatcccacatccacgcttagcaatacggtctcctacgagcggagcactgacggctcctttcaggatagattccgcgaatttgaagactccacactcaagccgaaccgcaagaagcccactgagaacatcattatcgacctggacaaggaggataaggacctcatcctgacaattacggaaagtaccattctggaaatactgcctgagctaacctcggataagaacaccatcattgacattgatcacactaagccagtgtatgaagatatcctaggcatgcaaaccgacatagacaccgaagtgccatctgagccccacgactcaaatgacgagagcaatgatgacagcacacaggttcaggagatctacgaagctgccgtcaacctgtcactgactgaggagaccttcgagggatccgctgatgtacttgcctcatatacacaggcaactcatgatgagtcaatgacctatgaagaccggtcacagctagaccatatgggattccattttacgactggcatccccgcccctagtacagagactgaattagacgtgttgcttcccactgccacctctttgcctatacctagaaagtccgctacagtcattccagagatcgagggcataaaggctgaggcgaaagccctggacgacatgttcgaaagtagcactctgtccgatggacaagcaatcgccgaccagagtgagatcatcccgacactgggtcaatttgaaagaacccaggaggaatacgaggataagaaacacgctgggcccagtttccaaccagaattctcaagcggagccgaggaggctttagttgaccacaccccctatctgagcattgcaactacccacctcatggatcagagcgtgaccgaggtgccagacgtgatggaggggagcaaccccccatactataccgacaccacacttgccgtgtcaacctttgccaaactttcctcccagacaccatcatcccctctaaccatctacagcgggtcggaggcaagcggtcacacagagattccacaaccatccgctctccccggaatcgatgtgggttcatctgttatgtccccacaggacagcttcaaggagattcacgttaatatcgaggctactttcaagccatcaagtgaagaatatttgcatattacagaacccccgagtttgagcccagacacaaagctcgagccttctgaagacgatggtaagcctgaacttttggaggagatggaggcttctcccactgagctaattgcagtcgagggtaccgagatcctccaggattttcaaaataagacggacgggcaagtgtccggagaggcaatcaagatgttcccgacaatcaaaacccctgaggctggcaccgtgattactacagccgacgaaatcgaactggaaggcgctacccagtggcctcacagcacatcagcaagcgctacctacggagtcgaagccggggtagtcccctggctatctccgcaaactagcgagcgtcctacattgagttcgtctcctgagataaaccccgaaactcaggcagctctcataagaggacaagactccaccatagccgcatcagagcagcaggtggctgctagaattttggatagcaatgatcaggccacggtcaatcccgtcgagttcaatacagaggtagccacacccccattcagtctgctggaaacgtccaacgaaacggacttcctgatcgggattaatgaggaaagtgtcgagggcaccgcgatttatcttcccgggcctgaccgatgcaagatgaacccctgtctgaacggtggtacctgttaccccacagaaacctcctacgtctgcacatgcgtcccgggctattcgggtgaccagtgtgagctggacttcgatgaatgtcatagcaatccttgccgtaacggagccacctgcgtggatggcttcaatacttttaggtgcctctgccttccttcttacgttggagctctctgtgagcaagacacagagacatgcgactacggttggcacaaattccagggtcaatgctacaagtacttcgcacataggaggacctgggacgcggcggagagagagtgtcgactccagggggcccacctgactagtatcctctctcacgaagagcaaatgttcgtcaatcgggtaggccatgattatcagtggattgggctgaacgataagatgttcgaacatgacttcaggtggaccgatggttccaccctccagtatgagaattggagacccaaccagcctgacagcttcttcagtgctggtgaagactgcgtggttatcatttggcacgagaacggacagtggaacgacgtcccctgtaactaccatcttacgtacacttgcaagaaagggaccgtggcttgtggccagccgccagtcgtcgaaaatgctaaaacattcgggaaaatgaagcctcgatacgaaattaatagcctgatccggtatcactgcaaggacggtttcatccaaagacatctcccaactatccggtgcctgggcaatggacggtgggccattccaaagataacctgcatgaacccgagcgcttaccagaggacttactctatgaaatatttcaagaacagctcctccgctaaggacaattcaatcaacacctcaaaacacgatcatcgctggagtagacgatggcaggagtcaaggcgctag

SEQ ID NO: 26922 - DNA, 4929 bp, synthetic construct
  misc_feature 1..4929: note = Description of Artificial Sequence: Synthetic coding sequence
  source 1..4929: mol_type = other DNA
atgttcatcaacatcaagagcatcctgtggatgtgcagcaccctgattgtgacccatgcacttcataaggtgaaagtcgggaaaagccctccagtcagaggctccctcagtggaaaagtatctctcccatgtcacttcagcacgatgccaactttgccgccttcctataacacctctgagtttttgagaattaaatggtcgaagatagaagtggacaaaaatggcaaagacctgaaggagacaacagtcctggtcgcgcagaacggcaatattaaaatcggacaagactataagggtcgcgtttctgtgcccacgcaccccgaggccgttggggatgcgtcactgaccgtcgtgaagcttttagcaagcgatgccggcctgtaccgctgcgatgtcatgtatggtattgaagacacacaggatactgtatcattaactgtcgatggcgtggtcttccactatagagcggcaactagccgctatacgttgaatttcgaggccgcacagaaagcctgcctggacgtgggagcagttattgctacccccgagcagctgttcgcggcctatgaagacggcttcgagcagtgtgacgcggggtggcttgccgaccagacagtccgataccctattagagcccctcgcgtgggatgttatggtgacaaaatgggcaaagcaggagtgaggacatatggatttaggtcgcctcaggagacctatgacgtatactgctatgtggatcacctcgatggggatgtgtttcaccttactgttccttccaaattcacttttgaagaggcggctaaagaatgcgaaaaccaggatgctcgccttgccaccgtgggcgaactgcaggccgcatggagaaatggcttcgaccagtgtgactatgggtggctctccgacgcctcagtccgccatcctgtgacagtcgcccgagcacagtgtggtggtggcctcctcggagtgaggaccttatacaggttcgagaatcagaccgggttcccaccacccgatagtcgcttcgacgcttactgcttcaagcctaaagaggccaccactattgatctctcaatactcgccgaaactgcttcccccagtctgagcaaagaaccacaaatggtatcagatagaacaacgcccataatccctttggttgatgagctacccgtgattcctaccgagtttcctccggtgggaaatattgttagtttcgaacagaaggcaaccgtccagccgcaggccattaccgatagtctcgccaccaaactgccaacccctacgggaagtacgaaaaagccatgggatatggatgactacagcccatcggcttccgggccattgggcaagctggatattagtgaaattaaggaggaagtgttacagagtactactggcgtgagtcattatgccacggactcttgggacggagtggttgaggacaagcagacccaagaatctgtcacccaaatcgaacagattgaagtgggacccctggtgacttctatggagattttaaagcacatccccagcaaggagtttccagtgacagaaacccccttggtgaccgcaaggatgatccttgaaagtaaaacagaaaagaagatggtttccacagtgtccgagctggtcacgacaggccactacgggttcactctgggcgaggaggacgatgaagatcggaccctgacggtcgggagtgatgaatcaaccttgatcttcgaccagattcctgaagtgattaccgtttcgaaaacttccgaagatacaatccacacacatctggaagacttagaatcagtgtccgcaagtaccactgttagtcccctgatcatgcctgataacaacggaagttctatggatgactgggaagagcggcagaccagcgggagaatcacagaggagttcttgggcaaatacttaagcaccacaccattcccttctcagcatcgaaccgaaatcgaattgtttccctacagcggtgacaaaatactggtggagggaatctccacggtaatctacccatctcttcagacggaaatgacccatcggcgggagaggaccgagacactgatccccgaaatgcgaacggacacgtataccgacgaaatccaggaagaaataaccaaatcgccgttcatggggaaaaccgaagaggaggtgttttcagggatgaagctgagcacatctttgagcgaacccatacacgtgaccgaatcgagtgtggaaatgacaaaaagcttcgattttcctacattgataaccaagctttcagccgaacccactgaggtgcgtgacatggaggaagatttcaccgccacacctggaacaaccaagtacgatgagaacatcaccaccgttctactggcccacggcacgttatcagtagaagccgctaccgtgagcaaatggtcttgggacgaagacaatacaacaagcaagcctctcgagtccaccgagccttctgcatcttctaagctgcctcccgctctcctgacgacagtgggaatgaacgggaaagataaagacatccccagctttactgaggatggtgcagatgaatttacattgattcctgactctacccagaagcagctggaggaggtgaccgatgaggatatagccgcccacggtaaattcaccatcagatttcagcctaccacctcaacaggaatcgcggagaaatctacactgcgggattcaactactgaggagaaggtgccaccaatcacaagtaccgaaggccaagtgtatgcaacaatggagggaagcgcccttggagaggtggaagacgtcgacctgtcaaaacccgtgtctactgttccacagtttgcccatacgtctgaagttgagggtctagccttcgtatcttattccagtacacaggaaccaacaacttatgtggacagtagtcacacaatcccactgtctgtgattcctaagacggactggggcgtcctggtccctagtgttccgagcgaggacgaggttttgggcgagccctcacaggacattctggtcatcgatcagactcgtcttgaagcaaccattagccctgaaaccatgcggaccacaaagattaccgaggggacaactcaggaggaattcccttggaaagaacaaaccgccgaaaagcctgtgccagccctatcctccacagcttggactccgaaggaggccgtcacgccactggatgaacaggagggcgacggctccgcctataccgtgagtgaggacgaactgctgaccggcagtgaacgggttcctgtgctggaaaccactcctgttggaaagattgatcactccgtgtcctatccccctggcgctgtcacagagcataaggtgaaaactgatgaggtcgtcactctaacgccccgaatcgggcctaaggtgagtctcagtccaggtcccgagcaaaagtatgagacagaggggtcctcaactaccggcttcacatcttccctctcaccattctccactcacattacccagctaatggaggaaactacaactgagaagacaagcctggaggacatcgatctgggtagcggcctctttgagaaaccgaaagccacagagctgatcgaattttcaactataaaggtgaccgttccgagcgacataacaaccgcgttcagctctgtggaccgtcttcacaccacgtccgctttcaagcccagctccgcaattaccaagaaacctcccctgatagatcgcgaacctggcgaagaaactacatctgacatggttattattggcgagtccaccagccacgtaccaccaactactctggaagacatcgtggctaaagagaccgagaccgatatcgaccgggaatatttcactacctcctcaccacccgcgactcaaccaacacggccccccactgtggaggacaaggaagccttcggtcctcaggccttatctactccccaacccccagcttccacaaaattccatccagacatcaacgtctatataattgaagtccgggagaacaagactggtcccgaccggtgtaagatgaatccatgcttgaatgggggaacttgttaccctaccgaaaccagctatgtatgtacttgcgtgcctgggtattctggcgatcagtgcgaactagacttcgatgagtgtcatagtaacccgtgccgcaacggagcaacatgcgtagatggatttaacacgtttagatgcctgtgcttgcctagttatgtcggggccctgtgtgagcaagatacagagacctgtgattacggctggcataaattccagggccagtgttacaagtactttgcccacagacgtacgtgggatgcggctgagcgggaatgccggttgcagggagcacatttgacgtccatcctgagccacgaggaacagatgtttgttaaccgcgttggacacgactatcagtggattggcttgaacgacaagatgtttgaacatgattttaggtggactgacgggagtactcttcagtatgaaaattggcgccctaatcagcctgactcttttttttcagccggggaagattgtgttgtcatcatctggcatgagaacggccagtggaacgacgttccctgcaattatcaccttacatacacctgtaaaaaaggaactgtggcttgcggacagcctccggtggtcgagaacgccaaaactttcggcaagatgaaaccaaggtacgaaatcaactcactcataaggtaccactgcaaggatgggttcatacagcgacatctgcctacaatacgatgcctgggcaatggcaggtgggctatccccaaaatcacttgtatgaatcccagtgcatatcagcggacttacagcatgaagtactttaagaatagcagcagtgccaaagataattcgatcaatacctctaaacatgaccaccgctggtctcggagatggcaggagtcaagaagatag

SEQ ID NO: 26923 - DNA, 7230 bp, synthetic construct
  misc_feature 1..7230: note = Description of Artificial Sequence: Synthetic coding sequence
  source 1..7230: mol_type = other DNA
atgttcatcaacatcaagagcatcctgtggatgtgcagcaccctgatcgtgacccacgcactacataaggttaaggtgggaaagtcacccccggtgaggggttctctgagcggcaaggtaagcctgccctgtcacttcagcacgatgccaactctgccgcctagctataatacctctgaattcctgagaatcaagtggtccaaaatcgaggttgacaagaacggaaaagatttgaaggaaacaaccgtgctcgtggctcagaacggcaacattaaaatcgggcaggattacaagggacgggtgagcgtgccaacgcacccagaggccgtcggggatgcgtccctgactgttgtgaagctgctggcctcagacgctgggctgtatcgatgcgacgtgatgtacgggattgaagacacccaggacactgtctctctgactgtagacggagttgtgtttcactatcgggctgcaacttccaggtacacgctcaacttcgaggctgcccaaaaagcttgtctggatgtaggggcagtgatcgcaaccccggagcagctgtttgccgcctatgaggacggcttcgagcagtgcgatgccggctggctggccgatcaaaccgttcgatatcccatccgtgcccctcgcgtggggtgctacggcgataaaatggggaaggctggagtgcgtacttacgggtttaggtcacctcaggagacgtacgacgtttattgttacgtagaccacctggatggtgacgtgtttcaccttaccgtgccatccaaattcaccttcgaggaggccgcaaaagaatgtgagaaccaggatgcacgcttggctactgtcggcgaactgcaagccgcctggcgcaatggctttgaccagtgcgactatggttggctgtccgacgcttccgtcaggcaccctgtcactgtagcccgcgcacagtgcggcggcggtctgctcggggtgcgaacactttaccggtttgagaatcaaacaggttttccacctcccgactctcggtttgacgcctattgtttcaagcgtagaatgagcgatctgtccgtgatcggccacccaatcgattctgaatctaaagaggacgaaccgtgttcagaggaaactgaccctgtccatgatctcatggctgagatcctgccggaatttcctgacattattgagatcgatctgtatcacagtgaagagaacgaggaagaggaagaggaatgcgccaacgccacagacgtgaccacaaccccctccgtccagtatatcaacggcaaacacctggtgactaccgtgcctaaagacccggaagctgctgaggctcgcagaggtcagtttgaatccgtggctccctctcagaatttcagcgacagcagcgagagcgacacgcatcccttcgtgattgcgaagacagagctgtctactgcagtgcagcctaatgaatcaaccgaaacaaccgaaagcctcgaggtgacttggaagcccgaaacttatcctgaaacaagcgagcattttagcggcggtgaaccagacgtttttcccaccgtcccctttcatgaggaatttgagtcagggactgcaaagaaaggcgccgagagcgtgaccgagcgcgacactgaggtgggccaccaggctcatgagcacacagaaccggtgagcttgttcccggaggaaagctcaggggaaattgcaatcgaccaagagtcccaaaagattgcgtttgctcgcgctaccgaagttacctttggcgaggaggtggagaagagcacatccgtgacatacacgcccacgatcgtcccttcttcggcctcggcttacgtgagtgaggaggaagctgtgactctgatcgggaatccctggcctgacgatttgctgagtaccaaggagtcttgggttgaagctactcctcgacaggtagtggagctaagcggctcatctagtataccaattactgaaggatccggcgaggctgaggaggatgaagacactatgttcacaatggtgaccgatctgtctcagaggaacactacagatacattgattacactggacacatctaggattatcaccgaatcatttttcgaagtgcccgctaccaccatttacccagtcagtgagcagccctccgctaaggttgtcccaacaaaatttgtgagcgagaccgatacaagcgaatggattagtagcaccacggtggaagaaaagaaaaggaaggaagaagagggcactactggtacagccagtaccttcgaggtctattcgagcacccagaggagtgatcaattaatcctacccttcgagcttgaatccccgaatgtggctacttcaagcgacagcggcacccggaagagctttatgtcacttaccacccccactcagagtgaacgggaaatgaccgattctactcctgtcttcactgagacaaacacactggagaaccttggcgcccagaccacagagcattcctctatccatcagcctggcgtgcaagagggccttacaacgctgcccaggagtccggcgtcagtctttatggagcagggttcaggagaggccgccgcggaccccgaaaccacgacagtttcatcctttagtctcaatgtagagtatgccattcaggcagaaaaggaggtggctggaactctatccccacacgtcgagacaacattctcaacagagcccacagggctggttttatctaccgtgatggatagggtggtcgccgagaacattacccagacatcaagagaaatcgtgattagcgaaaggctaggcgaacccaattacggcgctgagatccgcggattctcaactgggttccccttggaggaagacttcagcggcgattttcgcgagtattcaactgtgtctcaccccattgccaaggaggaaactgttatgatggaggggtcgggcgacgccgcttttcgagacacacagaccagtccctccacagtgcctacaagcgtccacataagccacataagtgattcagaggggccaagctccaccatggtctccacgtccgcttttccctgggaggaatttactagttccgcagaaggaagcggggaacagttggtgaccgtgtctagctccgtggtaccggtgttaccatctgccgtccagaaattcagcggaacagcttcgagcataatagacgaaggcctcggtgaggtcgggactgtgaacgaaatagatcgaagatctacgattctcccaaccgcggaggtggaaggaaccaaggctcctgtcgagaaggaggaggtgaaggtttccggaactgtttctacaaactttcctcagactatcgagcctgcaaagctatggagccggcaggaagtaaacccagtgcgccaggagatcgaaagcgaaacaactagtgaagaacaaattcaggaggaaaagtctttcgaatcccctcagaatagccccgccacagaacagacaattttcgattctcagacattcactgaaaccgaactcaagaccacggattattccgtcttgactaccaaaaagacctatagtgacgacaaggagatgaaggaagaggatacatcactggtaaacatgagcacgcccgacccggatgccaacggcctcgagagctataccactctcccagaagcgactgagaagtctcactttttcttggccacggccctggttacagagtcaattcccgcggagcatgtcgtaacagattccccaattaaaaaggaagagtccacaaagcacttccccaagggtatgagaccaactatccaggagtctgacactgagctattgtttagcggactcgggtcaggcgaggaggttctgcccacactgcctaccgaatctgtaaactttacggaggtcgaacagattaacaacacactgtatccgcacaccagccaagtagaatctacttcgtcagacaaaattgaggactttaacaggatggaaaatgtggcaaaggaggtcggcccccttgttagccagaccgatatcttcgagggctccggaagcgtgactagtacaactctgattgaaatactgtcggatacaggcgccgaaggccctacagtcgctcctcttcctttctcaacagacataggacaccctcaaaatcaaaccgtgcgctgggccgaggagattcaaacatcccggcctcagactatcaccgagcaggattccaacaaaaatagctcaacggctgagatcaatgagaccaccacctcctccaccgattttctggcccgggcttatggcttcgagatggccaaggagtttgtaaccagcgccccaaaaccaagtgatttatactacgagccaagtggtgagggatctggagaggtggacatcgtagactcttttcatacctccgccacaacccaggctacaaggcaggaaagttctaccacattcgtaagcgatgggtccctggaaaagcatccggaagtgcccagcgcaaaagcagtcacagcagacggcttccctacagtgtccgtgatgcttccactgcacagcgaacagaacaagagcagcccagatcccacctccacactgtccaatacagtgagttatgaacgatccacggatgggtcattccaggatcgctttagggagtttgaggactccaccttaaaaccaaacaggaagaagcccactgagaacataattattgacttggataaggaagacaaagatttaatcctaactatcaccgaatctactatcctggagattctccctgagctgacatccgataaaaacactatcatcgatattgaccacacaaagcctgtctacgaagatattcttggcatgcagactgacattgacaccgaggtgccctccgaaccgcacgactccaatgacgagtcaaacgacgattctacgcaggttcaggaaatttatgaggctgcagtgaacctatctctgaccgaggagacttttgagggatcggccgatgtgcttgccagttatacccaagccactcacgatgagagcatgacctatgaagatcgttcccagctggatcacatgggattccatttcaccactgggatcccagctccgtctacggagactgagctagatgttctcctgcccactgctacatctctgcccattcccagaaaatctgctacggtgatcccagaaatcgaagggataaaagccgaagccaaggccctggatgatatgtttgaatcgtcaacattgtctgacggacaggcgatagcggatcagtcagaaatcatccccaccctgggccaattcgagcgcacccaggaagagtacgaagacaagaagcacgcggggccttcatttcagccagagttcagtagcggagcggaagaggcactagtcgaccacacgccttatctaagtattgcaaccacacatctgatggatcaaagcgtcaccgaggtccctgacgtcatggagggttctaaccccccgtattacacagacactactctggcagtgtccaccttcgccaaacttagtagtcagacaccaagtagtcctttgacaatctattcagggtcagaagctagtggtcatacagagatcccccaaccatcagctctgcctgggatcgacgtcgggagcagtgtaatgtccccccaagacagtttcaaagagattcacgtcaacattgaggccacctttaaaccatcttccgaggagtacctccatatcacagagcctccctcactctcacctgacaccaagttggaaccaagtgaagacgacggaaaaccagagctgctggaggagatggaagcctcgcccaccgagcttatcgcggtggagggcaccgagattctacaggatttccaaaacaagacggatgggcaagtgtcaggggaggcgatcaagatgttcccaactataaagacaccagaagctgggacggtcatcacgaccgcggatgaaatcgagctggagggggccacacagtggccccacagcacctccgccagtgctacttacggggtggaagccggcgtggttccctggcttagcccccaaacttccgagaggcccaccctgagctccagccctgagattaacccagagacccaagcagcactgatacggggacaggactcgaccatagctgcttccgagcagcaggtcgccgctaggatactcgatagcaatgatcaggcaactgtgaaccccgtggagtttaacaccgaagttgctactcctccattcagtttgttggagacatccaacgagactgatttccttattggaatcaatgaggaaagcgtggagggcactgccatttacctgccaggccccgacagatgtaaaatgaatccttgcctgaatggaggaacctgctatcctactgaaacatcctacgtgtgcacttgtgtccccggctacagtggtgaccagtgcgaactcgactttgacgagtgccacagtaacccctgtaggaatggagcaacatgcgtcgacggctttaacaccttcagatgtttatgtctgcccagttacgtgggtgcactgtgtgaacaagacacggagacttgtgattacggatggcataaattccagggtcagtgctataagtactttgcccaccggcggacctgggatgccgccgagcgcgaatgccgcctccagggagctcatttgacaagtatcctgagccacgaagaacagatgttcgtgaacagggtaggccacgactaccagtggatcgggctcaacgacaagatgtttgaacatgatttcaggtggactgatggctctacattgcagtatgaaaattggcgccccaaccagccggatagttttttctctgcaggtgaggactgtgtggtcatcatctggcacgagaatggtcagtggaatgacgtgccttgcaactaccatttgacctacacctgcaaaaaagggacagtcgcctgcggtcaacccccagtggtcgagaatgcaaaaacatttggaaagatgaagcctcgatacgaaatcaactccctgattcgttaccactgcaaagacggctttatccagcgtcaccttccgacaattcgttgcctgggcaacgggaggtgggctatcccaaagatcacttgtatgaacccatctgcgtaccaacgaacatactctatgaaatactttaaaaattccagcagcgctaaggataatagcatcaacacgagcaagcacgaccaccgctggtcgcgaagatggcaagagagcaggcgttag

SEQ ID NO: 26924 - DNA, 4785 bp, synthetic construct
  misc_feature 1..4785: note = Description of Artificial Sequence: Synthetic coding sequence
  source 1..4785: mol_type = other DNA
atgcccaccctgccccccagctacaacaccagcgagttcctgcggattaagtggtctaaaatcgaggtagataagaatggaaaagatctcaaggagaccaccgtcctggttgcccagaacgggaacataaagatcggacaagattataagggcagggtatctgtacccacgcatcccgaagcagtaggtgatgcctctctgaccgtagtcaaactgctggcatccgatgcaggcctgtatcgctgcgatgtgatgtatggcatagaagatacacaagataccgttagcctgacagttgatggcgtcgtcttccattatagagcggccacatcacggtatactttgaactttgaggctgcacagaaagcctgtctggacgtgggggccgtgattgccactcccgaacagctgtttgccgcgtacgaagatggctttgagcagtgtgatgcgggttggctagcagatcaaaccgtgagatacccaatacgtgccccaagagtgggatgctacggagataaaatgggtaaagccggtgtgcggacatacggatttcgatccccacaggagacctacgacgtgtactgctatgtggaccatctggacggagacgtcttccacttaactgtcccctcaaaatttacctttgaggaagctgcaaaagagtgtgaaaatcaggatgcccggcttgccacagttggagaattacaggctgcctggcgaaatggatttgaccagtgcgactacggttggctgagcgacgcatctgtgcgtcaccctgtcacagtggcccgggcccagtgtgggggtggccttctcggcgtgcgcacactgtatagattcgagaaccagaccggtttccctcctcccgacagccggtttgacgcttattgttttaagcctaaggaggcaaccaccatagacttgtccattctagcagaaactgccagtcccagcctctccaaggagccacaaatggtgtctgatcgcaccactcctatcattccactcgtggatgaattaccagtgatcccaaccgagttccctccggtgggcaacattgtgagctttgagcagaaagctaccgtccaaccgcaggcgattaccgactcgttggcaacaaagctccctaccccaactggcagcactaaaaagccttgggacatggatgactacagcccctccgcatcgggccccttggggaagttggatatctctgaaattaaggaggaggtcctccagagtacaacaggcgtgtctcactatgctactgactcatgggatggagtggtcgaagataagcagacgcaagagagcgtcactcagattgaacaaatcgaggtcgggccgctggttacctcaatggaaattctgaagcacattccgtcaaaagaattccccgtcacggaaacccccctcgtaaccgcacgaatgatcttggaatctaaaaccgagaaaaagatggtgtctactgtgagcgagctggtcaccactggccattacggctttactctcggggaagaggatgatgaagaccgaacgctgactgttggttccgatgaatccaccctcatcttcgaccagatccccgaagtcattactgtgtcgaaaacctccgaggacaccattcatactcacctggaggacctggaatccgtgtctgcaagcaccacagttagccctctcattatgcctgacaacaacgggtcttccatggacgattgggaggagcgacagacatctggacgcatcaccgaggagtttctgggaaagtacttatcgacgacaccgtttccctcccagcaccgaacagagatcgagttgttcccctacagcggggacaagatattggttgagggaatttcaaccgtgatatatccttcactgcagacagaaatgacacatagacgggagcggactgagacattgataccagaaatgcgaacagatacttacaccgacgaaattcaggaggaaattaccaaatcaccttttatggggaagactgaagaggaagttttttcaggcatgaaactctcgaccagcttgtcagaacctattcacgtaaccgagagttccgttgagatgacaaaatccttcgattttccaaccctgattactaagctgtcagcagaacccaccgaggtgagagatatggaggaagacttcactgctactccagggaccaccaagtatgacgagaacatcaccacagtgctgctggctcacgggaccctatctgttgaagccgcaacagtgagtaagtggtcgtgggatgaagacaacacaacaagtaaacccctggaatcaactgagccctcagcgagtagtaaactgccccccgccctcctgaccactgtgggtatgaacggcaaagataaagatatcccatccttcaccgaagatggtgctgatgagttcactctcattcccgattctacacaaaaacaacttgaagaggtaactgacgaagacattgccgcacatggaaagttcacgatcaggtttcagccgacgacatccacgggcatcgcagagaaatccactctgcgggatagtactaccgaagaaaaagttccgcctataacatccacagagggccaggtatacgcgactatggagggcagcgctcttggagaggttgaagacgttgacctttctaagcctgtctccacagttccccagttcgcccacacctctgaagtcgagggcttggcatttgtctcctattcaagcactcaggaaccaaccacatatgtcgactctagtcataccatcccactttccgtcattcctaaaacagattggggagtgctggtgccctctgtgccatctgaggatgaagtcttgggtgagcccagccaggatatcctggtgattgaccagacccgcttggaggccactatcagccccgagacaatgcgcactaccaaaatcaccgagggtaccacacaggaggaattcccttggaaggaacaaacggccgagaagccagttcccgctctatcatctacagcctggaccccgaaggaagcagtgactccactggacgagcaagagggagacggctccgcctacactgtgagcgaagacgagcttctgactgggagcgaaagggtccccgtcctagagaccacccccgttggtaagatcgaccatagcgtcagttacccaccaggggcagtgactgagcacaaagttaaaaccgatgaggtcgtcaccctcacgcccagaatcggaccaaaagtaagtctgagtccggggcccgaacagaaatatgaaacagagggcagcagcacaactgggtttaccagctcgctgtctccattttctacgcacattactcagctgatggaagaaaccaccacagaaaagacaagcttagaggacatcgatcttggttctggcttgtttgagaagccgaaggccaccgagctcatagaattttccacaatcaaggtaaccgtgccttccgacataactaccgccttttcctcggttgatagactccacacaacaagtgcgttcaaacctagctccgccattaccaagaaacccccactgattgaccgcgagccaggtgaggagactactagtgacatggtcattatcggcgaaagcacaagccatgtgccgccgacaacactcgaagatatagttgccaaagagaccgagacagacattgaccgggagtatttcaccacctccagtccccccgccacccagcccactaggccacctacagtggaggacaaagaggcatttgggccccaggccctctcaaccccacagccccccgcgtctacaaagttccatccggacattaacgtctatatcattgaggtaagggagaataagaccggcccagaccggtgcaaaatgaatccctgcctaaacggagggacttgttatccaaccgaaacttcatacgtgtgtacctgtgtgcctggctactcaggtgaccagtgcgagttagacttcgatgagtgtcatagtaacccatgtcgaaacggcgcaacatgtgtcgatggcttcaacacgtttcggtgtctatgcctgccaagttacgtgggagccctttgtgaacaagacacagaaacctgcgactacgggtggcataagtttcaggggcagtgttataagtactttgctcatagacgcacttgggatgcagccgagcgagagtgccgattacagggcgcacacctgacctccatcctgtcacatgaagagcagatgttcgtaaaccgggtcggacacgactaccagtggataggactgaatgataagatgtttgagcacgacttccgttggaccgatgggagcaccctgcagtacgaaaactggcggccaaaccagcctgactctttttttagcgccggtgaggactgtgtggttataatttggcacgaaaatgggcagtggaatgatgtgccatgtaactaccacctgacctatacttgtaaaaaggggaccgtggcatgtggccagcctccagtcgtcgaaaacgccaagacattcggtaaaatgaaaccccggtacgaaattaacagcctgatcaggtaccattgtaaagacggcttcatacaacgtcacctgcccaccatcagatgcctgggcaacggccgctgggctatccctaaaattacctgcatgaatccaagtgcatatcagaggacttattccatgaaatattttaaaaacagtagttctgcaaaagacaatagtattaatacaagcaaacatgatcaccgctggagccggcggtggcaagaaagtcgaagatag

SEQ ID NO: 26925 - DNA, 1968 bp, synthetic construct
  misc_feature 1..1968: note = Description of Artificial Sequence: Synthetic coding sequence
  source 1..1968: mol_type = other DNA
atgttcatcaacatcaagagcatcctgtggatgtgcagcaccctgatcgtcacccatgcactgcacaaagttaaagtggggaagtctccgcctgtgcgggggtcgttaagcggcaaggtcagcctgccgtgtcatttctccacgatgcctactctccctccttcttataatacatcggaattcttgcggattaagtggtcgaagatcgaggtagacaagaacggaaaggatctgaaggagaccaccgtgttggtagcgcagaatgggaacattaagatcgggcaggattataaggggagagtctccgtcccgacgcatcctgaagctgttggcgatgcgtctttaaccgtggtgaagctcctcgctagtgatgctggtttgtaccggtgcgacgtcatgtacggcatcgaggacacccaggataccgtgagtctgacggtcgacggcgtggtcttccattatcgagcagctactagtcgttataccctcaatttcgaggcggcacagaaagcctgtctcgacgttggagcagttattgcaacgccagagcaattgttcgccgcctacgaagatggtttcgaacaatgtgatgcggggtggctagctgatcaaactgtacgttatcctatcagggcgccccgcgtcggatgctatggggataaaatgggaaaggccggagtgaggacatatgggttcagatcccctcaggagacctacgacgtgtattgttacgtcgatcacctagatggggacgtgttccatttgaccgttccatctaaatttacctttgaagaagctgccaaggaatgcgaaaatcaagacgccagacttgccacagtgggagagctccaggcagcttggcggaatggctttgatcaatgcgattacggctggcttagcgacgcctcagtacgccatcctgtcaccgtagcacgagcacaatgtggcgggggattgttgggcgtgagaactctctatcggttcgagaaccaaaccggattccccccccctgacagccggtttgatgcttattgcttcaaacggcctgataggtgtaaaatgaatccttgtttgaatggaggaacttgctaccccacagagaccagctacgtgtgtacgtgcgtcccaggttactctggcgaccaatgtgaactggacttcgacgagtgccactcgaacccatgccggaacggcgccacttgtgtagacggcttcaacacgtttaggtgtttatgcctaccctcctacgtcggagcactttgcgagcaagacaccgagacctgcgactatggatggcacaagtttcaaggccagtgctacaaatattttgctcatcgcaggacgtgggatgcggctgagcgggagtgccgtctacagggagcacatctgactagcatcctgagtcacgaagagcagatgtttgtgaatcgagtgggccatgattatcagtggattggtctaaacgataaaatgtttgaacacgattttaggtggacagatgggagcaccctccagtatgagaactggcgtccaaaccagcctgactcctttttttcagcaggcgaggactgtgtcgttatcatttggcacgagaacgggcaatggaacgatgttccctgcaactatcacctgacatacacctgcaagaaggggactgtcgcttgcggtcagcctcctgtcgtagagaacgccaagacttttggaaagatgaagccacgatacgaaatcaactcgctgataagataccactgcaaagacgggttcattcaacggcatttgccaaccattaggtgtctcggcaatggacgctgggccattcctaagatcacttgtatgaacccatcagcctaccagagaacttatagtatgaaatattttaagaattcctcatcagccaaagataatagcatcaacacctcgaagcatgaccatcggtggtcccggcggtggcaagagagccgaaggtag

SEQ ID NO: 26926 - DNA, 1440 bp, synthetic construct
  misc_feature 1..1440: note = Description of Artificial Sequence: Synthetic coding sequence
  source 1..1440: mol_type = other DNA
atggccagcaccatcaaggaggccctgagcgtggtgagcgaggaccagtccctgtttgagtgtgcatatggaaccccacacctcgccaaaaccgagatgacagctagttcaagcagcgactatggacagacaagcaaaatgtccccacgtgtgccacagcaagactggctgagccaacctccggcaagagtgactatcaagatggagtgcaaccctagccaagtaaacggcagcagaaatagccctgatgagtgctctgtggcgaaaggcggcaaaatggtcgggagcccggacacagtggggatgaattacggcagctacatggaagagaaacacatgcctcctcccaatatgacaacgaatgagaggcgtgtcattgtacctgctgacccaacactgtggagcacagaccatgtcaggcagtggctcgagtgggcagtaaaagagtatggactgcctgatgtgaatattcttctctttcagaacatcgatgggaaggaactttgtaagatgacgaaggacgatttccagcggctcaccccatcttacaatgccgatatcttgttatcccatctgcattatcttcgtgagacacccctgccccacctcacctccgatgatgtggataaagcgttgcagaattcgccacgcctgatgcacgcccggaatactggaggtgcagcctttatcttcccgaacacatccgtgtatccggaagcaacgcagcggataaccacaaggcccgacctaccatatgagccaccacgaagaagcgcctggaccgggcatgggcatccaacccctcagagcaaagccgcgcaaccgagtccctccacggtaccaaagaccgaggaccaaaggccccagttggatccctatcagattctgggtccaacatcttctagactggccaatccggggagcgggcagatccagctttggcagtttctgttggaattattgagtgattcatcaaatagtagttgcattacttgggaaggcacgaacggagagtttaaaatgacagacccggacgaagtggctcgtcgctggggtgagagaaagtctaagcccaatatgaattacgataagcttagtcgggccctgagatactactacgacaagaatatcatgaccaaggtgcacggaaaaaggtacgcctacaagtttgactttcacgggatcgcccaggccctgcagcctcatcccccggaaagctccctatacaaataccctagcgacctcccctacatgggcagctaccacgctcatccccaaaaaatgaactttgtggcaccccatccaccagccctgcccgttacatcttcatcctttttcgcagcgcctaacccgtactggaacagcccaactggcgggatctatccaaatacccgcctgccaactagccacatgccatcccacctcggcacctattattag

SEQ ID NO: 26927 - DNA, 1092 bp, synthetic construct
  misc_feature 1..1092: note = Description of Artificial Sequence: Synthetic coding sequence
  source 1..1092: mol_type = other DNA
atggtgggcagccccgacaccgtgggcatgaactacggcagctacatggaagagaaacacatgccgccaccaaacatgactacaaatgagcggcgcgtcatcgtacctgccgatcccacgctctggagtaccgatcacgtgcgacaatggctggagtgggctgtgaaagagtatggattacccgacgtaaatattctgctgtttcagaacatcgatggtaaggagctgtgcaaaatgactaaggacgacttccagaggctgacgccaagttacaacgcggacattctcctttcacacctccactacctgcgggaaacacccttgccccacctcacttccgacgacgtggataaagcgctacagaatagtccaaggctgatgcacgctagaaatacggacttgccatacgaaccgccaaggcgttcggcatggacaggtcacgggcatcccactccacaatctaaagctgcccagccatccccatctaccgttcccaaaacggaggaccagcgaccccagcttgatccataccagatcctcgggccaactagttctcgtctcgccaatcccggttccgggcagatccagctctggcagttcctgctcgagctgctatcggattcttccaacagctcttgcattacctgggagggaacaaatggcgaattcaagatgactgatcccgacgaggttgcacgcagatggggcgagagaaaatccaagccaaacatgaattatgacaaattgagcagggccctaagatactactacgacaagaatataatgactaaggtgcatggaaagcggtacgcttacaagtttgatttccatggcatcgctcaagcccttcaaccccatcctcccgagtcctccctctacaagtatccaagcgatctgccgtacatggggtcttaccacgcccatcctcagaaaatgaattttgtggccccacatcctccagccctcccggtgacgtcctcgagtttctttgccgcaccgaatccatactggaacagtcctacaggagggatctatccgaatacaagactgcctacgagccatatgccctctcatctgggcacatactactag

SEQ ID NO: 26928 - DNA, 1389 bp, synthetic construct
  misc_feature 1..1389: note = Description of Artificial Sequence: Synthetic coding sequence
  source 1..1389: mol_type = other DNA
atgatccagaccgtgcccgaccccgccgcccacatcaaggaggccctcagtgtagtgtccgaggatcagagcttgttcgagtgcgcatacggtacgcctcacctggctaaaaccgagatgacagcgtccagcagcagcgactatggccaaacatctaagatgtccccgcgcgtcccccagcaggattggttatcacagccacccgctcgagtgacaatcaaaatggagtgtaatccgagccaggtgaatggctccagaaactcccccgacgagtgttccgtggccaagggcgggaagatggttggttctccagataccgtgggtatgaattacggctcctacatggaagagaagcatatgccaccccccaacatgactaccaacgagaggcgggtcatcgtacccgcagacccaacactttggtcaacggaccacgtacggcagtggctggaatgggcagtaaaagagtatgggttgcccgatgtcaatatcttgcttttccaaaatattgatggtaaagagctgtgtaagatgaccaaagacgactttcagaggttaaccccttcttataacgctgacatcctgttatcacacctgcactatctccgggagacgccccttccacacctgacatcagacgatgtggacaaagcacttcagaactcgccacgactcatgcacgcccgaaacactgatctcccgtacgaacctccacgtaggagcgcctggaccggacatggccacccaactccgcagtcgaaagcagctcagccctctccaagtactgtacccaagactgaggatcaacggccgcagcttgacccatatcaaatccttggacccacaagctcacggctggcaaaccctgggagcggtcaaatacagctgtggcaattcttgctagagttgttaagcgatagctctaactcgtcctgtatcacatgggaaggaaccaatggtgagttcaagatgacagacccggacgaagtcgctcgccgctggggcgaaaggaagtctaaaccaaacatgaactacgacaagttaagtcgcgctctgcggtattattacgataagaacatcatgactaaagtgcacggaaagcggtatgcctacaaatttgatttccacggcattgcccaggccttgcagccgcatcctccagaatcctcactttacaaatatccatccgacctcccctatatggggagctatcacgctcacccccagaagatgaatttcgtagccccacacccacctgcactgcctgtcacttccagttctttctttgccgctcccaatccttattggaacagcccaaccggcgggatctaccccaacaccaggttgccaacatcccatatgccctcccatcttggcacttattactag

SEQ ID NO: 26929 - DNA, 1461 bp, synthetic construct
  misc_feature 1..1461: note = Description of Artificial Sequence: Synthetic coding sequence
  source 1..1461: mol_type = other DNA
atgatccagaccgtgcccgaccccgccgcccacatcaaggaggccctgtctgtggtatccgaggatcagagtctctttgagtgcgcctatggaacaccgcacctcgctaaaacagaaatgacggcttcctccagttcagattatggccagaccagcaagatgagccccagggtgccgcagcaggactggctttcccaaccaccagcaagggtcactattaaaatggaatgcaacccatcacaggtgaatggcagtcgtaatagcccagacgagtgtagtgtggcgaaaggagggaagatggtgggctcccctgatacagtggggatgaattatggatcatacatggaagaaaagcatatgcctcccccgaatatgacaacaaatgaacgccgggttatcgtgcccgctgacccgactttgtggtccaccgatcacgtacggcagtggctggaatgggcagtcaaggagtacggactgcccgacgtcaacatcttgctgtttcagaacattgacgggaaagagctgtgtaagatgactaaggatgacttccagcgcttgacccctagctacaatgctgacatcctgttatcacacctgcactacctgcgggaaaccccactgccacatctcacaagtgacgatgtggataaagcgctacagaactcgccgcggctcatgcacgcccgcaatacagggggggccgctttcatctttcctaatacatccgtttatccggaagcgactcagcgcattactactaggcccgaccttccttatgagcctccccggcgcagcgcatggacagggcacggacatccaacgccccagtccaaggccgcccaaccatctcccagcaccgtgcccaagactgaagaccaaagacctcaactggatccgtatcagattttgggcccaacgtcaagccgccttgcaaaccctgggtctgggcaaatccagttatggcaattccttctggaactcttaagtgacagcagtaatagctcctgtattacttgggaagggaccaacggagagttcaagatgactgacccagacgaggttgctagaagatggggcgagagaaagtccaaacccaatatgaattatgacaagctctcccgcgctctgcggtattattatgacaagaatatcatgaccaaagtacatggcaagcgatatgcttataagttcgatttccacggcatcgctcaggcactacagccacatccgcccgagagtagcctgtacaaataccccagtgacttaccgtacatggggagctatcatgctcatccccagaaaatgaatttcgtggctccgcatcccccggccctccctgtcacatcatcatccttctttgctgcccccaatccatattggaattccccaaccggaggaatctaccctaacaccagactccccactagtcatatgcccagccatctgggcacttactattag

SEQ ID NO: 26930 - DNA, 1461 bp, synthetic construct
  misc_feature 1..1461: note = Description of Artificial Sequence: Synthetic coding sequence
  source 1..1461: mol_type = other DNA
atgatccagaccgtgcccgaccccgccgcccacatcaaggaggccctgagcgtggtgagcgaagaccagagtctattcgaatgcgcctacgggacaccacaccttgctaaaactgagatgaccgcttcatctagttccgattacggccagacctctaagatgagtccccgcgtccctcagcaggactggctgtcccaaccccctgctagggttaccatcaagatggaatgcaacccatcccaagtgaacgggagcaggaattcccccgacgaatgtagcgttgccaaaggggggaagatggtaggatccccggatacagtgggaatgaattacggaagctatatggaggagaagcacatgcctcctccaaacatgacgacaaatgaacggcgcgtcatcgtacctgcagaccctacgctgtggtcaacagatcatgtgcgacagtggctggaatgggctgttaaggagtatggcctgcccgacgtcaatattctgctcttccagaacatagatggtaaagagctgtgcaagatgaccaaggatgattttcaacgactcactccatcttataacgcggatatcctgttgtctcatctacactacttgagagaaacgcctcttcctcatctaactagcgacgacgttgacaaagcactgcagaattccccccggctgatgcacgcccgaaatactggcggggccgccttcattttccccaataccagtgtttacccagaggcaacgcagcggatcaccacaagacccgatttaccctatgagcctccaaggaggtccgcctggactggtcacgggcacccaaccccacagtcaaaggctgcccaaccaagtccctccaccgtaccaaagaccgaagaccaaagaccacaactcgatccatatcagatactcggtccaacctcatcccgccttgccaatccaggctccggacagatacagctctggcaatttctcctggaactcttatcagactcttccaactcaagctgtattacttgggagggaaccaacggagagtttaaaatgacagatccagacgaagtggccaggcgatggggcgagagaaagtcgaagccgaacatgaattatgacaagttgagcagggctttgcgatactactacgataagaacatcatgaccaaagtccacggcaaaagatatgcttacaagttcgactttcacggtatcgctcaggccctgcagccccaccctcctgagtccagtctatataaatatccatctgatctgccgtacatgggcagttatcatgctcacccacaaaagatgaacttcgttgctccccatccaccggccctacccgtcacatcatcaagcttttttgctgctcctaatccctactggaattcccccaccgggggcatatacccgaacacccgtctgcctaccagccacatgccaagccacctaggcacatattattag

SEQ ID NO: 26931 - DNA, 516 bp, synthetic construct
  misc_feature 1..516: note = Description of Artificial Sequence: Synthetic coding sequence
  source 1..516: mol_type = other DNA
atggccagcaccatcaaggaggccctgagcgtggtgagcgaggaccaatctctgttcgaatgcgcctacggaacccctcatctggctaaaacggagatgactgcgtcttcatcctcggactacggacaaacatcaaaaatgagccctcgagtccctcagcaggactggctttcccagccaccagccagagttacaatcaagatggagtgcaacccctcccaagtaaacggctcccgcaactcaccagatgaatgtagcgtagccaagggcggtaagatggtgggctccccagacaccgtgggcatgaactatggttcctatatggaagaaaagcatatgcctcctcccaatatgactactaatgagcggcgagtcatcgtgcccgccgatctcccatatgaacctccccgtaggtccgcatggactggtcacggccaccccaccccccaatctaagggcactgtgctggcaccgatgaccctctcttttatgtcccaagctgtagacgactgctag

SEQ ID NO: 26932 - DNA, 1389 bp, synthetic construct
  misc_feature 1..1389: note = Description of Artificial Sequence: Synthetic coding sequence
  source 1..1389: mol_type = other DNA
atgatccagaccgtgcccgaccccgccgcccacatcaaggaggccttgagtgtggtgtcggaagatcagtccctgtttgagtgcgcctacggcaccccacacctggctaagacggaaatgaccgcctctagttcgagcgactatgggcagactagtaagatgtcaccaagagtgccacaacaggattggctgtctcagccgcccgctcgcgtcacaatcaagatggagtgtaacccctctcaagtcaatggctctcggaactcaccagacgagtgcagcgttgctaagggagggaagatggtggggtcccccgacactgtgggtatgaattacgggtcctatatggaagaaaaacacatgcccccaccaaacatgacgacgaatgaaaggagagtcatcgtccctgccgaccccaccctttggtccaccgatcacgtccgacaatggctcgaatgggcagtcaaagagtatgggttacccgatgtcaacattctgttgtttcagaacatcgacggcaaggagctgtgtaaaatgaccaaagatgattttcaaaggctgaccccctcctataatgctgatatcttactgagtcacctccactatcttagggagacacctctccctcatttgacatcagatgatgtagacaaggcactgcagaacagccctaggctgatgcacgccagaaacactgacttgccatacgaacccccccgccggtctgcctggaccggacatggccacccaacaccccagtccaaagcagcacagccatcacccagtacagtgcctaagactgaggaccagcggccccaattagatccgtaccagattctcggacccacttcgtctaggctggcgaatccaggttctggacaaatccagctctggcagtttctcctcgaactgctgagtgacagcagcaacagctcttgcattacctgggaggggacaaacggagaatttaaaatgactgaccctgatgaggtcgccagaaggtggggcgaaaggaagtctaagcccaatatgaattacgataagctatcccgggcactgaggtattactatgacaagaacattatgaccaaggtgcacgggaaacgatatgcctacaagttcgactttcacggtatcgctcaagccctgcaaccacaccctcctgagtcttcattgtacaaataccccagcgatctcccatatatgggcagctaccacgctcacccacaaaagatgaactttgtggcgcctcaccctccagctctccctgttactagttcaagcttctttgcagcccccaatccatactggaattcacctactggtggcatttaccccaatacccggctgccgacatcccatatgcccagtcacctcggcacctactactag

SEQ ID NO: 26933 - DNA, 1164 bp, synthetic construct
  misc_feature 1..1164: note = Description of Artificial Sequence: Synthetic coding sequence
  source 1..1164: mol_type = other DNA
atggtgggcagccccgacaccgtgggcatgaactacggcagctacatggaggaaaagcatatgccccctccaaatatgacaactaacgaaaggcgtgtgattgtaccagctgatccaaccctgtggtctaccgatcatgtccgccagtggttggagtgggcggtgaaggagtacggcttgccagatgttaacatcctgttgttccagaatatcgatggaaaagagttgtgcaaaatgactaaggatgatttccagcgactcacaccttcgtataacgcagatattctgcttagccatcttcactatctccgcgagactccgctgccacatctgacttcggacgatgtggacaaagcactgcaaaactcacctaggttgatgcacgcacgtaacaccggtggcgccgcctttatctttccaaacacaagcgtgtatcccgaagccacacagcgcatcacaacgcgacccgacctcccgtatgagccacctcgcagaagcgcctggacaggccatgggcaccccactcctcagtccaaagccgcacagccgagcccttctaccgtacccaaaactgaagatcagaggccccagctggatccctaccagattctgggcccaacaagctcccgattggctaacccaggaagcggacagatccaactgtggcagtttctcctcgaactgctatccgacagttctaatagctcttgtatcacttgggagggcacaaatggcgagtttaaaatgactgatcctgacgaggtggcccgtaggtggggggaaaggaaatccaagcctaatatgaactatgacaaactctcccgggcccttaggtactattacgacaagaacattatgaccaaagttcatggtaaacgatatgcatataagttcgattttcatggcatcgcgcaggcccttcagccccatcccccagaatccagtctttataagtatccttcggacctgccttacatgggaagctaccatgcacatcctcaaaaaatgaattttgtggcccctcacccacccgcccttcccgtgacttcttcctcattttttgcagctccaaatccatactggaactctccaacaggcgggatttatcctaacacgaggcttccaacaagccatatgccgtcgcatttaggtacgtactattag

SEQ ID NO: 26934 - DNA, 1410 bp, synthetic construct
  misc_feature 1..1410: note = Description of Artificial Sequence: Synthetic coding sequence
  source 1..1410: mol_type = other DNA
atgaacgacttcggcatcaagaacatggaccaggtggcccccgtggcaaactcatacagggggaccctcaaaagacagccggccttcgatacattcgatggtagtttatttgcagtgttcccttccctgaacgaggagcagacgttgcaggaggtgccaaccggactcgatagcatttcccatgattcagccaactgtgagctccctctattgactccctgctcaaaggccgtcatgtcccaggcgctcaaggctaccttcagtggattcaaaaaagagcagcgaagactcggaattcctaaaaacccttggctttggtcagagcaacaagtgtgccagtggttgctgtgggctacaaatgaatttagtctggtcaacgtgaacttacaaaggtttggcatgaacggtcaaatgctgtgtaatctgggcaaagagcgattcttagagctggctcccgattttgtcggagacatcctgtgggaacacctcgagcagatgatcaaggaaaaccaagagaaaaccgaagaccagtacgaagagaactcccacctaaccagcgttcctcattggatcaattctaacaccctcggctttgggactgagcaggctccctatggcatgcagacccaaaattaccccaaaggcgggttgctggattctatgtgtcccgctagcaccccttccgtacttagctccgaacaggagttccaaatgttccccaagagccgattatcctcagtgagcgtgacttactgtagtgtctcgcaggacttccccggatcaaatcttaacttgctgacaaacaattctgggacgcctaaagatcatgattctcctgaaaatggtgcggatagcttcgaatcctctgactctctcctacagagctggaactcccagtcatccttgctggatgtacaacgcgttcctagcttcgagtcgttcgaggacgattgtagccagagtctatgtttgaacaaaccaactatgtcatttaaagactatatacaagaaaggtccgaccccgtagaacagggcaaacctgtgatcccggccgctgtcttagcaggattcactggtagtgggcctatccagctgtggcagttccttctggagttactgagcgataagagctgccagagctttatatcctggacaggagacggctgggagtttaagctcgctgatcctgatgaagttgcacgaagatggggaaagcgtaaaaacaagccaaaaatgaattacgaaaagctgagcaggggcttgcgctactattacgataagaacatcatccacaagacctcgggcaagaggtacgtgtatcgttttgtgtgtgaccttcagaaccttctgggattcactcctgaggaactacacgctatactgggggtccagcctgataccgaggattag

SEQ ID NO: 26935 - DNA, 1410 bp, synthetic construct
  misc_feature 1..1410: note = Description of Artificial Sequence: Synthetic coding sequence
  source 1..1410: mol_type = other DNA
atgaacgacttcggcatcaagaacatggaccaggtggcccccgtggcaaatagctaccgaggtacgctgaagcggcagcccgcctttgacacttttgacgggtctctgttcgctgttttcccatcgctgaatgaggagcagacactgcaggaggtgcccacgggtctcgattctatttcccacgatagtgccaactgcgagttgcccttgctgaccccatgcagcaaggctgtcatgtcccaagccttgaaagccaccttttccggctttaagaaggagcagaggagactaggcattcctaaaaacccatggctctggagcgaacagcaggtgtgtcagtggctgctctgggctacgaatgagtttagtctagtgaatgtaaatctccagaggttcggcatgaacggacagatgttatgtaacctcgggaaggagagatttctcgaactcgcacctgacttcgttggagacatactgtgggagcaccttgaacagatgatcaaggaaaaccaagagaaaacggaggatcagtacgaagaaaattcccacctgaccagcgtgccacattggatcaatagtaacactctgggcttcgggacagagcaggccccttacgggatgcaaacccagaattatcccaaaggcggcctgttggatagcatgtgtcctgcatccacaccgagtgtcctgagttctgaacaggaattccagatgttccctaaatctagactgagctcagtttccgtcacatactgttcagtcagccaggacttccccggatccaatctcaatctgctgaccaataatagcggaactcctaaggaccatgactctcccgagaacggagcggactcttttgaatcctcggactcattgctgcagagctggaactcacaatcctctctcctggatgtgcagcgcgttccgagctttgagtccttcgaagatgactgttctcagtccctctgtctgaataagccgactatgagcttcaaagattatattcaggagcgttcagaccctgtagagcagggtaagcctgttattcctgccgctgtgcttgctgggttcaccggaagcggacctatccaactctggcagttcctgcttgagttgctgtcagataagtcctgccagtcctttatttcctggacgggcgacggatgggagtttaagctggcagatcctgatgaagtagccaggagatgggggaaacggaagaataagccgaagatgaactatgagaaactgagcagaggtctccggtactattacgacaagaatataatccacaaaacaagtggcaaacgatacgtttaccggtttgtgtgtgacctccagaacttactgggctttacacccgaggaattgcacgccattctgggagtgcagccagatactgaagactag

SEQ ID NO: 26936 - DNA, 507 bp, synthetic construct
  misc_feature 1..507: note = Description of Artificial Sequence: Synthetic coding sequence
  source 1..507: mol_type = other DNA
atgaacgacttcggcatcaagaacatggaccaggtggcccccgtggccaatagctatagaggcactctgaaaagacaacctgcgtttgatacttttgatggatcactgttcgccgtatttccatctttaaacgaagaacagacacttcaggaagtgcctaccggacttgactccatcagccatgactcagcaaattgcgagctgcctctgttgacaccttgcagtaaggctgtcatgtcccaagcactgaaagccacatttagtggctttaagaaagaacaacgccgcctgggcatacctaagaatccgtggctgtggagtgaacagcaagtgtgtcagtggttactgtgggcgaccaacgaattctccctcgtaaacgtgaacctgcagaggttcggtatgaacggacagatgctatgcaacctggggaaagagcggtttctggagctggcccccgactttgttggagacattctttgggagcacctggaacagatgatcaagtag

SEQ ID NO: 26937 - DNA, 813 bp, synthetic construct
  misc_feature 1..813: note = Description of Artificial Sequence: Synthetic coding sequence
  source 1..813: mol_type = other DNA
atgaacgacttcggcatcaagaacatggaccaggtggcccccgtggccaactcttacagaggaacgctgaagaggcagcccgcctttgataccttcgatgggtctttattcgccgtgtttcccagcttgaatgaagaacagactctgcaagaggtgcccaccggattggatagcatttcccacgattctgctaactgtgaactgcctctgctgactccctgctccaaggctgtgatgagtcaggcactgaaggctactttcagcggcttcaaaaaagagcagcggagactgggcatacccaagaatccctggctgtggtcagagcagcaagtgtgccagtggctcttgtgggccactaacgagtttagcctggtaaacgtcaacctgcagcggtttggaatgaatgggcaaatgttgtgtaatctcggcaaggagaggtttctggagctggcaccggacttcgttggtgacatattatgggagcatctcgaacagatgatcaaggagaaccaggaaaaaactgaggatcagtatgaagagaactcccaccttaccagcgtgccacattggattaattcaaacaccctgggctttggcacggaacaagcaccctatggaatgcagacgcagaactatcccaaaggcggattgctggattcaatgtgcccagcttcaacgcctagcgttctctcaagcgagcaggaattccaaatgttccccaagtcaagactgtcctctgtcagtgtgacttactgtagcgtctctcaggacttccctgggtcaaacctcaatttgcttaccaataattcatag

SEQ ID NO: 26938 - DNA, 570 bp, synthetic construct
  misc_feature 1..570: note = Description of Artificial Sequence: Synthetic coding sequence
  source 1..570: mol_type = other DNA
atgaccgagtacaagctggtggtggtgggcgccggcggcgtgggcaagagtgccctgacaattcagctgattcagaaccacttcgtagatgagtatgatccgactatcgaagactcctatcgcaaacaagtggtgatcgacggagagacatgtttgttggacatacttgacacagcaggccaggaggaatacagcgccatgcgcgatcagtacatgagaacaggcgaggggttcctgtgtgtattcgcaatcaataatacaaagagcttcgaagacatccaccagtatcgagaacagataaaacgcgtgaaagacagtgatgacgtaccaatggtgctggtggggaataagtgcgacctggcagcacggactgtggaatcgcggcaggctcaggacttggcccgatcgtatggaatcccctacatcgagacatctgccaagactagacagggtgtcgaagacgcattctacacactcgtaagggagattcgccagcacaagttacgaaagttgaacccgcctgacgagtcaggccctggctgtatgagctgcaaatgtgtgctgagctag

SEQ ID NO: 26939 - DNA, 513 bp, synthetic construct
  misc_feature 1..513: note = Description of Artificial Sequence: Synthetic coding sequence
  source 1..513: mol_type = other DNA
atgaccgagtacaagctggtggtggtgggcgccggcggcgtgggcaagtctgccctgaccattcagctcatacagaatcacttcgtggacgaatacgaccccacaattgaagattcttaccgcaagcaggttgtaatcgacggagaaacctgtctgctagatatactcgacaccgccgggcaagaggaatactctgccatgcgagatcagtacatgagaaccggtgagggttttctgtgcgtctttgctatcaataacactaaaagctttgaagatatacaccaatatagggagcagattaagcgtgttaaggacagtgacgatgtgccaatggtgctggttggcaacaaatgcgacctggctgccaggaccgttgagtcaaggcaggcccaggaccttgcccgtagctacggcattccatacatcgagacttccgccaaaacaaggcaggggtcacgctccggctctagcagctcatcggggacgctctgggatcctcccggccccatgtag

SEQ ID NO: 26940 - DNA, 570 bp, synthetic construct
  misc_feature 1..570: note = Description of Artificial Sequence: Synthetic coding sequence
  source 1..570: mol_type = other DNA
atgaccgagtacaagctggtggtggtgggcgccggcggcgtgggcaagtctgcactaacgatccagctgattcagaatcactttgttgatgagtacgaccccactatcgaggatagctacagaaaacaggtggtgattgatggcgaaacctgcctgttagatatcttagacaccgccgggcaagaggagtattccgctatgagggaccagtacatgcgaacgggagaggggttcctttgcgtatttgccattaataataccaagtcatttgaagatatacaccagtaccgggagcagattaagagagtaaaggacagcgatgacgtgcccatggtcctcgtggggaacaagtgcgatctggctgcccgtacggtggagtcgagacaggcgcaagatctggccagaagttacggaatcccttatatagaaacaagtgctaagacccgacaaggggtcgaggacgctttttatacccttgtgcgggagatccgccaacacaagttaagaaagctcaaccctcctgacgagagtggaccaggctgtatgtcatgcaagtgcgtgttgagctag

SEQ ID NO: 26941 - DNA, 513 bp, synthetic construct
  misc_feature 1..513: note = Description of Artificial Sequence: Synthetic coding sequence
  source 1..513: mol_type = other DNA
atgaccgagtacaagctggtggtggtgggcgccggcggcgtgggcaaatctgccctaaccattcagctaatccagaatcattttgtggacgaatacgatcctaccattgaggactcatacaggaaacaggtcgttattgacggggagacttgtttgctggatatcttagacactgccggtcaagaagagtacagtgctatgcgcgatcaatatatgcggactggagaaggctttctgtgcgtgtttgcaattaacaataccaaaagctttgaagatattcaccaataccgggagcagattaagcgcgtaaaagatagcgacgacgtcccgatggtcttagtggggaataaatgtgatctggccgcccgaacggtcgagagccgacaggcacaggacctcgctcggtcatatggcatcccttacatcgagacatcagccaaaacacgtcaggggtccaggagtgggtcctcttcatcctcggggactctgtgggatcctcccgggcctatgtag

SEQ ID NO: 26942 - DNA, 570 bp, synthetic construct
  misc_feature 1..570: note = Description of Artificial Sequence: Synthetic coding sequence
  source 1..570: mol_type = other DNA
atgaccgagtacaagctggtggtggtgggcgccggcggcgtgggcaaatcagcactaacaatccaattaatacagaatcacttcgtcgatgagtatgaccctaccattgaggacagctacaggaagcaggtcgtgattgacggggagacctgtctgttggatattttagacactgccgggcaggaggagtacagcgcgatgagggatcagtacatgcgcactggcgagggtttcctttgcgtgtttgccatcaacaacactaagtcctttgaggatatccatcagtacagggagcaaataaagagagttaaggactctgatgatgtgcccatggtccttgtcggcaacaaatgcgacttagcagctagaaccgtcgaaagccggcaggcacaggatctggcccgcagctacggaataccttatattgagacatctgccaagactcgacagggggtggaagatgctttctatactctggtgcgggagatccgacaacacaagcttagaaaactgaacccacctgatgagagcggaccaggatgcatgtcatgtaaatgcgttctgagttag

SEQ ID NO: 26943 - DNA, 513 bp, synthetic construct
  misc_feature 1..513: note = Description of Artificial Sequence: Synthetic coding sequence
  source 1..513: mol_type = other DNA
atgaccgagtacaagctggtggtggtgggcgccggcggcgtgggcaaatctgctctcaccattcagctgatccaaaaccattttgtcgacgagtatgatcctaccatcgaagactcttaccgaaaacaggtggtgatcgatggcgaaacatgtctgttggacatcctggacaccgccggccaggaagagtatagtgccatgagagaccagtatatgaggactggcgaaggcttcctgtgtgtgtttgccattaataacacaaaatcgtttgaagatattcatcagtatagagagcagattaaacgcgtgaaggatagtgatgatgtgccaatggtgctggtcggcaacaagtgtgacctggccgccagaacagtggagtctcggcaggcccaagatttggctcgatcttatggtatcccctatatagagacaagcgctaaaaccagacagggtagtagatccggatcatcctctagttccgggacactttgggacccgcccggccctatgtag

SEQ ID NO: 26944 - DNA, 609 bp, synthetic construct
  misc_feature 1..609: note = Description of Artificial Sequence: Synthetic coding sequence
  source 1..609: mol_type = other DNA
atgctgccccccggcaccgccaccctgctgaccctgctgctggccgccgggtctctgggtcagaagcctcaaaggccccgacgccctgcctccccaatcagcaccatacagcctaaagcgaacttcgacgcacagcaatttgccggcacctggcttctagtggctgtgggctcagcatgccggttcctgcaagaacaaggtcatagggcggaagccacaactttgcatgtggccccccagggcaccgcgatggccgtgagcaccttccggaaacttgatggcatctgttggcaagttcgtcagctgtatggcgataccggcgttttgggacgctttttactgcaggccagggacgcaagaggcgcggtccacgtcgtggtggctgagacagattatcagtctttcgctgtcctttacctcgaaagagcggggcagctgagcgtgaagctgtatgccagaagtctccccgtcagcgactcagtgttaagtggctttgaacaaagagtgcaagaagcacacctaaccgaggaccaaatcttctactttccgaagtacggattctgtgaggcagccgaccagttccatgtattggacgaggtgaggagatag

SEQ ID NO: 26945 - DNA, 522 bp, synthetic construct
  misc_feature 1..522: note = Description of Artificial Sequence: Synthetic coding sequence
  source 1..522: mol_type = other DNA
ggcttcctggtgcccctgtggctgatgcggaactgcttccggctgcaagaggagatgcttcagagggaggaggctgagaacacactccagtcttttcgccaggacgtggacaacgctagtttagcgagactcgatctcgaacggaaggtggagtccctccaagaagagattgcattcctgaagaagcttcacgaggaggagatccaagaactgcaagcacagatccaggagcagcacgtccagattgacgttgatgtctcaaagcccgacctgacagctgcactccgggatgtcaggcagcagtacgaaagtgtcgcagcgaagaatctgcaggaagcagaagaatggtataaaagcaagttcgcggatctctccgaagccgctaaccggaacaatgatgcattgagacaggcaaaacaggagtctactgagtaccgcaggcaggtgcagtccctcacatgtgaggtcgatgccctgaagggcactgtcagtaccaatccggctgttaaagagggcaagtag

SEQ ID NO: 26946 - DNA, 687 bp, synthetic construct
  misc_feature 1..687: note = Description of Artificial Sequence: Synthetic coding sequence
  source 1..687: mol_type = other DNA
atgcggaactgcttccggctgcaggaggagatgctgcagcgggaggaagctgaaaataccctccaatcgtttagacaggacgttgataatgctagtttggcgagattggacctagagagaaaagtcgagtcactgcaggaggagatcgcttttctgaagaaacttcacgaggaggagattcaggagctgcaggcgcaaatccaggagcaacatgtgcagatcgatgtggacgtttcaaagccagacctcactgccgcactgagagatgtccggcagcaatacgagtcagttgcagccaagaatctgcaggaggccgaggaatggtataaaagtaaatttgccgacctgagcgaagccgcaaaccggaataacgatgcgctgaggcaggctaaacaggagtccaccgaatacagacggcaggtgcaatctcttacgtgtgaggtggatgctctgaaagggacaaacgagtcgttggaacgccagatgagagagatggaggaaaatttcgccgtggaagctgcgaactatcaagacactatcggacggctccaggatgagatccaaaacatgaaggaggaaatggcacgccatctgcgagagtaccaggacctcttaaatgtcaaaatggccctggatattgagattgccacctaccggaaactgctcgagggggaggaatcacgatag

SEQ ID NO: 26947 - DNA, 1296 bp, synthetic construct
  misc_feature 1..1296: note = Description of Artificial Sequence: Synthetic coding sequence
  source 1..1296: mol_type = other DNA
atgagcacccggagcgtgagcagcagcagctaccggcggatgttcggtggccctggaaccgccagccgcccttcctcaagccgaagctacgtcactacatccactcgtacttactcactcggctcagctctgcggcctagcacgtcacgtagtctgtatgcctcatcccctggaggcgtctatgctacaaggagcagcgctgttcggctgagatcatctgtgcccggagtgcggcttttgcaggactccgttgactttagcttggcagacgctatcaacaccgagtttaagaacacccggacaaacgagaaagtggaactacaggagctgaacgatcggttcgccaattatattgataaagtccggttcctcgaacaacagaacaagattcttctggcagaactcgagcagctgaaaggccagggcaaaagtaggctgggagatctgtatgaagaagaaatgcgggaacttcgtaggcaagttgaccagctcaccaatgataaggctcgagtcgaagtcgaacgggacaatctcgccgaggacattatgagactccgtgagaaactccaagaagaaatgctccagagagaggaggctgagaacaccctgcaatcatttcggcaggatgttgataatgcttccctcgcccggctagatttagaaaggaaagtggagtcactgcaggaggaaatagccttcctgaagaagttgcacgaagaagaaattcaggaactccaggcccagatccaggaacagcacgtgcaaattgatgtggacgtctcaaagcctgatttaaccgctgctctacgcgatgtaagacaacaatacgaatccgtagcagcaaagaatctccaggaagcagaagagtggtacaaaagtaaatttgccgacctctcggaggccgctaacagaaataacgacgcactccggcaggcaaagcaggaatcaactgagtaccggaggcaggttcagagtctgacctgtgaggtagacgccctcaagggcactaacgaatctctggaaaggcagatgcgagaaatggaggagaatttcgcggtggaggccgctaattatcaggataccattgggcgcctgcaggacgagatccagaatatgaaagaggagatggcacggcaccttcgagaatatcaggatttgcttaacgtaaaaatggctctcgacatcgaaattgccacatacagaaagctgctcgaaggtgaagagtcccgaatttctctgcccctgccgaattttagctctctcaaccttcgagggaaacactttatcagcctttag

SEQ ID NO: 26948 - DNA, 1401 bp, synthetic construct
  misc_feature 1..1401: note = Description of Artificial Sequence: Synthetic coding sequence
  source 1..1401: mol_type = other DNA
atgagcacccggagcgtgagcagcagcagctaccggcggatgttcggcggtcccggcactgcaagcaggccaagcagtagcaggagttatgttaccacgtctacacggacatatagtctgggctctgctctgcggccctcaacttcccggtcactgtatgcgtctagccccgggggggtttatgcaacccgttcatccgccgtgaggctccgaagtagcgtaccaggcgttcggctgttacaggactcagttgatttctctctcgccgacgcgataaacactgagtttaaaaacacaaggactaatgaaaaggtagaactgcaagagctaaacgataggttcgccaactatatcgacaaagtgcgcttcctagagcagcagaacaagattcttctggcggaacttgagcaactaaaaggtcagggaaaatccagactgggagacttgtacgaagaggagatgagagagctgcgtcggcaggtggatcaactcactaatgataaggcaagagtcgaggtggaaagggataaccttgcagaggatataatgagactgcgcgagaagctacaagaagagatgctgcagcgcgaggaagctgaaaacacactccagtctttccgacaagacgtcgacaacgctagcctggcccgtctggacctagagcggaaggtcgagtcactgcaggaggaaattgctttcctgaaaaaactgcatgaagaggagatccaggaactgcaagctcagatccaggagcagcatgtgcaaatcgacgtggacgtttcaaagccagacttaacagccgccctccgcgatgtacggcagcagtacgagtctgtcgccgccaagaatcttcaggaagccgaagagtggtataaatcaaagtttgcagacctgagtgaggcagccaaccgcaataatgacgctctccgacaggctaagcaggaaagcaccgagtatcgcaggcaggttcagtccttgacctgtgaagtcgacgcgctcaaaggcacgaacgagagcctcgagaggcaaatgcgggagatggaagaaaactttgctgtcgaagcagccaactaccaggacaccatcggaaggctgcaagacgagatccagaatatgaaagaagagatggcgagacatttacgagaataccaggatttgctgaatgtcaagatggccttggacatcgagatcgcgacctaccgtaaactgttggagggcgaggagtcacggatttctctgcctctgcctaacttcagctccctgaacctaagagagactaatctggactccctccccctggtggacacccactccaagcggacactattgatcaagactgtagagaccagggacggacaggtaattaatgagacgtcacagcaccacgacgatctagaatag

SEQ ID NO: 26949 - DNA, 1224 bp, synthetic construct
  misc_feature 1..1224: note = Description of Artificial Sequence: Synthetic coding sequence
  source 1..1224: mol_type = other DNA
atgttcggcggccccggcaccgccagccggcccagcagcagccggtcctatgtgacaacctccacacgtacctacagccttgggtccgccctacgcccgtcaacctctcgaagtctgtatgccagcagccccggcggcgtgtacgccacacgatcatccgccgtaagacttcgctcgagcgtgccaggagttcgcctgctgcaggattccgtcgacttttcattggccgatgctatcaatacggaattcaagaatactcgcacaaacgagaaagttgaactgcaagaactcaacgatcgtttcgctaactacatcgataaagttcgattcctcgagcagcagaataagattctgctggctgaattagaacaattgaagggacagggcaagtcccgactgggagacctctacgaagaggagatgcgggagctgaggaggcaggttgaccagctcacaaacgacaaggcacgcgtcgaggtggagcgcgataatctggccgaagacattatgcgtctgcgggagaagctccaagaagagatgttgcagagagaggaggccgaaaacacactccaaagtttccgacaggacgtcgataacgcatccctagcccgtcttgatctggagcgcaaggtggagagcctgcaggaggagatagccttcttgaagaagctgcatgaggaggaaatacaggaactgcaggcgcagattcaggagcagcacgtgcagatcgatgttgatgtgtcgaagccagatttgacagccgccctgcgggacgttagacaacagtacgaatccgtcgccgctaagaatcttcaggaagccgaagagtggtataaatccaaatttgctgacttgagcgaagccgctaacagaaataacgacgccctgcgacaggcaaagcaggagagcaccgagtacaggcgacaggttcagtccctgacttgtgaagtagatgccttgaaaggaacgaatgaatccctagagcggcagatgagggaaatggaggaaaatttcgcagtggaagcagccaactaccaggatactattggtcgactgcaagatgagatccagaatatgaaagaggagatggctaggcacctaagggagtaccaggatctattaaacgtgaagatggcgctggatatcgaaatcgcaacatatcgcaaactgctggaaggagaggaatctcgaatcttgtgcctctttcagactttccccccctag

SEQ ID NO: 26950 - DNA, 2256 bp, synthetic construct
  misc_feature 1..2256: note = Description of Artificial Sequence: Synthetic coding sequence
  source 1..2256: mol_type = other DNA
atggaggacctgagcagccccgacagcaccctgctgcagggcggccacaacctgttgtcctctgcaagctttcaagaggctgtgacttttaaggatgtgatcgtcgattttacacaagaagagtggaaacagctagaccctgggcaacgagacctgttccgggacgtcactcttgaaaattatacccacctcgtgagcattgggctccaggtcagcaaacctgatgtcatttctcaactcgagcagggaactgagccctggattatggaaccatccattcctgtcggaacatgtgcagactgggaaacacgcctcgaaaacagcgtgtctgcacccgaacctgatatcagcgaagaagagctctctccggaagtgatcgtggagaagcacaaaagagatgattcatggtcctctaacttgctggagtcatgggagtacgaggggtctttggagcggcagcaggcaaaccagcagactctgcccaaagaaattaaagttacagagaagacaatccccagctgggagaaggggcccgtaaacaacgagttcggcaagtccgtgaatgtctcctcgaacttagtcactcaggagccgagcccagaggagacatcaaccaagcgtagtatcaaacagaattccaacccagtgaaaaaggaaaaaagctgcaaatgcaacgaatgcggtaaggcattcagctactgtagcgccctgattagacatcagaggactcatacaggagaaaagccttataaatgtaatgagtgtgagaaggctttttcgcgctccgaaaatctgatcaaccaccaacggattcacactggtgacaaaccttataagtgcgaccagtgtggcaaaggctttatcgaaggtccctccctgacccagcatcagcgcatacatacgggagagaagccctataagtgcgatgagtgcgggaaagctttctcgcagcggacgcacctggtacagcaccagagaatccacacgggcgagaagccatacacttgcaatgaatgtggaaaggcattctcccagcggggacacttcatggagcatcaaaaaatccacacaggtgaaaagccattcaagtgtgacgaatgcgacaaaacttttacccgaagcactcacctgacacagcaccagaaaatccatacgggcgagaaaacatataagtgtaacgaatgcggaaaggctttcaacggcccctccaccttcattagacaccatatgattcatactggagaaaagccctacgagtgcaacgagtgcggcaaagctttcagtcaacatagcaatctcacacaacatcagaagacccacaccggggagaagccttacgattgcgcagagtgtggcaagagcttctcctactggtcgtccctagcccaacacctcaagattcacacgggtgagaagccatataaatgcaacgagtgcggcaaagcatttagttactgcagctccttgacgcagcaccggagaattcatactagagaaaaacctttcgagtgttccgaatgcggaaaggcgtttagttatctgtctaatctcaaccagcatcaaaagacccatacccaggaaaaggcttacgagtgcaaggagtgtggcaaggcctttatcaggtcaagctccttggccaagcacgaacggattcacacaggcgaaaagccctatcagtgccacgaatgtggcaagaccttttcttatggctctagcctgatccagcatcggaaaattcatacaggcgaaaggccgtataaatgcaacgagtgtggaagggcattcaaccagaacatccatctcacccagcataaacggatccatactggcgctaagccgtacgagtgtgccgagtgcgggaaggctttccgccactgcagctccctagcgcagcatcaaaagactcacacagaggaaaaaccttaccaatgcaataagtgtgagaagaccttctcccagtcctctcacctgacccagcaccagcgtattcatacgggggagaaaccgtacaagtgtaatgagtgcgacaaggcattttcaaggtccactcacttgacagagcaccagaacactcataccggcgaaaaaccctataactgcaacgagtgcagaaagactttttctcagtccacttacctgatacagcaccagaggattcatagcggggagaagcctttcggatgtaacgactgcgggaaaagctttaggtaccgctccgccctgaacaagcaccagcggctgcaccctgggatttag

SEQ ID NO: 26951 - DNA, 3201 bp, synthetic construct
  misc_feature 1..3201: note = Description of Artificial Sequence: Synthetic coding sequence
  source 1..3201: mol_type = other DNA
atgcccgtgttccacacccggaccatcgagagcatcctggagcccgtcgcacaacagatctcgcatttggttattatgcatgaggagggtgaggttgatgggaaggcaatacccgatcttactgccccagttgctgcagtgcaggctgctgtatccaatctggtaagagttggaaaggaaaccgtccagactacagaggaccaaatcctgaagagggacatgccccctgcattcattaaggtggagaatgcttgtacaaagctagtacaggcagcccagatgcttcagtctgatccgtattctgtaccagcaagggactacctgatagatggcagtaggggtatcctgtcaggcacttctgacttgctgctgaccttcgacgaggctgaagtgcggaaaatcatcagagtgtgtaagggtatcctcgagtaccttaccgtcgctgaggtcgtcgagacaatggaggatcttgtcacgtacactaagaacttgggtccgggcatgacaaaaatggccaaaatgatcgacgagcgacagcaggaattaactcaccaggagcacagggtgatgctggttaacagtatgaataccgttaaagagctcctgcctgtactgataagtgccatgaagattttcgtaactaccaagaacagcaagaaccagggaatcgaggaggcgttaaaaaatcgaaacttcacagtggaaaagatgtctgccgaaatcaatgagattatccgggtgctgcaactgacttcttgggatgaggacgcatgggcctctaaagatactgaagccatgaagagggcgctggctagcattgattcaaagctgaatcaagccaaggggtggctccgagatccttccgcctcacccggggatgccggagagcaggcaatccgacaaatcctagacgaagccggcaaggtgggcgagctgtgcgctggaaaggagaggcgggagatactggggacttgtaagatgctgggtcagatgactgatcaggttgcagatttacgcgcacgaggtcagggcagcagcccagttgcaatgcagaaggctcagcaggtctctcagggcctggatgtgctgaccgccaaagtcgaaaacgctgcacggaaactcgaagccatgactaatagtaagcagagcattgcaaaaaagatagacgctgctcagaactggcttgcagaccccaacgggggtcctgaaggagaggagcaaatacggggtgcgctggcagaggcccgtaaaatcgcagagctctgcgatgaccccaaagagcgtgatgacatcctgcgttccttaggagaaatcagcgctcttaccagcaagctagccgatctgcggagacaggggaagggggatagccctgaggccagggcattagccaagcaagtagcaacagctctgcagaatttgcagaccaaaactaatagggctgtggccaacagcaggcctgctaaggccgctgtccatctagaaggaaagattgaacaggcccaacggtggattgataatcctactgtggacgacagaggtgttgggcaggccgcaattcggggcctggtggccgagggccaccgcctggcgaacgtgatgatgggcccataccgtcaggatcttctggccaagtgtgatcgggtggatcagctcactgcacaactcgctgatttggcagctcggggcgagggagaaagcccccaggctcgcgctttggcctcacagctgcaggactctctcaaggatttgaaggcacgcatgcaggaggctatgacacaagaagtgtctgatgtgttctcagatacaacaacacctatcaagctcctggcagtggctgcgactgcccccccagacgctcccaaccgcgaagaggtgttcgacgagcgcgccgccaattttgagaaccactctgggaagctcggggctactgctgaaaaagcagcagccgtaggcacagcaaacaaaagcacggttgaaggaattcaggcttctgtgaagaccgccagggagctgacaccacaagtggtttcagcagcacggattctgctccgaaatcctggtaaccaggccgcgtacgagcattttgaaacaatgaaaaatcaatggattgacaacgtagaaaagatgactggtctggtggacgaggccattgacacaaaatcccttctagacgcgagcgaggaggctataaagaaagacctcgacaaatgtaaggtggctatggctaatattcagcctcagatgctggtcgctggggctacctctatcgcccggagggccaataggattctcttggtcgctaagagagaggtggaaaacagcgaagacccaaaatttagggaagccgtaaaagccgccagtgacgaattaagcaaaacaatttccccaatggttatggatgccaaggcagttgccggcaacatttctgatcctggattgcaaaaatccttccttgacagcggctaccgcattttaggagctgtggccaaggtgcgagaagcatttcagcctcaagaaccagactttccacccccaccaccagatctcgaacagctgaggctgacagatgagctggctccgcccaagcctcccctgcctgaaggagaggtccctccaccacgacctcctccacctgaagaaaaggatgaggaattccccgaacagaaggccggggaggtaattaaccagcccatgatgatggcagccaggcaactgcatgacgaggctcgcaaatggagctcaaaaggaaacgacatcatcgctgcggctaagcggatggccctgcttatggcggaaatgagtcgcctcgtcagaggtggtagcggcactaaaagagccctgattcagtgcgcgaaggacatcgcaaaagccagtgacgaggtcacaagattggccaaagaggtggcaaagcaatgtaccgacaagcgcattcgcaccaatttgttacaggtctgcgaacgcatcccgaccatttccactcagctcaaaattctctctacggttaaggccacaatgttgggtaggacgaacatatcagacgaggagtccgagcaagccacggagatgctggtccacaatgcgcagaacctgatgcagtccgtgaaagaaactgtgagagaagcagaggctgcgagcataaagatacggaccgacgcaggctttacactccggtgggtccgcaagacaccttggtatcagtag

SEQ ID NO: 26952 - DNA, 2784 bp, synthetic construct
  misc_feature 1..2784: note = Description of Artificial Sequence: Synthetic coding sequence
  source 1..2784: mol_type = other DNA
atgctgcagagcgacccctacagcgtgcccgcccgggactacctgattgacggtagcagaggcattctgtccggtacctcggatctgcttctaacttttgacgaagccgaagttcgcaaaataattagagtatgcaagggtatcttagaatacctgacagtggcggaagtggtcgagacaatggaggaccttgtcacttataccaagaatttgggaccgggaatgacaaagatggcaaagatgatagacgaacgacagcaggaactgacccaccaagagcacagagtcatgctcgtgaactccatgaataccgtgaaggagctgttgccagtactgattagcgctatgaaaatcttcgtaaccactaagaattctaagaatcaaggcatcgaagaagccctgaagaatcgaaacttcacggtggaaaagatgtcagccgagatcaatgagatcatccgcgtgctgcagttgacatcatgggacgaggatgcgtgggcatccaaagatacagaagcaatgaaacgggcccttgcctctatagactccaagctaaaccaggctaaaggctggttgcgcgatccatcagccagccctggggacgccggggagcaggccatcagacagatactcgatgaagccggtaaagtgggggaactatgcgccggaaaggaacgcagagagattttagggacctgcaaaatgctggggcagatgacagatcaggtcgcggacctgcgcgcgcgcggccagggatcgagtccagtcgcaatgcaaaaggcgcagcaagtgtctcagggcttagatgttctaaccgccaaagtggagaacgcggccagaaaactggaagctatgaccaacagtaaacagtcaatagctaaaaagattgacgccgcccagaactggctagcagatcccaatggaggacctgaaggcgaggaacaaatcagaggggcattggccgaggcacgaaagatagcggaactgtgtgacgaccccaaagagcgcgatgatattctgagatcactgggcgaaatttctgcccttacaagcaagctcgctgatctccggcgccagggtaaaggagactcgcccgaggccagggctctcgcaaagcaggtggccacagctttgcaaaatctccagaccaaaacaaaccgggccgttgctaattctcggcccgcaaaggccgctgtacacttagaaggaaaaattgagcaggcccagcggtggatcgataacccgacagtggacgacagaggtgtgggtcaagccgccattcggggattggtagctgaaggccatcggctggccaatgttatgatgggcccctataggcaggacctgctagcaaaatgtgatagagtggaccagcttaccgcccagttagcagacctcgccgctagaggcgagggtgaaagccctcaggcccgtgctttggcaagccagctgcaggactccttaaaggatctgaaggcaagaatgcaggaggccatgacccaggaggtttccgatgttttttctgatacgacaacccctattaaactcctcgcggtagctgcaactgccccaccggacgcacctaatcgtgaagaggtgtttgacgaaagagctgcaaatttcgaaaaccattccggcaagctgggtgccaccgcggagaaggctgccgccgtgggtacggccaacaagtcaactgtcgaaggcattcaggcctccgtgaaaactgccagggaactgacaccacaggttgtgagcgcagctcggatcctgctgcggaaccccggaaatcaggccgcatatgagcacttcgagacaatgaagaaccaatggatcgacaatgtggagaaaatgaccggattggtagacgaggctattgatacaaagtcattattagacgcttcagaggaagcaatcaaaaaagacctggataaatgtaaagtggccatggccaacattcaaccacagatgctggtggccggcgcgaccagcatcgctcggagagctaacagaatccttcttgtggccaagagagaagtcgagaattccgaagaccctaaattccgcgaggctgtaaaggcagcaagcgatgagctgtcgaagaccatctccccaatggtgatggatgccaaggctgtcgccggaaacatcagcgaccccgggctgcagaagtcatttctcgatagtggatacagaattctcggagccgtggcaaaggttcgagaggccttccagccccaggaacccgactttccgccgcccccccctgatctcgaacagctgcgtctcaccgatgagttagccccccctaaaccccccctgccagaaggggaagtgccaccgccacgtccccccccacccgaagagaaggatgaagagttcccagaacaaaaggccggcgaagtgataaatcaacccatgatgatggcagcaagacagctccacgacgaggccagaaaatggtctagtaagcctggcattcctgcagctgaagtgggcataggagtagtagccgaagcggatgcagcagacgccgctggatttccagtgccgcccgatatggaagacgactatgagccggagcttctgctgatgccttcaaatcagcctgtcaaccagccaattctggcagctgcgcagagcttgcacagagaggcaactaaatggagcagtaagggaaacgacattatcgccgcagctaagcgcatggcactgctgatggcggaaatgtcaaggctggtgaggggcggaagcgtgccaagaacatcacctagaccccagatgagatag

SEQ ID NO: 26953 - DNA, 984 bp, synthetic construct
  misc_feature 1..984: note = Description of Artificial Sequence: Synthetic coding sequence
  source 1..984: mol_type = other DNA
atgcccgtgttccacacccggaccatcgagagcatcctggagcccgtggcccagcagattagccacctagtgatcatgcatgaagaaggcgaagtcgacggcaaggccatacctgatttgacagctccagttgcggccgtgcaggctgccgtatcaaatctcgttcgggttgggaaggaaacggtccagacgacggaggatcagatcttgaagcgggatatgccccctgcctttatcaaagtcgaaaatgcttgcacaaagttggtacaagctgctcaaatgcttcaatctgatccctatagtgtgcctgcccgcgactacttaatcgatgggagcaggggaattctctctggaacctccgatctcctgctgacttttgatgaagccgaagtgccacccccccgccccccgcctcctgaagaaaaagatgaggaattccctgaacagaaggcaggagaagttatcaaccagcccatgatgatggccgcccgacagttgcatgatgaagccaggaagtggagttctaaaggcaatgacatcatcgccgccgccaagaggatggctttgcttatggctgagatgagtcggctggtcagaggcgggagcgggaccaaacgggccctgatccagtgcgcaaaggacattgccaaggcttcagacgaagtcacccgcttggccaaagaggtggcaaagcagtgtactgacaaaaggataaggaccaacctgcttcaggtttgtgagcgtataccaactatctcgacacaacttaaaattctctctaccgtcaaagcgaccatgctgggaagaacaaatatctccgatgaggagtccgaacaggccacggagatgctggtgcataatgctcagaatctcatgcaatcagtgaaagagacagtgagagaggcagaggccgccagcatcaaaatcaggactgacgcaggcttcaccttgcgctgggtgagaaaaactccctggtatcagtag

SEQ ID NO: 26954 - DNA, 2421 bp, synthetic construct
  misc_feature 1..2421: note = Description of Artificial Sequence: Synthetic coding sequence
  source 1..2421: mol_type = other DNA
ggccagatgaccgaccaggtggccgacctgcgggcccggggccaggggtcttcccctgtcgcgatgcagaaggcacagcaggtgagtcagggccttgatgttttgacggccaaggttgaaaacgccgctcgcaaattagaagcaatgaccaatagtaagcagtcgatcgccaagaaaattgatgctgcccaaaattggctggctgaccccaacggtggaccggagggcgaggagcagatcaggggagccctggccgaagcacgcaaaatcgcagagctttgcgacgaccctaaggagcgcgacgatatacttcgatctcttggcgaaatttcagcccttacatctaagctggccgaccttcgcagacagggtaagggggactcacccgaggctcgcgcattggctaaacaagtcgctaccgctctccagaacctgcagacaaaaactaatagagctgtcgcgaacagcagaccggctaaagcagccgttcacctcgaggggaagattgagcaggcccagcggtggattgataaccctacagtggatgacaggggtgttgggcaggcagctattcgcggattggtagccgaggggcaccgcctcgcgaatgtgatgatgggaccctatagacaggatctgctggccaaatgcgaccgtgtggatcagctgaccgcacagctcgccgatctggcagccagaggtgagggtgagtcaccccaagccagagcactggctagccagttgcaggattccctgaaagacttgaaagcccggatgcaggaggccatgacccaggaggtgtcggacgtgttttccgacactacaacacccatcaagttactggcggtggctgctactgcacctccagatgcaccaaatcgggaggaagtgtttgatgaacgagccgcgaactttgaaaatcatagcggcaagctcggagctacagctgaaaaagcagcagccgtggggaccgctaacaagtccacagtcgagggcatacaggcatctgttaagacagctcgcgagctcaccccccaggtagtctccgcagccagaatcctgttaagaaatccgggtaatcaggctgcatacgagcattttgaaactatgaagaaccaatggattgataacgtcgagaagatgaccggtctggtcgatgaagctatcgacactaagtccctcttagacgcctccgaggaggcgattaaaaaggacctagataagtgcaaggttgctatggctaacatccaaccgcagatgctggtggctggggcgacctctatcgctagaagagcaaataggatcctgttagtggccaaaagagaggttgaaaattcagaggatcccaagttccgtgaagcagttaaggccgcgtctgacgagctatccaaaacgatttcccccatggtgatggacgcaaaagccgtagcaggcaatatctcagatcccggcttacagaagtcattcctcgacagcggttatcggattttaggcgccgtcgccaaagtaagggaggcattccagccccaagaacccgatttcccaccgccccccccagaccttgaacagctccgccttaccgacgaattggcccccccaaagccccccctgccagaaggcgaagtgcccccgccacgtccgcctcctcccgaagagaaagacgaggagtttcccgaacagaaggccggggaagttatcaatcaacctatgatgatggctgcccgacagctgcacgatgaagcccggaagtggtcctctaagcctggaataccagccgccgaggtgggaatcggagtggtggccgaggcggacgcggcagatgccgccgggtttcccgttcctcctgatatggaagacgactatgagcctgagctcctcctcatgcctagtaaccagcccgtcaaccaacctattctcgcggcagcacagagtctgcatcgcgaagccaccaagtggtcttcaaaaggcaatgatatcatcgccgcggccaaacgcatggcgcttctcatggcagagatgtcccgactagtcagaggcggatctggcacaaaacgggcgttaattcagtgcgcaaaggacatagccaaggcctcggatgaggtgacgaggcttgctaaagaagtagccaagcagtgcaccgacaagcggattaggacaaatttgctgcaggtgtgcgaaagaattcctaccattagcacccaactgaagatcctatcaacagtcaaagctaccatgctcgggcgcacgaatatctccgacgaggagagcgaacaggctactgagatgttggtgcataacgcccagaacctaatgcagagtgttaaagagaccgtcagggaagcagaagcagcgtctatcaaaattcggaccgatgcagggttcactcttcgctgggtccggaagacaccctggtatcagtag

SEQ ID NO: 26955 - DNA, 3021 bp, synthetic construct
  misc_feature 1..3021: note = Description of Artificial Sequence: Synthetic coding sequence
  source 1..3021: mol_type = other DNA
atgccccccgccttcatcaaggtggagaacgcctgcaccaagctggttcaggccgcccagatgttgcagagcgatccatattctgtacccgcaagagattatctcattgacggctcaaggggtatcctcagcgggacatctgatttattgcttaccttcgacgaggccgaggtgcgaaagattattagagtctgtaagggcatcctggagtacctgaccgtggcggaagtagttgaaaccatggaagacttggtgacctataccaaaaatttgggacccggtatgacaaagatggctaaaatgattgatgaacggcagcaagaacttacacaccaggaacaccgggttatgctggttaattctatgaacaccgtgaaagagctgttgcctgtccttatatctgctatgaagatattcgtgacaaccaaaaactccaaaaaccagggtatagaggaagccctgaagaacaggaactttaccgttgagaagatgagcgctgaaattaacgagattattcgagtgctccagcttacaagttgggatgaggatgcatgggcgagcaaggacacggaagctatgaagagagccctggccagcatagactccaagctgaaccaggccaaaggctggcttcgcgacccaagtgcatcacccggcgacgctggcgaacaggcaatcagacagatccttgatgaagcaggaaaggtgggtgaactgtgtgccgggaaagaaaggcgcgaaatactgggcacctgcaaaatgcttgggcagatgactgatcaggtagccgatcttcgtgctagaggacagggctcgtcaccggtcgcaatgcagaaagctcagcaagtttcacagggcctagatgtcttaaccgcaaaggtggaaaacgccgctcgaaagcttgaagccatgacaaattcaaaacaaagtattgctaagaaaattgatgcagcgcagaactggctggccgatccaaacgggggaccggaaggtgaagaacagatcaggggtgctctggctgaagctcgtaagattgcggaactctgcgacgaccccaaagaacgtgatgatatattacgctcactgggcgagatctcagccctgacctctaagctagccgatctgcggcgccagggcaaaggggattcacccgaggcaagggcgcttgccaaacaagtggccaccgctctacaaaatctccaaaccaaaacgaacagggcagtagctaacagtcgtccagccaaagctgcagtccatctcgaaggcaagatcgaacaggcccagagatggattgacaaccccaccgtcgacgacaggggggtaggacaggccgccatcagaggccttgtcgctgagggccatcgactggccaacgtgatgatgggcccgtaccgacaggatctgctcgccaaatgtgacagggtggatcagctgactgcacaactggccgacctggcggcgaggggtgagggagagagcccccaggcccgcgccctggcctctcagctgcaggacagtctgaaagacttaaaagcgagaatgcaggaggccatgacccaggaggtaagcgacgtgttttctgacactacaaccccaattaaactgctcgcagtggccgcgactgcccctcctgacgcccccaaccgggaggaagtgtttgatgaacgagctgcaaactttgaaaaccattccgggaagctgggcgcgacggccgaaaaggccgccgccgtcggaaccgccaacaaaagtaccgtagaaggaatccaggcttccgtaaaaacggccagagagcttactcctcaagttgtttctgcggcccgcattctcctcaggaaccccggaaatcaggccgcctatgagcatttcgaaaccatgaagaaccagtggatagataacgtggaaaagatgactggcctagtggacgaagctatcgataccaaaagcctgctggacgcttctgaggaggcaataaagaaagatctcgacaagtgtaaagttgccatggcgaatatccagccacaaatgctagttgcaggcgccactagtatcgctagacgggccaaccgtattctgctcgtagctaagcgagaggtcgagaactccgaagatcccaagttccgcgaggcggtaaaagcggcttccgatgagctgagcaaaactatctcccccatggtcatggatgctaaagccgtggctgggaatatctcagatccaggtttgcaaaaatcttttctggactctggatacagaattctcggggcagtggctaaggttcgcgaagccttccagccgcaagaacccgatttcccacctccgccgccagacctggaacagctgcgtctcactgacgagctggcacccccaaaaccacccctgccagagggggaggtgcctcccccccgcccgccaccaccggaggaaaaggatgaggagttcccggagcaaaaggcaggggaagttatcaaccaacccatgatgatggctgcaaggcagctgcatgacgaggctaggaagtggtcgagcaaaggaaatgatattatagcggctgctaaaagaatggctctcctgatggcggagatgtccaggttggtgcgtggcggctcaggtaccaagagggcactgatccagtgcgccaaagatattgcaaaagcaagcgacgaggtcactcgattagcaaaggaagtggccaagcagtgtacagacaagaggatccgcaccaatctgctgcaggtctgtgaaagaatccccacaatctcaacccagttgaagatcttaagtaccgttaaagctacgatgctgggccgtacgaatatctctgacgaggagagtgagcaagcgaccgaaatgctcgtccacaacgcccagaacctcatgcagtccgtgaaggagaccgtgcgggaattgaaactgctccaaagcaagtttgaacagatgctggatcttcattgtgctggtctagagcggctcccaggaacaagccgacacctggcagaaccaggatggcacaggaacctatattag

SEQ ID NO: 26956 - DNA, 570 bp, synthetic construct
  misc_feature 1..570: note = Description of Artificial Sequence: Synthetic coding sequence
  source 1..570: mol_type = other DNA
atgaccgagtacaagctggtggtggtgggcgccggcggcgtgggcaagtctgccctgactattcagcttatccagaatcactttgtagacgagtacgaccccactatcgaagatagctacagaaagcaggtcgtaatcgacggagaaacctgcctcctggacatacttgatacggcgggacaagaggaatattccgcgatgcgggaccagtatatgcgcactggcgaaggtttcctatgtgtgtttgccattaacaacacgaaatcatttgaggacattcatcattaccgggagcagataaagcgagtaaaagattccgaggacgtgcccatggtactggtgggcaataagtgtgatctgcccagccgcaccgttgacaccaagcaggcccaggacttggctagatcctatggaatccccttcatagagacatctgccaaaacaagacagagagtggaggacgcgttttataccttggtccgagaaatcaggcagtatcggctgaagaagatttccaaagaagagaaaacaccaggatgcgtcaagataaaaaagtgcattataatgtag

SEQ ID NO: 26957 - DNA, 567 bp, synthetic construct
  misc_feature 1..567: note = Description of Artificial Sequence: Synthetic coding sequence
  source 1..567: mol_type = other DNA
atgaccgagtacaagctggtggtggtgggcgccggcggcgtgggcaagagcgcactgacgatccagctgatccagaatcactttgtggacgaatatgatcccacgatcgaagatagctaccggaaacaggtcgtcatagatggcgaaacgtgcctgctggacatcttggacacagccggccaggaggaatactctgctatgcgcgatcagtacatgagaactggagaggggtttctgtgtgtatttgcgattaacaatacgaaaagcttcgaggatatccaccactacagggaacaaattaaacgtgtcaaagatagcgaagatgtaccaatggtccttgtggggaacaaatgtgacctgccgtcacgcactgtggacactaaacaggctcaggatctggctcggtcctatgggattccttttatcgaaacctcggccaagactagacagggcgtcgatgatgcgttctacaccctggttcgcgaaattaggaagcataaagaaaagatgtcaaaggacggcaaaaagaaaaagaaaaagtctaagaccaagtgtgtgataatgtag

SEQ ID NO: 26958 - DNA, 228 bp, synthetic construct
  misc_feature 1..228: note = Description of Artificial Sequence: Synthetic coding sequence
  source 1..228: mol_type = other DNA
atgaccgagtacaagctggtggtggtgggcgccggcggcgtgggcaagtctgccctgactattcagctcatccagaaccacttcgtcgatgaatacgatccaacaatcgaaggcgtggacgatgcattttacacactcgtgcgcgaaattcggaagcataaagagaagatgtccaaggacggaaaaaaaaagaaaaagaaaagcaaaaccaagtgcgtcatcatgtag

SEQ ID NO: 26959 - DNA, 2931 bp, synthetic construct
  misc_feature 1..2931: note = Description of Artificial Sequence: Synthetic coding sequence
  source 1..2931: mol_type = other DNA
atgcggggcgcccggggcgcctgggacttcctgtgcgtgctgctgctgcttctgagggtgcaaactggatcatctcagccaagcgtgagtccaggcgagccctcgccacccagcatccatcccggtaagtccgatctcattgtaagggtgggggacgagatcaggctattatgcaccgacccaggctttgtgaagtggacgttcgaaatcctggatgagactaacgaaaataaacaaaatgagtggatcaccgagaaggccgaggccaccaatactggaaaatacacttgtaccaataaacacggactgtccaattccatctacgtattcgttcgggaccctgcaaagctgtttctggtcgaccgaagcctgtacggtaaggaggacaatgacaccctggtgcgctgtccactcaccgacccagaagttacgaactacagcctcaaggggtgtcagggcaagcccctcccaaaagacctgcgatttatcccagatccgaaggccggcattatgataaaaagtgtaaaacgggcctatcatcgcttatgcctgcactgctccgtcgatcaagaaggtaaaagtgttctgtccgaaaagttcattctgaaagtgcgacccgcgtttaaggccgtccccgtcgtgtctgttagtaaagcaagctacttactccgagagggcgaagagttcacggttacctgcacaatcaaggacgtcagctcttcggtatatagcacctggaagcgcgagaactctcaaaccaagctgcaggaaaagtacaattcctggcaccacggcgattttaactacgaaagacaagccaccctcaccatctcttctgcaagagtgaacgattcgggagtgtttatgtgctatgctaataatacgttcgggagcgcgaacgtaaccacgacgttggaggtagtcgataagggattcattaatatatttccgatgattaataccacagtgtttgtgaatgacggtgagaacgtggatctgattgtggaatatgaggcctttcccaagccggagcaccagcagtggatatatatgaatagaacctttactgacaaatgggaagattatcctaaatcggagaatgagagtaacatcaggtatgtatccgagttgcatctcacgaggctcaagggcaccgagggcggtacttacacgtttcttgtctccaactctgatgtgaatgccgccattgcattcaatgtgtatgtcaacaccaagcccgagattctgacgtacgaccggctggtcaatggtatgctgcagtgtgtcgctgccgggttcccggagccaaccatagattggtatttctgtccaggcacagaacagagatgctctgcatctgttttgcctgtggatgtccagacactgaattcatccggacctccctttggtaagttggtcgtacagtcaagtatcgattctagcgcctttaagcacaatggcactgttgagtgcaaagcttataatgatgtcggaaaaaccagcgcctacttcaatttcgcgttcaaggggaacaataaggagcagatccacccacacacacttttcacgccattactgatcggattcgtgatagtggccggaatgatgtgcatcatcgttatgattctcacatataaatacttgcaaaagcctatgtacgaggtgcaatggaaggtggtcgaggagataaatgggaataattatgtgtatattgatccaacacagcttccttacgatcataaatgggaattcccgcggaaccgtctttctttcggaaaaacccttggcgccggagcatttggaaaagtggtcgaagccaccgcatacggccttataaaaagcgatgccgccatgaccgtagccgtcaaaatgttaaagccctctgcacatctaaccgaacgagaggccctcatgtcggagctcaaagtgttgtcctacctgggcaatcatatgaatattgtaaatcttttgggggcctgtacgattggcggcccgactctagtgattactgagtactgttgctatggggatttgctaaatttcttgcggaggaaaagggacagctttatttgcagcaaacaagaagatcatgctgaagcggccctatacaagaatttgctgcactctaaggagtccagttgctcggactctaccaacgaatatatggacatgaagccgggcgtctcttacgtggtgccaactaaagccgacaaacgtagatcagtccgtattggaagttatattgaacgtgacgtgacacccgcaatcatggaggatgatgaactggcactggatttggaagacctgctctcttttagctaccaggtcgccaaaggaatggcattcctggccagcaagaactgcatccaccgcgatctggcggctcgtaacatcctgcttacccacggacgtattaccaagatttgcgatttcgggctggccagagatatcaaaaacgatagcaattacgtggtgaagggcaacgctaggctgcccgtgaagtggatggctcctgagtcgatattcaactgcgtgtatacttttgaaagcgatgtgtggagttatggcatttttctgtgggaattgttctctctcggaagtagcccgtatcctgggatgcctgtggacagtaaattctataagatgataaaggagggcttcaggatgctctcacctgagcatgctccagctgagatgtatgacattatgaaaacgtgctgggacgctgacccactgaaacgtccaacatttaagcagattgtgcaattaattgagaagcagatatcagagtctactaatcacatttatagtaacctggctaattgctccccgaatcgacagaagcccgtggtggatcattccgtccgcatcaatagtgtaggcagtacagcaagctctagccagcccctgctcgtccacgacgatgtttag

SEQ ID NO: 26960 - DNA, 2919 bp, synthetic construct
  misc_feature 1..2919: note = Description of Artificial Sequence: Synthetic coding sequence
  source 1..2919: mol_type = other DNA
atgcggggcgcccggggcgcctgggacttcctgtgcgtgctgctgctgttgctacgagtccagacaggttcttctcagccatcagtaagtccgggagaaccaagtcctccctctatccaccctggcaagtcagacttaatcgtgcgagttggtgatgaaatcaggttactgtgtaccgatccaggatttgtcaaatggaccttcgagattctggatgagacgaatgagaacaaacagaacgaatggatcacggagaaggcggaggccacgaataccggaaagtacacatgtacgaataagcacggtctaagcaactctatctacgtgttcgtgcgcgatcccgccaagctgttcctcgtcgatcgttccctgtacggaaaggaggataacgacaccctggtaaggtgccctctcacggatcccgaggtgacgaactatagtctgaagggatgtcagggtaaaccattacccaaggacctgcgcttcattcctgatccaaaggccggaatcatgatcaagtctgtgaagagggcctaccataggctctgcctgcactgtagcgttgatcaggagggtaagagcgtactcagcgagaaatttatcctgaaggtgcgccctgccttcaaagccgtccctgttgtctccgtgtcaaaagcctcgtatttactgcgggagggagaggaatttaccgtgacgtgtacgataaaggacgtgtctagtagtgtctacagtacgtggaaacgggagaacagccagactaagttgcaggaaaaatataattcctggcatcatggagattttaactatgagcggcaagccaccctcacaatctcatctgcccgagtgaacgacagtggcgtgttcatgtgctatgcaaataatacatttggttccgcgaacgttactacaaccttggaggttgtggacaaagggtttattaacatttttcctatgattaatactactgtattcgtcaatgacggcgaaaacgtcgatttgatcgtggagtatgaggcatttcccaaaccggagcaccagcagtggatatatatgaatcgcactttcacagacaaatgggaggattacccaaagtctgagaatgaaagtaatatacgttatgtgtctgagctgcatctcacaagactcaaaggcaccgaaggaggtacttacacctttctcgtgagcaactccgatgtcaatgccgctatcgctttcaatgtgtacgtcaacaccaagccagagattctcacctatgatcgcctggtgaatgggatgcttcaatgcgtggctgcaggcttccctgaacccactattgactggtatttttgcccaggcactgagcaacgctgctccgcctctgttctgcctgttgatgttcaaacgcttaacagtagcggtcctcccttcggtaagctggttgttcagagctccatagatagtagcgcatttaaacacaacggcaccgttgagtgcaaagcctacaacgatgtgggcaaaaccagcgcttattttaatttcgcctttaaagagcagattcacccccacacactatttacgccacttctcattggctttgttattgtagccggtatgatgtgcataatagtgatgatcctcacttataaatacctacagaaacctatgtacgaggtacaatggaaggtggtagaggaaattaatgggaataattacgtgtacatcgatcctacacaattaccctatgaccacaaatgggagtttccccggaataggctctcatttggaaaaacgctcggtgccggagctttcgggaaagtcgtagaggctaccgcttacggcctcatcaagagtgatgctgccatgacagtggcagtgaaaatgttaaaaccctcggctcacctaaccgaacgtgaggctctcatgagcgagttaaaagtcctgagttacctgggaaatcatatgaacattgtcaatctcttaggggcttgcacaatcggtggacctacccttgtgatcaccgagtattgttgttacggcgatctcttgaactttctccgtaggaaacgggacagctttatttgctctaagcaggaggaccacgctgaagccgcattatacaagaacctgcttcatagtaaggagtcaagttgctcggactctaccaatgagtacatggacatgaagcccggcgtaagctacgtggtgcccaccaaggctgataagaggaggtctgtgaggatcggctcgtatatcgagcgtgacgtgacgcctgccatcatggaagacgatgaattagcgttggacctggaggaccttcttagctttagctaccaggtggccaaaggaatggctttcctggcaagcaaaaactgcatccacagggatttggctgccagaaatatccttctgacccatgggcgtatcacaaagatctgcgacttcggcctcgctagggacatcaagaacgatagtaactatgtcgtgaaaggcaatgcccgcctcccagtgaagtggatggcgcccgagagcatcttcaattgcgtatacacctttgaatccgatgtgtggagttatggcatttttctctgggaacttttctcactgggctctagcccgtaccccggcatgccagtcgatagcaagttctacaagatgatcaaggaaggcttcaggatgctgagcccagaacatgcgcctgccgaaatgtatgacattatgaagacatgttgggacgcagaccccttgaagagacccactttcaagcagatcgtgcaactcattgagaaacagatcagtgagagcacaaaccacatctactcgaacctggccaactgtagcccgaacaggcaaaagccagttgtggatcattctgtccggatcaactcggtgggtagcacagcttctagtagccagccactgttggtgcacgatgacgtgtag

SEQ ID NO: 26961 - DNA, 1242 bp, synthetic construct
  misc_feature 1..1242: note = Description of Artificial Sequence: Synthetic coding sequence
  source 1..1242: mol_type = other DNA
atgcggggcgcccggggcgcctgggacttcctgtgcgtgctgctgctgttactccgagtccagaccggttcaagccaaccttctgtgagcccaggggagccgagtcctccaagcatccatcctggcaagtccgacctaatagtacgggtcggcgatgaaattcgattgctatgcactgacccaggattcgtaaagtggacttttgagatcttggatgagacgaatgagaacaagcagaatgaatggatcacggaaaaagcagaggcgaccaataccgggaagtatacgtgtactaacaaacatgggctgtcaaatagcatctatgtgttcgtccgggaccctgctaaactcttcctggtcgaccgttccctttatggcaaagaggacaacgatacactggtgcgttgcccgctgacagatccggaagtaactaattatagtctaaagggctgtcaaggaaagccattacccaaagatttacggttcatcccagaccccaaagctggtattatgatcaaaagcgtgaagcgggcgtatcatcggttgtgccttcactgctcggtggatcaagaaggcaagagcgtgctctcagagaagtttatcctcaaagttaggcctgctttcaaggctgttccagtagtgtcagtgtctaaggcctcttatctgttgagggaaggtgaggagttcactgtcacttgcaccatcaaggacgtgtccagctctgtgtatagcacctggaaacgcgagaattcccagacgaaactgcaagagaagtacaactcctggcaccacggggattttaactatgagcggcaagccaccctgacaatctcatctgctcgcgtgaatgattctggagttttcatgtgttatgctaacaacacgttcggcagtgctaatgtgactactaccctggaagtggtggataagggattcatcaatatattcccgatgattaacaccaccgtgttcgttaacgacggtgaaaatgtcgacctcatcgtcgagtatgaggcctttcctaagccggagcaccagcagtggatctatatgaatagaacatttactgacaaatgggaagattatcccaagagtgaaaacgaatctaatattcggtacgtctctgaattacacctgacacgcctgaaaggtacagaggggggcacctatacttttctagtgtccaacagcgacgtcaacgccgcaatcgcgtttaacgtgtacgttaatagtaaattatag

SEQ ID NO: 26962 - DNA, 1212 bp, synthetic construct
  misc_feature 1..1212: note = Description of Artificial Sequence: Synthetic coding sequence
  source 1..1212: mol_type = other DNA
atggccagcgagctggccatgagcaacagcgacctgcccaccagccctctggccatggaatacgtgaacgatttcgacctcatgaagtttgaagtgaagaaggaacctgtcgagaccgataggataatttcccagtgtggcagactcattgccggaggatcactgagcagcaccccaatgtcgactccgtgttcgagcgtccctccaagccctagcttctccgcccccagtccagggagtggttcggagcaaaaagcgcatctggaggattattactggatgaccggatacccccaacaactcaatccagaggcattaggattttctccagaagatgcagtggaagcgttaattagcaattcacaccagctgcaaggcggctttgacggctacgctagaggcgcccagcaactggccgcagctgctggtgccggcgccggtgctagtctgggcggctcaggggaggagatgggcccggctgctgccgttgtaagtgcggtaatcgccgcggccgcggctcagtctggtgccggaccacattaccaccaccatcaccaccatgctgcgggacaccatcatcacccaaccgcaggcgcccccggagctgccggatcagcggccgcctccgcagggggtgcaggtggagccggtggcggaggaccagcgagtgcaggcggcggcggcggcgggggcggaggaggaggtgggggcggagccgcaggggcaggaggagctctacatccgcaccacgccgcaggagggctgcactttgatgatcgtttctcggatgaacaattggttaccatgtcagtccgagaactaaatagacaactgagaggtgttagtaaggaggaagtcatccgattgaaacagaaacggcggacgctaaaaaaccgaggctatgcccagagctgtcgatttaagcgagttcaacagcgtcacgttttggagtcggagaagaaccagcttctccagcaggtagaccacctaaaacaagagatctccaggctagtgcgcgagcgggatgcctataaagagaagtatgaaaagttggtcagctccggatttcgtgagaacggcagcagttctgataatcccagctctccagagtttttcatcacagagccaacaagaaaactcgaaccttcggtggggtatgccaccttttggaaaccgcagcacagagttcttacttcagtctttacgaaatag

SEQ ID NO: 26963 - DNA, 1122 bp, synthetic construct
  misc_feature 1..1122: note = Description of Artificial Sequence: Synthetic coding sequence
  source 1..1122: mol_type = other DNA
atggccagcgagctggccatgagcaacagcgacctgcccaccagcccgctcgccatggagtatgtaaacgacttcgatctgatgaagttcgaagtgaagaaggagcctgtggagacagaccgcatcatcagccagtgcggtcgtctgatcgccggcgggagcttaagttcaacccccatgagcacaccttgtagttcagtgccccctagtccatccttctctgctccatctccagggtccgggagcgagcaaaaagctcatctggaggattattactggatgacgggttatccacagcagctcaacccagaagctctaggattttcacccgaagatgcagtggaggccttgattagcaactctcatcagttgcaagggggctttgacgggtacgcaaggggggcacaacagttggctgccgccgccggcgctggggccggagcatccctgggaggcagcggtgaagagatgggtccagctgccgcagtggtttctgcggtgattgctgcagccgcggcccagagcggcgccgggccacattaccatcaccatcatcaccacgccgccgggcaccaccatcatccgaccgcgggggcacccggtgccgcagggtcagctgctgcaagcgctggaggagccggcggcgccggaggagggggccccgctagcgccgggggaggagggggcggcgggggcgggggcggtggcgggggcgcagctggggccggaggcgcactgcatccacatcatgctgccggcggactgcactttgatgaccgattctcggatgaacagcttgttactatgagcgtgcgggaactcaatagacagctgaggggggtatctaaagaggaggttatcaggctgaagcaaaaacgcagaacactgaaaaacagaggatatgcccaatcctgccggttcaaacgggtccagcagcgtcatgtgttggagtcagagaagaatcagctgctccaacaggtagatcacttaaaacaggaaatcagcagactggtgcgggaaagggacgcttacaaggaaaagtacgaaaaactagtgagtagtgggtttcgcgaaaacgggtctagcagcgacaacccttctagtccagagtttttcatgtag

SEQ ID NO: 26964 - DNA, 1062 bp, synthetic construct
  misc_feature 1..1062: note = Description of Artificial Sequence: Synthetic coding sequence
  source 1..1062: mol_type = other DNA
atggccgccgagctggccatgggcgccgagctgcccagcagccccctggccatagaatacgtgaacgattttgacttaatgaagttcgaagtgaaaaaggagcccccagaggctgaaaggttttgccatcggttacccccaggtagtttgtccagtactcctctgtcaactccatgttccagtgtcccctctagtcctagtttctgcgctccctcccctggtaccggaggcggcggcggggctggtgggggcgggggcagctcacaggctgggggggcccccggccccccttcgggcggcccaggcgcagtcggaggaactagtggtaaacctgctctcgaggatctgtattggatgtccgggtaccagcaccaccttaatccagaagccctgaacctcacaccagaagacgccgtcgaagccttaatcggtagtggccatcacggagcacaccacggagcccatcatcctgccgcagcagccgcttatgaagcgttccgcggccctggctttgctggaggcgggggagctgacgatatgggcgctggccatcaccacggcgcccatcatgcagcgcatcaccaccacgctgcccatcaccaccatcatcatcaccatcaccacgggggagccgggcatggcgggggagccggacaccacgtccgtttagaggagagattctccgacgatcagttggtttcaatgtctgtgcgggagctgaatcggcaactgcgcgggttcagcaaggaggaggttatccggctaaaacaaaaaaggcgcaccctgaagaaccgcggctacgcccaatcctgcagattcaaacgtgtccagcagcggcatatcctagagtccgaaaagtgtcagctccaatctcaagtggagcagctgaagcttgaggtcgggaggctggccaaggagcgtgatctgtataaggaaaaatacgagaaacttgcaggccgaggggggcccggaagcgctggaggagcggggtttccaagagaaccaagcccaccccaggctggtccaggcggggccaaggggactgccgattttttcctttag

SEQ ID NO: 26965 - DNA, 972 bp, synthetic construct
  misc_feature 1..972: note = Description of Artificial Sequence: Synthetic coding sequence
  source 1..972: mol_type = other DNA
atggccgccgagctgagcatgggccccgagctgcccaccagcccccttgccatggagtatgtgaatgattttgatctgttgaagttcgatgtgaaaaaagagcccctaggaagggcagaaaggcccggacgcccctgtacccgtctgcagcccgccggctccgtttcctccactcccctctccactccgtgcagttccgtgcctagttcaccttcattctcaccgacagagcaaaaaacccatctcgaagacttatactggatggccagtaactatcaacaaatgaaccccgaagcccttaacttaacgccggaagatgctgttgaggctttaatcggtagtcatcctgtgccccaacccttacagtcattcgactccttcagaggcgctcaccaccatcaccatcatcaccacccccatccccaccacgcttatcccggtgccggcgttgcccacgacgaactgggccctcacgcccacccacatcatcatcatcaccatcaggcctcccccccaccctccagcgcagcatcacccgcccaacagctgccaacttcacatcctgggccaggccctcacgcaacagcttcagccactgctgccggaggtaacggttccgtagaagaccgcttttctgacgatcagctagtcagcatgtccgtccgggagttaaatcggcacttgaggggctttactaaggatgaggtgattcgcctaaagcagaagcgaagaacactgaaaaaccgtggctacgcccagtcttgtagatataaaagagtccaacagaagcatcacttggagaatgagaagacccagctgatccaacaggtcgaacagctcaaacaggaggtctcccgcctagccagagaaagggatgcatataaagtcaaatgcgaaaagctggccaattctggatttcgcgaggccggcagtacttctgactcaccttcctcccccgagtttttcctatag

SEQ ID NO: 26966 - DNA, 972 bp, synthetic construct
  misc_feature 1..972: note = Description of Artificial Sequence: Synthetic coding sequence
  source 1..972: mol_type = other DNA
atggccgccgagctgagcatgggccccgagctgcccaccagccccctggctatggagtatgtcaacgatttcgatctccttaagtttgacgtgaagaaggagcccctgggccgcgccgagagacctggccggccatgtactagactgcagccagccggaagcgtgtcaagtacccctctctcaactccctgctccagtgtcccgagtagcccctctttcagccccacagagcagaaaacccatctggaggacctgtattggatggctagtaactatcagcaaatgaaccctgaagccctcaatctgacgccggaggacgcggtggaagcgttaattggttctcaccctgtgcctcaacctttgcagagtttcgattcttttaggggggctcaccatcatcaccaccaccatcatccacacccccatcatgcctacccgggagcaggtgttgcccacgacgaactcggaccgcacgcacatccccaccatcaccaccaccaccaggccagcccacccccatcttccgctgcctccccagctcaacagcttcccacatctcaccctgggccagggcctcacgccacagcgtctgcaactgcagcgggtggaaatgggtctgtggaggatagattttcagatgatcagctggtcagcatgagtgtgcgcgagcttaatagacacctgcggggattcacaaaggatgaggtcattcgcctgaagcaaaagagaaggacactcaaaaatcggggatatgcacagagctgtcgctacaagcgggtgcaacagaagcaccacctggaaaacgagaaaactcaactcatccagcaggtggaacaactcaaacaggaggttagcagattagctagagagcgggacgcatacaaggttaagtgcgaaaagctcgccaattcaggcttccgggaagcagggtcaacatccgacagtccatcgagtcctgaattcttcctatag

SEQ ID NO: 26967 - DNA, 1233 bp, synthetic construct
  misc_feature 1..1233: note = Description of Artificial Sequence: Synthetic coding sequence
  source 1..1233: mol_type = other DNA
atggccaagcggagccggagcgaggacgaggacgacgacctgcagtacgccgatcacgactacgaagttccacagcaaaagggcctgaaaaaattgtggaatcgggtgaagtggacacgggatgaggatgataagctcaagaaactggttgagcagcacggaacagacgactggaccctcatcgcctcccatctacagaatcgtagtgattttcagtgccaacatcgctggcaaaaggtgctaaatcctgaactgatcaagggtccttggactaaagaagaagaccagcgagtcatcgagcttgtccagaagtatggcaagaagagaaagatgcgcgtgggtcacagtccagggagcgaattaagggacgggagcctaaatgacggtggcaacatggctctcaaacatacacctctcaaaacactgcccttttcacctagccaattttttaacacatgtccgggaaacgagcagctgaacatagagaatccatctttcacttctactcctatctgtggacagaaggcactgataactactcctctccataaagagaccactcccaaggaccagaaggagaatgtcgggttcaggacacccacaattagacggtctatactgggcacgacaccccgcacccccactccattcaaaaacgcactggccgctcaggaaaaaaagtatggccccttaaagatcgtcagccagccacttgcattcctggaggaggatattcgggaggtgctgaaggaagaaacaggcaccgacctgttcttgaaagaggaggacgagcccgcctacaagtcttgtaaacaagagaatacggctagtggcaaaaaggttaggaagtctttggtgctcgataactgggagaaagaagagtctggcactcagctgcttaccgaagatatttcagatatgcagtctgaaaatcgttttactacgagccttctgatgatccctttgcttgagatccatgacaataggtgcaatttgattcctgagaaacaggatataaatagcacgaacaagacctatacgctcaccaagaagaagccgaaccccaatacgtctaaggtggtaaaactggagaagaatttacagtcaaactgcgaatgggagacagtcgtgtacggcaaaaccgaggaccagctgatcatgactgagcaggccagaaggtatctctccacatacactgctacaagtagcaccagtcgggcacttatactgtag

SEQ ID NO: 26968 - DNA, 2259 bp, synthetic construct
  misc_feature 1..2259: note = Description of Artificial Sequence: Synthetic coding sequence
  source 1..2259: mol_type = other DNA
atggccaagcggagccggagcgaggacgaggacgacgacctgcagtacgctgatcacgattatgaagttccccagcagaagggtctaaaaaagttatggaacagagtgaaatggaccagagacgaagacgataaactcaaaaaattggtcgagcagcatggaactgatgattggactctaattgcatctcacctacagaatcggtctgattttcagtgtcagcatagatggcagaaggtcctgaaccccgagctgatcaaaggtccttggacaaaggaggaagatcagagagtgatcgaactggtgcagaagtacgggccaaagcggtggtctttaatcgctaagcacttaaagggtaggattggcaagcagtgtagggaacggtggcacaatcatctcaatcccgaagtcaaaaagagctcgtggactgaggaggaggatcgcattatctatgaagcccacaaaagactggggaataggtgggctgagatcgctaagctactgcccggaaggactgataactctattaagaaccattggaacagtacaatgcgccggaaagtggagcaagaagggtacttgcaggacggtataaagtcagaacgatcaagttccaagcttcagcataagccctgcgctgcaatggatcatatgcagactcaaaaccaattttatatccccgttcagatcccaggctatcagtatgtatcaccagagggcaattgcatagaacacgtccagcccacaagtgcgttcatccagcagcccttcatagatgaggatcccgataaggaaaaaaagatcaaggagctggagatgctgctaatgtcagccgaaaatgaggtgcgcagaaagcgcattccctctcagcccggatcatttagcagctggtccgggtcatttctcatggatgataatatgagcaatacacttaacagtctcgatgagcatacatccgagttctatagcatggacgagaaccagcccgttagtgcacagcagaatagtccgaccaagttcctggccgtcgaggcgaatgccgtgctgagctcactgcagacaattccggagttcgcagagaccctggagctgatcgaatccgacccggtcgcgtggtccgatgtcacatcattcgacataagcgatgcggctgcttctcccattaagtctacccccgtaaaattgatgcggatacagcacaatgaaggggccatggaatgccaatttaacgtctctttggtgcttgagggcaagaagaacacctgcaacggtggaaacagtgaagcagtaccactgaccagtcccaacatagccaagttctctacccctcccgctattctgcggaagaaaaggaaaatgagggttggacattccccgggatctgagctgagagacggctccttaaatgacggcggcaacatggctcttaaacatactcccctcaaaactttacccttctcccctagccagttctttaacacttgccctggcaacgaacagctgaatatcgaaaatccgtcctttactagcactccaatatgtggtcagaaagcgctaattacaacccccctacacaaggaaacgacgccgaaagaccagaaggagaatgtggggttccggactcctacaatcaggagatctatcttaggcacaacacctcgcacaccaacccctttcaagaatgcattggccgcgcaggagaaaaaatatggcccactaaagattgtgtctcaaccgctcgcgtttctggaagaagacatcagggaggtgctcaaagaggagacgggaacagatctctttttgaaggaggaagacgagcccgcctacaagagctgtaaacaggaaaataccgccagtgggaaaaaagtccggaaatccttggtgcttgataactgggagaaggaggaaagtgggacgcagctcctaaccgaggatattagtgatatgcaatccgaaaataggtttactacgtcactactgatgatccctctgctggaaattcatgacaatcggtgcaatttgataccggagaagcaagacatcaactccactaacaagacctatacactaaccaaaaaaaagcctaaccccaatacttcgaaagtggtgaagctcgagaaaaacctgcaaagtaattgtgaatgggaaactgtggtgtacgggaagactgaggatcagttgattatgacagagcaggcacgcaggtacctcagcacttacacagccacgtctagcacctcacgcgcactgatcctgtag

SEQ ID NO: 26969 - DNA, 2079 bp, synthetic construct
  misc_feature 1..2079: note = Description of Artificial Sequence: Synthetic coding sequence
  source 1..2079: mol_type = other DNA
atggccaagcggagccggagcgaggacgaggacgacgacctgcagtacgcggaccacgattacgaggtcccccagcaaaagggtctgaagaaactctggaaccgtgtgaagtggactcgggatgaggacgacaagctaaagaagctggtagagcagcacggcactgacgactggacgctgattgcctcacatcttcagaacagaagcgatttccagtgtcagcaccggtggcagaaggtgttgaacccagagcttattaaaggcccatggactaaggaggaggaccagcgtgttattgaactcgttcagaaatacggccccaaaaggtggtcccttatcgccaaacatcttaaaggtcgaattggcaaacaatgccgggagcgctggcacaaccatctgaaccccgaggtcaaaaaaagttcctggacagaagaagaagataggataatctatgaggctcataaaaggctcggcaaccgttgggcggaaatagccaagttacttcccgggagaaccgacaacagtattaagaatcactggaattcaactatgaggcggaaggttgaacaggagggctacctgcaggatgggatcaagagcgaacggtctagttccaagttgcagcacaagccctgtgctgccatggaccacatgcaaactcaaaaccaattttatatccccgttcagataccagggtatcagtacgtgtcaccggaggggaactgcatcgaacacgtgcagccaacaagcgctttcatccagcaaccattcatcgatgaagatcctgacaaagaaaaaaaaattaaggaactggagatgctgctcatgtcggcagagaacgaagtccgcaggaaacggattccttctcagccaggcagtttcagctcatggagtggttcctttttaatggatgacaacatgtcaaatactctgaacagcctggatgaacatactagcgagttctacagcatggacgagaaccagcccgtttccgcacagcagaacagtcctactaaattcctggccgttgaggccaatgccgtgctaagctctctgcagaccataccagagtttgccgagaccctggagttgatagagagcgacccagtggcctggtcagacgtcacatccttcgacatcagcgacgccgcagctagtcccattaagtctacacccgtgaagcttatgcgaatccagcataacgaaggagccatggaatgccagttcaacgtgtcattagtgctggaagggaagaaaaatacatgtaacgggggaaacagcgaggctgtgccactcaccagcccgaacatcgctaagttctcgacccctcccgctatactccgaaaaaagagaaaaatgagagtgggtcactctcctggctccgagcttcgcgacggatcactgaacgacggtggtaacatggccctgaaacacacccctcttaagacattacccttttcaccatctcagtttttcaacacatgcccgggcaatgagcagcttaatatcgagaatccctcatttacgagcacacctatttgcggccaaaaagcactcattacaacacctctgcacaaggagacgacaccgaaagatcagaaggagaatgtgggcttcagaaccccaacgatacgccgcagcatcctgggaacaacccctcgcacacctacaccctttaagaatgctcttgccgcacaggaaaaaaagtacggaccgttgaaaatcgtgtcccaaccacttgctttcctggaggaggacatacgggaggtgctgaaagaggagactggcacagacctgtttctgaaggaagaagacgagcccgcatacaagagctgcaagcaggagaatacagccagcggcaagaaagtgcgaaaaagtttagtactggataactgggaaaaagaggagtccggtacgcagctgctaacagaagatatatccgatatgcagtcgaattgcgaatgggaaaccgttgtatatgggaaaactgaggatcagctcatcatgacggaacaggccaggagatatctgtcaacctacaccgcaacttctagtacaagccgggccctgatactctag

SEQ ID NO: 26970 - DNA, 711 bp, synthetic construct
  misc_feature 1..711: note = Description of Artificial Sequence: Synthetic coding sequence
  source 1..711: mol_type = other DNA
atgtgcgtgtgcgccggctgccgggccgcccccagccggcggggcgcaggaccacttcaagtcgctggtggctggtccgaaggcgctgacatggattatgattcttaccagcactatttttacgactatgactgtggcgaggatttttacagaagcacggcacccagcgaagacatttggaagaagttcgaactagtcccctccccccctacaagcccaccctgggggctgggccccggagctggggatcctgcgcctggtatcggccccccagagccttggccaggtggctgtacaggcgatgaggcagagagccgcggccactccaaaggatggggcagaaactacgcttcaattataagacgggattgcatgtggagtgggttctctgctagagagcgcctggaacgagcggtgagtgaccgtctggcgccaggcgcgccccgcgggaaccctcccaaggctagtgctgctcctgactgcacgccgtccctggaagccggaaatcctgcacccgcggcaccatgtcccctgggagagccaaaaacacaggcatgctccggctccgagtctcccagcgatagcggcaaggatttgcctgagccctcaaagcggggacctcctcacggttggcctaagctgtgcccttgccttcgctccggaattggttccagccaggccctcggtccttccccccccctatttgggtag

SEQ ID NO: 26971 - DNA, 1095 bp, synthetic construct
  misc_feature 1..1095: note = Description of Artificial Sequence: Synthetic coding sequence
  source 1..1095: mol_type = other DNA
atggactacgacagctaccagcactacttctacgactacgactgcggtgaggacttctacagatctacggctccttctgaggacatatggaagaagttcgaactagtgccgtcccctcccacgagtcctccatggggattagggccgggcgctggcgatcccgcgcccggcatcgggcctccagagccttggccagggggctgtaccggggatgaggcagagagcagaggacactcaaaaggctggggaagaaactatgcttcaattattcggcgcgactgcatgtggtccggcttcagcgcgcgtgagcgactcgagcgggcagtgtccgatcgtctggcacccggcgcccctcgcggaaatccacccaaggcgagcgccgcacctgactgcacgccctccctcgaggcaggcaaccccgctcccgctgccccttgtccgctgggtgaaccaaaaacccaggcctgtagcgggagtgagtctcctagcgatagtgagaatgaagaaatagatgtggtcaccgttgaaaagcgacaatcactaggaatcaggaagccagtgaccataacagtcagagccgatcctctggacccttgtatgaagcattttcatatctcaattcaccagcagcagcacaattacgcagcgaggttccccccggagtcttgctctcaggaggaggcctccgaacggggcccccaggaggaggtgctcgagagagacgcggctggcgagaaagaggatgaggaggacgaagaaattgtgtctcccccgcccgtagaatctgaggctgcacagtcttgccatcccaaacccgtttcctccgacaccgaggacgtgaccaaaagaaagaatcacaatttcctggagcgcaagcggagaaacgacctgcggtcaagatttcttgccctccgagatcaggtccccactctggcgtcttgttcaaaagccccaaaagttgtaatcctttccaaggcccttgagtacttacaggccctggtcggagctgaaaagaggatggcaacagaaaagcgccaattgagatgtagacagcagcagctgcaaaagagaattgcctatctgacaggctactag

SEQ ID NO: 26972 - DNA, 1185 bp, synthetic construct
  misc_feature 1..1185: note = Description of Artificial Sequence: Synthetic coding sequence
  source 1..1185: mol_type = other DNA
atgtgcgtgtgcgccggctgccgggccgcccccagccggcggggcgctggccctctccaggtagcaggggggtggagcgagggggcggacatggattacgatagttaccagcattatttctatgattacgattgtggggaggatttttaccggtcgactgcaccatcagaggacatctggaaaaaatttgagctggtgccttcacctcctaccagtcctccatgggggctggggcccggcgcgggcgatcctgcccctgggataggcccgcctgagccgtggcctggtggctgcacaggagatgaggctgagtccaggggtcatagcaaaggttggggccgcaactacgcttccatcatccgcagagattgtatgtggtctggattctctgcccgggaaaggctcgaacgcgccgtgagtgatcgtctagcccctggggcgccgcgtggcaatcccccaaaagcctccgccgccccagactgcaccccaagcctggaagccggcaatcccgcgcctgcggccccctgtccccttggcgaacccaaaacccaagcatgttctggatccgagtctccctctgacagcgagaacgaggagattgatgtcgtcaccgtcgaaaagcggcagtcccttggcatcagaaagcctgtgaccattacagtgagagccgaccctctcgacccctgtatgaagcattttcatattagcattcatcaacagcagcacaattatgccgcccgcttccctccggagtcctgctcgcaagaagaggcgagcgagaggggccctcaggaggaggttcttgaaagagacgccgcaggagaaaaagaagacgaggaagacgaagagatcgtcagtccacctccggtggagagcgaggcggctcaatcatgtcatcccaagcccgtctcttcagacactgaggatgtcactaagagaaagaatcacaacttcctagagcgcaaaagacgcaatgaccttcgatcgcgattcctggctctgcgggatcaagtgccaaccctggcttcctgctccaaggctcctaaggtggtgatcctaagtaaagccctggaatacctccaggcgctcgtaggagccgaaaagcgaatggccacagaaaagcgtcagctgcggtgcagacaacagcaattacaaaagcgcatcgcctatttaacgggctactag

SEQ ID NO: 26973 - DNA, 621 bp, synthetic construct
  misc_feature 1..621: note = Description of Artificial Sequence: Synthetic coding sequence
  source 1..621: mol_type = other DNA
atggactacgacagctaccagcactacttctacgactacgactgcggcgaagacttctatcgaagtacagctccctcagaggacatctggaaaaagttcgaactggtaccttctccgcctacatctccaccctggggtctgggaccaggagccggagacccagctccagggatcggcccacccgagccctggcccgggggctgtacaggcgatgaagctgagagccgcggacactctaagggctgggggagaaattacgcttccattatccgcagagactgcatgtggagtgggttttccgctcgggagagactggagcgggcggtgagcgatcgcctggcccctggggccccgcgggggaatcctcctaaagccagcgcagcccccgattgcacaccatccctcgaggctggtaatcctgccccagctgcaccgtgccccctgggcgaaccaaagacgcaggcttgttctggctctgagagccctagcgattcaggcaaagatctcccagaacccagcaagagaggacctccccacggctggccaaagctgtgtccctgtttacggagcggaattgggagttcacaggccctaggaccttctccaccactcttcggctag

SEQ ID NO: 26974 - DNA, 303 bp, synthetic construct
  misc_feature 1..303: note = Description of Artificial Sequence: Synthetic coding sequence
  source 1..303: mol_type = other DNA
atggactacgacagctaccagcactacttctacgactacgactgcggggaagacttttataggtctaccgcccctagcgaagatatttggaaaaagtttgagctggttccttctccccccacaagtcccccctggggattaggccctggagctggagatcctgcgcccggcatcggacccccagagccctggccgggaggctgcacgggcgatgaagcagaaagcagaggccacagcaagggctgggggcggaattacgcctccattattaggcgtgattgtatgtggtccgggttcagttag

SEQ ID NO: 26975 - DNA, 642 bp, synthetic construct
  misc_feature 1..642: note = Description of Artificial Sequence: Synthetic coding sequence
  source 1..642: mol_type = other DNA
atgccccggcgggccgagaactgggacgaggccgaggtgggcgccgaagaggcaggggtcgaagagtatggacctgaagaagacgggggtgaggagtccggcgctgaagaatccggtcccgaggagagtggccccgaggaactgggagctgaagaggagatggaagctggacggccccgccccgtactgcggagcgttaactctagggaaccttcacaggtgatcttttgcaaccggagccctcgcgtagtgctaccagtatggctcaacttcgatggtgagccacagccatacccaactctaccgccaggcacaggtcggaggatccacagctaccggggccacctctggctctttagagatgcgggcacacacgacgggctactggtgaaccagaccgaattattcgtgccctccctaaatgttgatggacaacctatctttgctaacatcaccctgcccgtgtacactttgaaggagcgctgcttgcaggtcgtacgctccttagtcaaacctgagaattaccgacgactcgacatcgtgcggtccctgtacgaagaccttgaagatcatccaaatgttcaaaaggatctcgagagattgactcaggaacggattgctcatcagcggatgggcgactag

SEQ ID NO: 26976 - DNA, 519 bp, synthetic construct
  misc_feature 1..519: note = Description of Artificial Sequence: Synthetic coding sequence
  source 1..519: mol_type = other DNA
atgccccggcgggccgagaactgggacgaggccgaggtgggcgccgaagaggctggagtggaggagtacggccctgaagaggacggcggagaagagagtggtgccgaggagtctggacccgaggaatcaggccccgaggagctgggcgcagaagaagagatggaagccggccggccccggcccgtactgagatctgtgaactctcgagaaccctcgcaggtcatattttgtaacaggtcaccccgggtcgttttgcccgtatggttgaactttgatggcgaaccacagccttatccaacgctcccccctggaacagggagacggatccactcctaccgcgtctatactctcaaggaaaggtgtctgcaggttgttaggagtctggtgaaaccggagaattaccgtcgcctggacatagttaggtcactgtacgaggatctcgaagaccaccccaacgtccaaaaggacttggagcgtctcactcaggaacggatagctcaccagcggatgggtgactag

SEQ ID NO: 26977 - DNA, 396 bp, synthetic construct
  misc_feature 1..396: note = Description of Artificial Sequence: Synthetic coding sequence
  source 1..396: mol_type = other DNA
atgccccggcgggccgagaactgggacgaggccgaggtgggcgccgaggaggcaggcgttgaagaatatggcccagaggaagactcgtaccgagggcatttgtggctttttagggacgccggtactcatgacggcctcttagttaatcagacagaactctttgtgccaagccttaacgttgatggccagcctatctttgccaatattactctacctgtatacactctgaaggaacggtgtctccaggtggtgagatctctggtgaagcccgagaactatagacgactggatatcgtccggagtctctatgaggacctcgaggaccatcctaacgtccagaaggacctggagcgactaacacaggagcgcatcgcacaccagcgcatgggagattag

SEQ ID NO: 26978 - DNA, 1281 bp, synthetic construct
  misc_feature 1..1281: note = Description of Artificial Sequence: Synthetic coding sequence
  source 1..1281: mol_type = other DNA
atggtgcacttctgcggcctgctgaccctgcaccgggagcccgtgcctctaaaatcaattagtgtatccgtcaatatttacgagtttgtggctggcgtgtccgctactttgaattacgaaaatgaagaaaaagtgccactggaggcttttttcgtgtttcctatggacgaagactcggctgtgtacagctttgaagccctcgtggatggtaagaaaattgtggcagagctgcaagataagatgaaagcacgcactaattacgagaaggcaattagtcagggccatcaagcattcctgctcgaaggcgacagttcctcgcgagacgtatttagctgcaatgttggcaaccttcagccaggatcgaaggctgctgtgaccctgaaatatgtgcaagaacttccacttgaggccgatggggccctccggttcgttttgcccgcggtactcaacccccggtaccaattttccggttcttccaaagatagctgcctgaatgtgaagacccccatcgtccctgtggaagatctgccttacacactgtctatggtagcaacaatcgattcccaacacggaatcgagaaggtgcaatctaactgccccctgagccctacagagtacctgggcgaggacaagacttcagcccaggtctctctggcagcagggcataaatttgatcgagatgtcgagctgttaatctactataacgaggtgcacacaccttcagtcgtgctagaaatgggaatgccaaacatgaagcccgggcatcttatgggggatccttctgctatggtgtccttttatcccaacatccccgaagaccaacccagtaatacgtgtggtgaattcatcttccttatggacaggagcgggagtatgcagagcccaatgagcagccaggatacaagccaactccgtatccaagctgccaaggaaacattgatacttttgttaaagtcccttcctattgggtgctatttcaacatttatggcttcggatcatcttacgaggcctgcttccctgagtctgtgaagtatacccagcagaccatggaggaggccttgggccgcgttaagctgatgcaggctgacctaggcgggacagagatcctggcaccactgcagaacatttatcggggcccgtcaattccagggcacccactgcaggtattcgagaggccatatacactgaccgttctgctgctgcacctctccccggaaggcaacctttgtgtgatcagacctagacattcgcgatggactattacggttagcgtggggtag

SEQ ID NO: 26979 - DNA, 2361 bp, synthetic construct
  misc_feature 1..2361: note = Description of Artificial Sequence: Synthetic coding sequence
  source 1..2361: mol_type = other DNA
atggtgcacttctgcggcctgctgaccctgcaccgggagcccgtgcccctaaaaagtatctctgtgagcgtgaacatttacgaattcgtcgctggagtgagcgcaacactaaattatgagaacgaggaaaaggtacccttggaggctttttttgtattccctatggacgaagatagtgcagtctattcattcgaggccttggtcgatggcaaaaagatagtcgctgagctgcaggataaaatgaaagcacggaccaattatgaaaaagccatcagccaagggcaccaagcatttttattggaaggcgacagttctagtcgcgatgttttttcctgtaacgtcggtaacctccaacccggatcaaaggctgccgtcacactgaagtatgtgcaggagctgcctttggaggcagatggggctctgcgattcgtcctccccgccgttcttaaccccaggtaccagttctccggctcaagtaaggactcctgcctcaacgtcaagacacccatcgttcctgtggaggaccttccatacacactctcaatggtcgccaccatcgatagtcagcatggcatcgagaaagtgcagagcaactgtcccctgagtccgaccgagtatctgggggaggacaagacctctgcgcaggtgtcactggcagccggccacaagttcgatagggacgtggagttacttatttactacaacgaggtacatactccctccgtagtgctggaaatgggaatgcctaacatgaaacctgggcaccttatgggagatccttctgcaatggtgtctttttaccccaatatccctgaagatcagcccagtaacacttgcggggaatttatctttctgatggatcgttccgggagcatgcagagtcccatgagctcccaggatacttcccagcttagaattcaggcagccaaggaaacgctaatcttactgctaaagtctttgccaatcggctgttacttcaatatatatggattcggcagcagctatgaggcctgctttccggagtccgtgaagtacacccaacagactatggaggaggccctcggccgcgttaaactcatgcaagctgacttgggcggcactgagatcttggcaccactgcagaacatttataggggcccgagcattcctgggcacccattgcagctcttcgtttttacagacggcgaggttaccgacacctttagtgtgatcaaggaggtgcgaattaaccggcagaagcaccgctgttttagttttggaattggcgaaggaacatccacatctctgatcaagggaatcgcccgcgccagcggcggcacatcagaatttattactggcaaggaccggatgcagagtaaggctctgcgtacactgaagagatctctacaacctgtagtggaggacgtcagcctgtcctggcacttgccccccggcttatccgctaaaatgctttcaccagaacagactgtgatttttcgggggcagcggctgatatcctatgcacagctaacggggagaatgcccgcagctgagactacaggtgaggtgtgtcttaagtacacactccaagggaaaacctttgaagataaagtgaccttccccctccagccgaaacccgatgtgaatctgactatccatcgcttagccgctaaatctctgctgcagacaaaagacatgggcctacgtgagacccccgcatccgataaaaaggatgcactcaatctatcgctggagtcaggggtaatctccagctttacagcattcattgccatcaacaaggagctgaataaacccgtccaggggccgttggcccatagagacgttcctcggccgatacttctgggcgcatcagcccccttaaagatcaagtgtcagtcaggtttccggaaggctctccatagtgaccgacccccatccgcctcccagcctagaggggaactgatgtgttataaagcaaaaaccttccaaatggatgactacagcttgtgcggattaatcagtcacaaagaccagcactcgccaggctttggggaaaaccacctggttcagttaatttatcatcagaatgcaaacggcagctgggacctcaatgaagacctggccaagatcctgggtatgtctctggaagagatcatggcggcccagcctgccgagctcgtggattcatcaggctgggccacaattttagcagtgatatggctgcacagcaacggcaaggacttaaagtgtgaatgggaacttctcgaacgtaaagccgtggcttggatgcgcgctcatgccggctccaccatgcccagcgtggtgaaggcagccattacattcttgaaaagttctgtggaccctgcgatattcgccttctag

SEQ ID NO: 26980 - DNA, 1248 bp, synthetic construct
  misc_feature 1..1248: note = Description of Artificial Sequence: Synthetic coding sequence
  source 1..1248: mol_type = other DNA
atggtgcacttctgcggcctgctgaccctgcaccgggagcccgtgcccctcaagtcaatttcagtgtctgtgaacatttacgagttcgtagcaggagtgagcgccacattaaactatgagaacgaagaaaaggtgccactagaagcattctttgtctttccaatggacgaagacagtgccgtgtatagttttgaggccctcgtagacggcaagaagatcgtggctgaacttcaggataaaatgaaggcccgtaccaactatgaaaaggccatctctcagggacatcaagcattccttcttgaaggagatagttccagcagagacgtcttttcctgtaatgtggggaacctgcagcccgggagtaaggcagccgtgacactgaagtacgtgcaggaactgccactggaggccgacggagctcttagattcgttctgcccgcagtgctgaacccacgttatcagttttctggatcttccaaggattcctgcctcaatgtcaagacccccatcgtgcctgtggaggacttaccctatacactgtcaatggtcgccacaatcgattcgcaacatgggattgaaaaggtgcagtcaaattgcccgctttcacctaccgagtatttgggggaagataagacctctgcccaggtctctctggcagccgggcacaagtttgatagggatgtggagttgctgatttattataatgaagtccacacaccgtccgtggtgctggagatggggatgccaaatatgaagcccgggcacctgatgggagatcccagtgccatggtttctttttacccgaacattcccgaggatcagccatctaatacctgcggcgaattcattttcctgatggatcgaagtggcagcatgcaatcccctatgtctagtcaggatacttctcagctaaggattcaggccgctaaggagacactgattctgctgctgaaaagcctccctatcggctgttacttcaacatttacgggttcggatcgagctacgaggcctgcttccctgaatctgtaaagtatacgcagcaaaccatggaagaagccctcggccgagtcaagcttatgcaagctgatctcggcggaactgaaatcctggcccctcttcaaaacatctatcggggtccctccatccccggacacccgctgcaactgttcgtatttaccgacggtgaggtgaccgatacctttagcgtgattaaagaggtaagaatcaatagacagaaacataggtag

SEQ ID NO: 26981 - DNA, 2361 bp, synthetic construct
  misc_feature 1..2361: note = Description of Artificial Sequence: Synthetic coding sequence
  source 1..2361: mol_type = other DNA
atggtgcacttctgcggcctgctgaccctgcaccgggagcccgtgccactcaaatccattagtgtgtccgtcaacatctatgagtttgttgccggggtcagcgccaccctgaattacgagaacgaagagaaagtaccccttgaggcattcttcgtgttcccaatggatgaagacagcgctgtgtattcctttgaggccctggtcgacggaaagaagattgtcgctgaactccaggacaagatgaaagctagaaccaactatgaaaaggcgatcagccaaggccatcaggcctttttactcgagggggatagttcatccagggacgtgttctcgtgcaacgttggcaatcttcagcctggctccaaggctgcagtgaccctaaagtatgtacaagagctgcctctcgaggccgacggagcgctgcgcttcgtgctgccagccgtcctcaaccctcggtatcagtttagcggcagttccaaagatagttgtctgaatgtgaaaactcctatagttcccgtggaggacctgccctatactctttcaatggtagcgacgattgatagtcagcacggcatagagaaggtgcagtctaactgcccactaagtcctacagagtacctgggagaagacaagactagcgcccaggtgagcttggccgcagggcacaaatttgatagagacgtagagctcctgatatactacaacgaagtacatacaccctctgttgtgctagagatggggatgcccaatatgaaacccggccacttgatgggcgacccaagtgccatggtgagcttctatccgaatatccccgaggatcaaccgtccaacacatgtggtgaatttatcttccttatggatcgaagcggatctatgcagtcccccatgtccagccaggacaccagtcagctgaggatccaggccgctaaggagaccctgatcctcctcttaaagtcccttccgatcggctgttattttaacatttatgggtttgggtcaagttatgaggcttgcttccccgagagcgtgaagtatacgcagcaaacaatggaagaagcgttgggccgtgtaaagctgatgcaggccgaccttggcggcacggagatcctcgcacccttgcagaacatatacagaggaccatcaattccaggccacccccttcagctgtttgtgttcacagatggcgaggtgacagacaccttctccgtgattaaagaagtaagaattaatcgtcagaagcaccggtgcttcagctttggcattggagagggtacctctacctccctgattaagggcatcgcgagagccagcggcggcacgtccgagttcattactggaaaggataggatgcagtccaaagccctgagaacattgaaacgttcacttcagcctgtggtcgaggatgtctccttatcctggcacctgccaccgggcctgtcagcgaaaatgctgagcccagagcagacggtgatctttcgcggccagcggctcatctcatatgcccagctgaccggaagaatgcctgccgccgaaacgacaggcgaagtgtgcctaaaatatacactccaggggaagacatttgaagataaggtcacctttcctctccagccaaaacctgacgtgaacctgacaatccatcgactcgcagctaaatctcttttacaaactaaagatatgggtttgagagaaacacctgcttcggacaagaaggacgctttgaatctgagcctcgagtcaggcgtcatctcttctttcactgccttcattgcgatcaataaggagctgaataagcccgtgcagggacctctagcacatcgagacgtaccaagacccattctcctgggtgcctccgcgccgctcaaaatcaagtgccagagtggattcagaaaggctctacattccgacaggccgcccagcgcgtcacagcccagaggcgagctgatgtgttacaaggctaaaacctttcagatggacgattattctctctgtggcctgattagtcataaggatcagcacagccccggattcggcgaaaatcacctggttcagcttatttatcatcagaacgcaaatggatcatgggatctgaacgaggatctggcaaaaattctgggcatgtctctagaagaaatcatggccgcccaacccgcagaattggttgactcgtctggctgggccacaattctggccgtgatttggctccactcgaatggaaaagatctgaagtgtgaatgggagctgctcgaaaggaaggccgttgcatggatgagggcacatgcgggaagcaccatgcctagcgtcgtgaaagctgctatcacctttctaaaaagcagcgtcgaccccgccattttcgcgttctag

SEQ ID NO: 26982 - DNA, 1248 bp, synthetic construct
  misc_feature 1..1248: note = Description of Artificial Sequence: Synthetic coding sequence
  source 1..1248: mol_type = other DNA
atggtgcacttctgcggcctgctgaccctgcaccgggagcccgtgcctctgaaatccattagtgtttcagtaaatatctacgaattcgttgccggcgtgtcggctacactgaactatgagaacgaggagaaagtccctctcgaggctttcttcgtatttcctatggacgaagatagcgcggtgtattcatttgaggctctggtagacggtaagaaaatcgttgccgagcttcaggacaaaatgaaggcccgaaccaattacgagaaggcaatctcccagggccaccaggctttccttctggagggggacagcagtagccgcgatgtgttcagctgtaacgtggggaatctgcagcccgggtctaaagcagccgttacgcttaagtatgtgcaggagctccccctggaagcagacggtgcactgcgtttcgtccttcctgcggtgctgaatccaagatatcagttcagcggcagttctaaagacagctgcttaaacgtgaaaactcctattgtccccgtggaagacttgccatacacgctctccatggtcgcgaccatcgacagtcagcatgggatcgaaaaggtacagagcaattgtccactgtcaccaactgagtatctcggggaggataagacctcagcccaggttagcctcgcggccggacacaagttcgacagggatgtggaattattaatttactataacgaagtacatactcccagtgtggtgctggagatgggaatgcccaatatgaagcctgggcacctgatgggcgatcccagcgcaatggtttctttctatccgaatataccggaggatcagccctcaaacacatgtggcgagtttatttttctaatggacaggtcaggaagcatgcagtccccaatgagctcccaggacacatcccagctgagaattcaagcggctaaggagactctaattctgctgctaaagtccctgccaattggctgttactttaatatatacgggttcggatcatcctacgaggcttgctttccagagtctgttaaatatacgcagcaaaccatggaggaggcgttagggcgggtcaagttaatgcaggctgacctgggaggaactgagattctggcaccattgcagaatatctatcggggacctagcatccctggtcaccccctgcaactgtttgtgttcacagacggcgaggtcacagacaccttcagtgtgatcaaggaggtgcgaataaatcgacagaagcatcggtag

SEQ ID NO: 26983 - DNA, 2301 bp, synthetic construct
  misc_feature 1..2301: note = Description of Artificial Sequence: Synthetic coding sequence
  source 1..2301: mol_type = other DNA
atggccgccctgagcggcggcggcggcggcggcgccgagcccggccaagccttgttcaacggagatatggagccggaggctggtgctggcgcaggcgccgccgcgtccagcgccgcggaccccgcaataccagaggaagtctggaatattaaacagatgatcaagctgacacaagagcacatcgaagcgctactcgacaaattcgggggcgaacacaatcctccgagtatctacctggaagcctatgaagagtataccagcaaactcgatgccttgcagcaaagggagcagcagctgctagagagtctgggcaatggcactgacttctccgttagtagtagcgcatcgatggatactgtgacgtcatcctcctcctcaagcctgagcgtgttacctagttcgctgagcgtgttccagaaccctactgatgtcgcacgttccaaccccaaaagcccccaaaagcctatcgtccgggtgttcctgcctaataaacaaagaacagtggttcctgctcgctgcggagtcaccgttcgggactcccttaaaaaggccctgatgatgcgtggtctgattccagaatgctgcgctgtgtatcgcatccaggatggtgagaagaaacccatcggatgggacacagatatatcatggttgactggagaggagctacatgtggaggtgctggagaacgtgcccctgaccacgcacaattttgttcggaaaacattttttacgctagctttttgcgatttctgtagaaagctccttttccaggggttccgctgtcagacctgcggatacaaattccatcagcggtgctccaccgaggttcctctgatgtgcgttaattatgaccagctggatctcctctttgtgtcaaaattcttcgaacaccatccgattccccaagaggaagcctcgctggctgaaaccgcgctaacgagcggatctagccccagcgctcccgcgagcgattccatcggtccacagattcttacgtctccatcaccgagtaaaagtatcccgattccacagccattcagaccagccgatgaagatcacaggaaccagtttggtcaacgcgatagatcctccagcgctcccaacgtacacatcaatacaatcgagccggtaaacatagacgacctgataagggaccagggtttccgtggtgatgggggcagtaccaccggactaagtgcaacccctccagccagtctgcctgggtccctcacaaatgtcaaagcgctccaaaaatcccccggaccgcaacgggaacgcaagagcagttcttcctctgaggaccgcaacaggatgaagacccttgggcgtcgcgatagctctgatgattgggaaataccagacggccagattactgtaggtcaaaggataggatctgggtcctttgggaccgtatataagggaaaatggcatggtgacgttgcggtaaagatgcttaatgtgaccgcaccaaccccacagcagcttcaggcatttaaaaatgaggtaggcgttcttagaaagacaaggcatgtgaatatcctgctgttcatggggtatagtacgaaaccccagctggcaatcgttactcagtggtgcgagggttcgagcctgtaccatcacctgcacataatagaaactaaattcgaaatgattaaactgattgacatagcccggcagacagctcaggggatggattatctccacgctaagagcattatccacagagatctcaaatctaataatatctttctgcatgaggatctgacagttaaaattggagattttgggctagcaacagtgaagagccgatggtcagggagccatcagttcgagcagctgtctgggtctatactgtggatggccccagaggttattcgaatgcaggataagaacccatacagctttcaaagcgacgtttatgccttcggtatcgtcctgtacgaactcatgaccggacagctgccctattctaatattaataatcgggaccagattatcttcatggtgggcagaggatacctcagcccggatctgagcaaagttagatcgaattgccccaaggccatgaaaaggctaatggctgagtgcctgaagaaaaagcgggacgagcgtcccctgtttccccagattcttgcatcgatcgaactcctagcgagaagcctgcctaagatccatcgctctgcatctgagccaagtcttaatcgcgccggcttccagactgaagacttttcgctgtacgcctgtgcctccccaaaaactcctatacaggcgggaggttatggcgcgtttccggtccactag

SEQ ID NO: 26984 - DNA, 1947 bp, synthetic construct
  misc_feature 1..1947: note = Description of Artificial Sequence: Synthetic coding sequence
  source 1..1947: mol_type = other DNA
atggagcacatccagggcgcctggaagaccatcagcaacggcttcggcttcaaagatgcagttttcgatggaagtagctgcataagccctactatcgtgcagcagtttgggtaccagcggagggcctctgacgacggtaagctgacagacccctctaagacttccaacaccattagagtgtttctgccaaataagcagaggactgtcgttaatgtcaggaatgggatgtcactccatgattgccttatgaaggctctcaaagtcaggggactccagcctgagtgttgtgcggtattcagacttctccatgaacacaaagggaaaaaagccagacttgattggaatactgacgccgctagcttgatcggtgaggagcttcaggtggatttcctggatcatgtgccactcaccacgcacaactttgcccgaaagacattcctcaaactggcgttttgcgacatttgtcaaaaattcttgcttaatggattcaggtgccagacttgtgggtacaagtttcatgaacactgctccaccaaagttcccactatgtgtgttgactggtccaatatacgtcagctgctgctcttccccaactctaccataggggactctggggttccagctctcccctctttgacgatgaggcgaatgagggagtcagtttcaaggatgccggtgtcatcccaacacaggtatagcacgccccatgccttcaccttcaacacgagctccccatcctctgaaggatctctctctcaacgacagaggtccaccagtacacctaacgtgcacatggtgagcaccactctgcccgtggacagccgcatgatagaggacgccatcaggagtcattctgagagtgctagtccctccgccctcagttcaagccctaataatttgtcccctactggctggtctcagccaaaaacccccgttccagcccagagggagagggcccccgtgtccgggacccaggaaaagaacaagatccgccctcgcgggcaaagagattcctcttattactgggaaatcgaagcatctgaggtgatgttaagcacacggattgggagcggcagcttcggaaccgtttacaaagggaaatggcacggagacgtggctgttaagatccttaaagtggtggacccaaccccagaacaatttcaggctttcaggaatgaggtggctgttctcaggaaaactcgccacgtcaacatccttctctttatgggctatatgaccaaagacaacctggcaatcgtgacacagtggtgtgaaggtagttctctgtataagcacctgcatgtccaggaaactaaattccagatgttccaactcattgatatcgcaagacagactgcccaggggatggactatttgcatgcaaaaaatatcatccaccgagacatgaagtccaacaatatcttcctgcacgagggcctaaccgtgaagatcggtgatttcggcctggctaccgtgaagtcccgctggtctgggtctcaacaggtggagcaaccgacaggatcagtgctgtggatggctcccgaagtaatcaggatgcaagacaataatcctttctcgttccaatcagacgtgtacagttacgggatcgtgctgtatgaactcatgactggcgaactgccctattctcacatcaacaaccgcgatcaaatcatcttcatggtgggccgggggtatgcttcgcccgacctgtcaaagctgtacaagaactgtcctaaagcgatgaagagactggtcgctgactgcgtgaaaaaggtgaaggaagaacgcccactgtttcctcagattctgtcttcaatcgagcttttacagcactcccttcccaaaatcaacaggtctgcgagtgaaccaagtctgcatagagccgcccataccgaagatattaacgcctgtacactcaccaccagcccaaggctgcctgtgttctag

SEQ ID NO: 26985 - DNA, 2007 bp, synthetic construct
  misc_feature 1..2007: note = Description of Artificial Sequence: Synthetic coding sequence
  source 1..2007: mol_type = other DNA
atggagcacatccagggcgcctggaagaccatcagcaacggcttcgggttcaaggatgctgtctttgacggttcttcctgtatctcgccaacaatcgtgcagcaatttggctaccaaagacgggcctccgatgatgggaaattaaccgatccctcaaaaacatccaataccattcgggtgttcctgcctaacaagcagaggacagtcgtaaacgtacgcaacgggatgagcttgcacgactgcttaatgaaggcgcttaaggtccgcggactgcagcctgaatgttgcgctgtgttcaggctgttacatgagcataagggaaaaaaggcgcgcctggactggaacactgacgccgcttctctgatcggagaggaactgcaggttgattttctggatcacgtcccactcactacacacaattttgccaggaagacctttttgaagctggcgttttgtgatatctgccagaagtttctgttgaatggattcaggtgccagacttgtggctataagtttcatgagcactgctccaccaaggttccaaccatgtgcgtggactggtctaatattaggcagctcttactgtttcccaatagcaccataggcgactctggtgtgccagccttgccgagtctcactatgaggaggatgcgtgaatctgtttcccgaatgccagtatccagtcaacaccgatactccacaccccatgcttttacctttaatacctcatccccctcttcggaagggtctctttctcagaggcaacggtctacttccacacctaacgttcacatggtctcaactaccctgccagtggattcccggatgattgaaaacaataacctgagtgcttcacccagggcttggtctcgacgattttgcctgcgaggcagagatgcaataaggagccacagtgagagcgcatcacccagcgcactatcatcatcacccaacaatctctcgcccacaggctggtctcaaccgaaaacgcccgtgcctgcccagcgtgagagagctccagtaagcggcacacaggagaagaataaaattagaccacgcggccagcgcgatagttcatattattgggagatagaagcttctgaggtgatgcttagcacccgtattggcagtggctcgtttggtaccgtatataagggcaaatggcacggtgatgttgcggtgaagatcctcaaggtggtcgaccctacgcccgaacagtttcaggccttcagaaatgaggttgcagtgctcaggaaaacacgtcacgtaaatattttgctcttcatggggtacatgactaaagataatctcgccatcgtgacccagtggtgtgaagggagctcactctacaagcacttgcacgttcaagaaaccaagttccaaatgttccagctaatcgacattgcacgacagactgcgcaggggatggattatctccacgccaagaatattattcaccgtgatatgaagagcaacaacatttttctccacgaaggcctcacggtgaaaataggcgactttgggcttgcgacggtgaagagccggtggagcggtagccaacaggttgagcagccgactgggagcgtcctgtggatggccccagaagtcatccggatgcaggacaataaccctttctcatttcagtccgacgtttactcatacggcattgtgctgtatgaacttatgactggcgagttgccttatagccacattaataatcgggatcagatcatatttatggttggccgaggctacgcgtcacccgacttgtcaaagttgtataagaactgccctaaagcaatgaaacggttggtcgccgactgcgtcaagaaagttaaggaggagaggccactcttccctcaaatcctctcaagtattgagctgctgcagcactcactgcccaaaattaaccgcagcgctagcgagccgtccctgcatagagccgcgcatacagaggatattaatgcctgcactctgactacctcgccgagactgccggtcttctag

SEQ ID NO: 26986 - DNA, 1302 bp, synthetic construct
  misc_feature 1..1302: note = Description of Artificial Sequence: Synthetic coding sequence
  source 1..1302: mol_type = other DNA
atgtgcgtggactggagcaacatccggcagctgttcagccagcaccgttactctacgccccacgcatttacctttaacacatcaagccctagcagtgaagggagtctgtcccagcggcagcggtccactagtacgccgaacgtgcacatggtgtccacaaccctgcctgtggattccagaatgatagaggacgctattagaagccactccgaaagtgcttcaccttctgcccttagcagcagcccgaacaatctgagccccacgggttggagccagccgaagacaccggttcctgcccaacgcgaacgcgctcccgtttctgggactcaggagaagaacaagattcgcccacgtgggcagcgggacagctcttactattgggagatagaagctagcgaggtgatgctgtcaacccgcattggctccggctcattcgggacagtctacaagggaaaatggcatggagatgtggctgtaaaaattctgaaagtagtggacccaaccccagaacaattccaggcctttaggaacgaggtggctgtcctgaggaagactagacacgttaatatcctgctgtttatgggctatatgaccaaagacaacctcgccatcgtaacacagtggtgtgagggctcttcgctgtacaagcacctccatgtgcaggagacaaagttccagatgtttcaactcatcgacattgcccgacagaccgctcagggtatggattatttgcatgccaaaaatattatccaccgcgacatgaagagcaataatatctttctccacgaaggactgacagtgaaaattggcgacttcggccttgcaactgtcaagtctagatggagtggtagccagcaggttgagcagccaacgggcagtgtactgtggatggcgccagaagtgataagaatgcaagacaacaatcccttcagctttcagtcagatgtctactcttatgggattgtgttgtatgaactgatgacgggagagctgccctactctcacatcaacaaccgcgaccagatcattttcatggtgggccgtggttatgcatccccggatttatccaagctttataaaaattgcccaaaagctatgaagaggctcgtcgccgattgcgttaaaaaagtgaaagaagagcgtccactgtttccccagattctgtctagcattgagcttctccagcattcactgccgaaaataaatcgcagtgcttctgaacccagcctgcacagagccgcccatacagaggatatcaatgcatgtacgctcaccacctccccacggttgcccgtcttctag

SEQ ID NO: 26987 - DNA, 1704 bp, synthetic construct
  misc_feature 1..1704: note = Description of Artificial Sequence: Synthetic coding sequence
  source 1..1704: mol_type = other DNA
atgatggccaacagccagatcctgctgcggcaggccaccctgagcgtcttcagctgtcggacctccaaagaacagtgtaaaaaggctcggctggactggaacaccgacgctgcttctctgattggggaggagctgcaggtcgacttccttgaccacgtaccgttgaccactcataatttcgcgcgcaagactttccttaaacttgcattttgtgacatttgccaaaagttcctcctcaacggctttcgctgtcagacctgtgggtacaaattccacgaacactgctccacaaaggtccctaccatgtgtgtggattggagcaacattcgccagctgctactgttcccgaatagtacaattggagattctggagtgcccgccttgccctcgctgactatgcgccgcatgagggagtcagtaagtcgtatgcccgtttcatcgcagcacagatattcaacaccgcatgcttttactttcaacacctcctctccttcttctgaaggctcccttagccaacggcagcgcagcacatctacacctaatgtgcacatggtgagtaccacacttcctgtggatagtcgtatgatcgaggacgctattcgcagccacagcgagtcggcttcgccaagcgcactgtcctccagtcccaacaacttatccccgactggatggtcccaacctaaaactccagtgcctgcccaacgagagcgagcacccgtctcaggaacacaggagaagaataagatacgcccacgcggacaacgagattcctcatattactgggagatcgaggcaagcgaagttatgctgtcgacaagaattggatcaggaagttttggtaccgtgtataaaggaaaatggcatggagacgtggccgtgaagatcctgaaggtcgttgatcccaccccagagcaattccaggcctttaggaacgaggttgccgttctgaggaaaacaaggcatgtgaatattctcttgtttatgggctatatgaccaaagacaatctcgcaatcgttacccagtggtgcgaaggaagcagtttgtacaagcacttgcatgtgcaggagacaaagtttcagatgttccagctgatcgatattgcaaggcagacagcgcagggtatggattatttacatgcaaagaacataatccaccgggacatgaagagcaataatatttttctgcatgagggtttgaccgttaagattggagatttcgggttggccacggtaaaaagcaggtggagtggcagccaacaggtagaacagccaaccgggagcgttctgtggatggcccccgaagtcatcagaatgcaagacaataacccgttcagcttccaaagtgatgtgtactcttatggaattgtgttgtacgagctgatgactggcgagctcccctatagccacataaataatcgggaccaaataatcttcatggtggggaggggctatgcctccccagatctttctaaattgtacaaaaattgtccaaaagccatgaagcggctggtggcagactgcgttaagaaagtaaaagaggagcgcccccttttcccacagatcctctccagtatcgagctcctgcagcacagcctgcctaaaataaaccgcagcgctagcgaacctagcctgcatcgagccgctcacaccgaggacatcaacgcctgtaccttgaccacctctcccagactgcccgtcttctag

SEQ ID NO: 26988 - DNA, 1611 bp, synthetic construct
  misc_feature 1..1611: note = Description of Artificial Sequence: Synthetic coding sequence
  source 1..1611: mol_type = other DNA
atgggcagcaacaagagcaagcccaaggacgccagccagcggcggcgctctctcgagcccgccgaaaacgtgcacggcgctggtgggggtgcttttccggcctcacaaacccccagcaagccagcttccgcggacggacacagaggaccatcggctgccttcgctccggccgctgctgagcctaaactttttggcggcttcaactccagcgataccgtaacctcccctcagcgcgccgggccccttgcaggtggagttacaacctttgtggccttgtacgattatgagtcccgcaccgagacggacttatccttcaaaaaaggcgagcgcctgcagatagtgaacaatacagagggggactggtggcttgcccattcattgtctacaggccagacagggtacattccaagtaactacgtcgcaccctccgattctatacaggcagaagaatggtattttggaaagattacccggcgggagtcagagcgtctgctgctgaacgctgaaaaccctaggggcacattcttggtgcgggagtcagaaaccactaagggagcttattgcctgtccgttagcgactttgataatgcaaagggcctgaatgtcaaacattataagattagaaaactcgactccggggggttttacatcaccagtcgaacccagttcaattcgctccagcagctggtggcatactactctaaacatgctgatggcctgtgccacaggctgacgaccgtgtgccctacgagcaagccccagacacaggggctggcaaaggacgcttgggagataccccgcgagagcctgcggctggaggtgaaactgggccaaggctgcttcggagaggtgtggatgggaacatggaatggaacaacccgagttgcaatcaagaccctgaaaccgggaaccatgtcaccagaagcctttctgcaggaggcgcaagtgatgaaaaaactgaggcacgagaagctggtacagctgtacgctgtagtgtctgaagaacccatctacatagtcaccgaatacatgtccaaaggatcgctcctggatttcttgaagggcgaaaccggcaaatacctgcgcctgccgcagctggtcgacatggctgctcagatcgcttctggcatggcatacgtggaaagaatgaattatgtgcatcgagaccttcgggctgccaacatcttggtcggcgaaaatctggtgtgtaaagtggccgactttggtctggctcgcctgatcgaagacaatgagtataccgcccgccagggagccaagttccctatcaaatggacagctcccgaagcagcgctgtacggcaggtttactattaagagcgatgtgtggtcctttggaatacttctgacggaattgacaaccaaaggccgtgtcccatacccaggcatggtcaaccgcgaagtgcttgatcaggtcgagcggggttatcggatgccatgcccaccagagtgccccgagtctttgcacgacctgatgtgccaatgttggcgtaaggaaccagaagaaaggccgacattcgagtacctgcaggctttcctcgaagactactttacctcaaccgagcctcaatatcaaccaggcgagaacctttag

SEQ ID NO: 26989 - DNA, 1629 bp, synthetic construct
  misc_feature 1..1629: note = Description of Artificial Sequence: Synthetic coding sequence
  source 1..1629: mol_type = other DNA
atgggcagcaacaagagcaagcccaaggacgccagccagcggcggaggagtctggagcccgcagagaacgtccacggagccggagggggcgcattcccggcctcacaaactccatccaagcccgctagcgccgacggccaccgaggtccatcagccgcctttgcacccgctgctgcagaacccaaactgtttgggggatttaacagcagcgatacagttacatctcctcaacgggccgggccacttgccggcggagttactacgttcgtggctttgtacgattacgagtcacggacagaaaccgacctctcgttcaagaagggggagagactgcagatcgtgaataatacccggaaggtcgatgtgagagagggggattggtggttagcccattcactgtcgactggacaaaccggctatattcccagtaattatgtggcgccgagtgactctattcaggccgaggaatggtatttcggaaaaatcaccagaagagagtctgagagattattgttgaatgcggagaacccgagaggcacctttcttgtaagggagtccgagactacgaaaggtgcctactgccttagcgtgagtgacttcgataacgcaaaaggcctgaatgtcaagcactataaaattcgcaagcttgactcgggcggtttctatattacatccagaacgcaattcaattcgctccaacaactggtggcttattactctaagcacgctgacgggctctgccatagactcactactgtgtgccctacatccaagccacaaacccagggcctggccaaagacgcctgggaaataccaagggagagcctgcggctcgaggtgaaactagggcaggggtgtttcggcgaggtatggatgggcacatggaatggcaccacgcgcgtggccattaaaacgctcaagcctggtactatgtcgcctgaggcatttttgcaggaggcgcaggtcatgaagaaactacggcacgaaaagctggtgcagctgtatgccgtcgtctccgaggaacccatttatatcgtaactgagtacatgtccaagggttcactgctcgacttcctaaagggcgaaacgggcaagtacctgagactcccacaacttgtcgatatggccgcccagattgcttctggtatggcatatgtggagcgcatgaactatgttcatcgagatctgcgcgcagctaatatattagttggcgagaaccttgtgtgcaaagttgctgacttcggactcgcccggctaatagaagacaatgaatatactgctaggcaaggggctaaattccccattaaatggactgctccggaggccgccctctatgggagatttactattaagagcgacgtctggagctttggcatactcctgactgagctcacaacaaaggggcgagtcccatatcctggaatggtcaatcgtgaggttctggaccaagtggaacgcgggtaccgcatgccctgcccaccagaatgcccggaaagtcttcatgatttgatgtgtcagtgctggcgtaaagagcccgaagagcggcctacctttgaatacttacaggcttttctggaggattatttcacttccacagagccccagtaccaacctggtgagaatctttag

SEQ ID NO: 26990 - DNA, 1611 bp, synthetic construct
  misc_feature 1..1611: note = Description of Artificial Sequence: Synthetic coding sequence
  source 1..1611: mol_type = other DNA
atgggcagcaacaagagcaagcccaaggacgccagccagcggcggcggtcgctagaaccagcggagaacgtgcacggtgcaggaggaggcgccttccccgcctctcagactccctccaagccagcatctgctgacgggcatcggggaccgagtgctgctttcgccccggcggccgccgagccaaaactgttcggcggcttcaattcatcagacacggtgaccagcccacagcgggccggcccactggccggaggcgtgaccaccttcgttgcgctgtatgactacgaatctagaacagagaccgacctgagcttcaagaagggcgagagactacagatcgtaaataacaccgagggggactggtggcttgcccactccttgtccaccggccaaaccggatacataccctcaaactacgtggctccatctgactccattcaggcagaagagtggtatttcggaaaaatcactaggcgcgaatccgaacggttgctcctcaatgcagaaaacccccgcggcactttcctcgtgcgggaaagtgagacaacgaaaggcgcctattgcctcagtgtctcggactttgataatgctaagggtctaaacgtgaaacattataaaatccgcaaactcgactctggcggattctacatcacctcacgtacccaatttaattctcttcagcagctggttgcatactactccaagcatgccgatggtctgtgccaccgtctgactaccgtgtgtccaacgagcaaacctcagacacaagggctagccaaggatgcttgggagattccacgcgagtcccttagacttgaggttaagctgggacaagggtgcttcggcgaagtatggatggggacctggaacgggaccacacgagttgccatcaagacactaaagcctggaaccatgagtcctgaagcattcctgcaggaggctcaggtgatgaaaaaactgaggcatgaaaagctggtacagctgtacgcagtcgtaagcgaggagcctatctacatagtcactgaatatatgtcaaaggggagtttactggacttcctgaagggcgagaccgggaaatacctgagactaccgcagctcgtggatatggcggcccagatcgcttcagggatggcctacgtggagcggatgaactatgtgcatcgcgacctgcgggcggcaaatattttggtaggcgaaaatttggtgtgtaaggtggccgacttcggcctggctagactgattgaggacaatgaatacaccgcccgccagggcgctaagtttccaattaagtggactgctcccgaagccgctctctatggcagattcacaattaagagtgacgtgtggtcatttggtattctactgacagagctgacaaccaaaggccgcgtcccatacccaggcatggtcaacagggaggtactcgaccaggtggaaagaggatatcgcatgccatgtcctcctgagtgtcccgaaagtctccatgacctgatgtgtcaatgttggcggaaggagccagaggagaggcccacttttgagtacctgcaggcctttttggaggactactttacaagcactgagccgcaataccagcctggggagaacttgtag

SEQ ID NO: 26991 - DNA, 1611 bp, synthetic construct
  misc_feature 1..1611: note = Description of Artificial Sequence: Synthetic coding sequence
  source 1..1611: mol_type = other DNA
atgggcagcaacaagagcaagcccaaggacgccagccagcggcggcgctctcttgaacctgccgaaaacgtgcatggggccggaggcggggccttcccggcaagccagacaccctctaaaccagcatcagcggacgggcacagggggccatccgctgctttcgctcccgctgcagcagaacccaaactatttggcggctttaactcatccgacacagtgaccagtccgcagagagccggcccactcgccggaggcgtaactacattcgttgctctctatgactacgagtcaagaaccgaaacggacctgagtttcaaaaagggggagcgcttgcagatcgtgaacaacaccgagggcgattggtggctggcccacagcctgtcaacaggccaaacagggtacatccccagcaattatgtggccccttctgatagcattcaggccgaagagtggtatttcggcaaaatcactcgcagggagtcagaacgtctgctgcttaacgccgaaaatcctaggggaacatttctcgtaagggagtctgagaccactaaaggagcctattgtttgtccgtgtctgatttcgacaacgccaagggcctgaatgtgaaacactacaagatacgaaaactggactccggcgggttttacataacatccagaacccagttcaatagccttcagcagctcgttgcgtattactcgaaacatgctgatggcctgtgccaccgcttgacaaccgtctgtccaacctccaaaccccagacccaaggtctggcaaaagatgcttgggagattcctagggagtctctccggctggaggtgaagctcggccagggctgcttcggcgaagtgtggatgggcacctggaatggtaccacccgcgtagctatcaaaacattgaaacctggaacaatgtctcctgaggcttttctgcaggaagctcaggttatgaaaaaactgcgtcacgaaaaattggttcaattgtacgcagtcgtgtccgaagaacctatatatattgtgacagaatacatgagcaagggctcgctgctggattttctgaaaggggaaacagggaagtacctcagattaccccagcttgtcgacatggctgcccagatcgcctcaggaatggcttatgtggaaagaatgaactacgtgcacagggatctgcgggccgctaacatcctcgttggtgaaaacttggtctgtaaagttgctgactttggccttgctcgattgatagaagacaatgaatacactgcccggcaaggagctaaatttccaatcaaatggactgcacccgaggctgccttatacgggcgatttactattaagtcagacgtgtggagttttggaattttgctgacagaactgaccacaaaggggagggtaccataccccgggatggtgaatagggaagtcctggatcaggtagaacgaggatataggatgccttgccccccagagtgtccagagagtctgcatgacctaatgtgtcagtgctggaggaaagagcctgaggagcgcccaacttttgaatatctgcaagccttcctggaggactatttcacatctaccgaacctcagtatcaacccggggaaaatttgtag

SEQ ID NO: 26992 - DNA, 1611 bp, synthetic construct
  misc_feature 1..1611: note = Description of Artificial Sequence: Synthetic coding sequence
  source 1..1611: mol_type = other DNA
atgggcagcaacaagagcaagcccaaggacgccagccagcggcggaggagcctcgaacccgcagagaacgtgcacggcgctggaggcggtgcctttccagctagtcagacgccatccaagccagccagtgcggacgggcaccgggggccatctgctgcgtttgcacccgcagctgcggagcctaaactcttcggaggattcaactcctcagatactgtgaccagtccgcaaagagccgggcctcttgcaggtggcgtgaccacctttgtggcgctgtacgattacgagtcacggaccgagactgacttgtcttttaaaaagggcgaacgtctgcagatcgtgaataatacggaaggcgattggtggctagcacacagcctttctaccggacaaactggatacattccctccaactacgtggccccctctgatagcatacaggcggaggaatggtattttggcaagatcacacgcagggagtctgagcgccttctgctaaatgcggagaaccctcggggaacttttttagtgagggaatccgagactaccaaaggtgcctactgtctgagcgtgagtgactttgacaacgcaaagggactcaacgtcaagcactacaaaatccgaaagctagactctgggggcttctacataacaagccgcactcagtttaattcactgcaacagctcgtggcctattactccaagcacgcagacggtctttgccacagactgacaaccgtctgccccacttcaaagccacagacacaaggattggcaaaagatgcttgggaaattcccagagagagtcttcgactcgaggttaaactgggacaaggatgtttcggcgaggtttggatgggcacttggaatggcacaactcgggttgccatcaagaccttaaaacccggaaccatgtccccagaggccttcctccaggaggcccaggtgatgaagaagttaagacatgaaaagctcgtgcagttgtacgccgttgtcagcgaggagcccatttatatcgtaacggagtatatgtctaaggggtcacttttggattttcttaaaggagaaacaggcaaatacctaagattgccccaactggttgacatggccgcccagattgccagcggcatggcttacgtagaaagaatgaactacgtccatcgggatcttagggcggctaatatcttggttggcgaaaatttggtgtgtaaggtggctgatttcggtcttgctaggttgattgaggataacgaatacaccgccaggcagggcgctaagttccccatcaagtggaccgcacctgaagcagcattgtacggacggtttactataaagagcgatgtttggagcttcgggatcttactgacggagctgactacaaagggccgagtgccgtaccccggtatggtcaaccgcgaggtgctggatcaggtcgaacggggctaccgaatgccatgccctcctgaatgccctgagagtctgcatgatctgatgtgccaatgctggagaaaggaaccagaagagagaccaactttcgaatacttgcaggccttccttgaggattatttcactagtacagaaccgcagtaccaacccggggagaatctttag

SEQ ID NO: 26993 - DNA, 423 bp, synthetic construct
  misc_feature 1..423: note = Description of Artificial Sequence: Synthetic coding sequence
  source 1..423: mol_type = other DNA
atgcccctggtgaagcggaacatcgacccccggcacctgtgccacactgcactgccaagagggataaagaatgagctagaatgcgtgaccaacattagtcttgccaacatcattcgacagctgagttctctgagcaagtatgcagaggatattttcggagaactgtttaatgaggcccatagtttttcattccgagtgaattcccttcaggagagggtggatagattgtcagtgtccgttactcagcttgatcccaaggaggaggaactgagtcttcaggacatcacaatgcgcaaggcctttagaagcagtaccatccaggaccagcagctgttcgatcggaagacacttcccatcccccttcaagaaacctacgacgtctgcgagcagccgcccccattgaacatcctgaccccgtactag

SEQ ID NO: 26994 - DNA, 1680 bp, synthetic construct
  misc_feature 1..1680: note = Description of Artificial Sequence: Synthetic coding sequence
  source 1..1680: mol_type = other DNA
atgcccctggtgaagcggaacatcgacccccggcacctgtgccacaccgctttgccacgaggcattaagaacgaactggagtgcgtcacaaacattagtctggcaaacatcattaggcagctgagcagtctgtcaaaatacgccgaggatatattcggcgagctcttcaacgaggctcattctttttcatttagggtgaactcccttcaggagagagtggaccgcttaagcgtcagtgtcacgcaactggacccgaaggaagaggagctcagcctccaagatatcacaatgagaaaagcattcagatcgtccaccattcaagaccaacagctgtttgaccgcaaaactttacccataccactgcaagagacatacgatgtttgcgagcagcctccccctcttaatattctcactccgtaccgcgatgacggcaaggagggcttgaaattctacaccaacccctcatatttcttcgacctgtggaaggagaagatgttgcaggacacagaagataaaaggaaagaaaagcgcaagcaaaaacagaaaaacctggataggccacacgagcctgagaaagtgccccgcgctccgcacgacagacgaagagagtggcagaaacttgcccagggcccagagttggcggaggatgacgccaacttgctgcataagcacattgaggtggccaatggtcctgcctcacacttcgaaactagaccccagacttatgtggatcatatggacggctcctacagtcttagcgcattgccgttctctcagatgtctgagttgctgacaagggcggaggaaagggtgctggtgcgtcctcatgaacccccaccgccgccacccatgcacggtgccggagatgctaaacctatccctacttgtatcagctcagccactggattaatagagaatcgaccccaaagtcctgctaccgggagaacccctgtcttcgtgtctcctacccccccccccccccccccaccccttccttcagctttaagtaccagcagtctccgcgcctccatgacatccacaccccctccgcctgtacctcctcctccacccccccccgctaccgccctgcaggctcctgccgtcccccccccacccgctcctcttcaaattgccccgggcgtactacatccagctccacccccaatcgccccaccattggtgcagccaagccccccagtggctcgagctgccccagtgtgtgaaacagtcccagtgcatcccctgccccagggcgaggtgcaagggctgccaccccctccaccacctccacccttaccgccacctgggatccgtcctagcagcccagttacagtgaccgccctggctcacccgccatctggtctgcatcccacaccgagcaccgcccccgggccccatgttcccctgatgccacctagcccgccttctcaggtgatcccagccagtgagccaaagaggcacccttccactcttcccgtaatctcagacgcccgaagtgtgctgctggaggctataagaaagggtatccagttaagaaaagtggaagaacagagggagcaggaggcgaaacacgaacgcattgagaatgacgtagctaccatcttgtcgcgcaggatcgccgtcgagtatagtgacagcgaagatgatagtgagttcgacgaggtcgattggctggaatag

SEQ ID NO: 26995 - DNA, 423 bp, synthetic construct
  misc_feature 1..423: note = Description of Artificial Sequence: Synthetic coding sequence
  source 1..423: mol_type = other DNA
atgcccctggtgaagcggaacatcgacccccggcacctgtgccacactgcacttcctaggggaattaagaacgagctcgagtgcgttacaaacatctccctggctaatatcattaggcagttatctagcttgtcgaaatacgcagaggacatctttggcgagctgttcaacgaagcccatagcttcagctttcgtgtaaacagcctccaggagcgcgtcgacaggctgtctgtctctgtcactcagctagaccccaaagaagaggagctgagtctgcaggacattacaatgaggaaagcatttagatcttcaacaatacaagatcaacagctcttcgatcggaaaacactgccaattccactgcaggaaacatacgatgtttgtgagcagcccccaccgctcaacatactgacaccctattag

SEQ ID NO: 26996 - DNA, 1680 bp, synthetic construct
  misc_feature 1..1680: note = Description of Artificial Sequence: Synthetic coding sequence
  source 1..1680: mol_type = other DNA
atgcccctggtgaagcggaacatcgacccccggcacctgtgccacacagcactccctcgcggcatcaaaaacgaattagaatgcgtcaccaacatctccttagccaacatcattcgacagctgtcgtccctctctaagtatgcagaagacattttcggcgaactgtttaacgaggcgcattctttttccttcagggttaacagcctgcaggaacgcgttgaccgcctgtcggtctcagtcacccagttggatcccaaagaagaagagctgtctctacaggatataactatgcggaaggcatttcggtcgtcaaccatacaggaccaacagctgtttgatcggaaaacgctgccaattcccctgcaggagacctatgacgtttgtgaacagcccccaccactgaatatattaacaccttatcgtgatgatggtaaggagggcctgaaattttacaccaacccctcctacttcttcgatttgtggaaagagaagatgcttcaagacacagaggataagaggaaagagaaaaggaagcagaagcagaaaaacctggacagaccgcatgaacccgagaaggttcccagggccccacacgatcgccgcagggaatggcagaaactggcacagggcccagagttagccgaggatgatgcaaacttattgcataaacacatcgaagtggctaatggcccggcttcccacttcgaaacacgcccacagacatacgtggatcatatggatggttcctattctctcagcgccctgccgttctcccagatgtccgagctgctaactcgagctgaggaacgggttttagtgaggcctcatgagcctcctcctccaccgccaatgcatggcgccggagacgccaagccgatacccacatgcatttcttctgcaacaggcctcatagagaatcggccacaatctcccgccactggccggactccagtgttcgtatcacccacgcctccaccaccaccaccacccctgccttctgccttgtcaaccagtagcctgagggctagcatgacatctacgcctccgccgcccgtgcctcccccacccccccccccggctaccgccctgcaggccccggctgtgcctcccccccctgcacccttacagattgcaccaggcgtcctccacccagcacccccacccatagcaccccctctggttcagcctagcccacctgtggccagggccgctcctgtgtgtgagacagtcccagtccatcccttgccacagggagaggtgcagggactgccaccgcccccccccccccctcctttgccccctccagggatacggccaagcagccccgtcactgtgaccgcactggcccacccaccaagcgggttgcatcccactccatccactgccccgggccctcatgtaccactcatgccacctagcccaccaagccaggtgattcccgcttcggaacccaaacggcacccaagtaccctgccggtgatatcagatgctagaagtgtgctgctcgaggccatacgtaaggggatacagctgcgcaaggtcgaggaacaacgcgagcaagaggccaaacacgaaaggatcgagaatgacgtggcgaccatcttatcaaggaggattgctgtggaatattccgatagtgaggatgattctgagtttgacgaggtggattggctcgagtag

SEQ ID NO: 26997 - DNA, 1680 bp, synthetic construct
  misc_feature 1..1680: note = Description of Artificial Sequence: Synthetic coding sequence
  source 1..1680: mol_type = other DNA
atgcccctggtgaagcggaacatcgacccccggcacctgtgccacacggccctcccacggggcatcaagaacgaactagaatgtgtgacaaacataagtcttgccaatattattaggcagctcagctctcttagcaagtacgccgaggacatcttcggggaactctttaacgaggctcattccttcagcttccgggtgaacagtctgcaggagagagttgatcgactatccgtgagtgttacccagctcgaccctaaggaggaagagctatcactgcaggacataactatgcgcaaagcttttcggagtagtaccatccaggaccaacagctctttgatcgaaagactctcccaatcccacttcaggaaacgtacgacgtgtgcgaacagcctccgccattaaatatcctcacaccttatcgggacgacggtaaagagggtctgaagttctatactaatccctcctatttcttcgatctttggaaggaaaaaatgctgcaggacaccgaagataagcggaaggaaaaacgaaagcagaagcagaaaaacttggatcgcccccatgagcctgaaaaggtgcctagggccccccatgataggcgtcgggagtggcagaaactggcgcagggacccgaactggcggaagatgatgcgaatctgcttcataagcacatcgaagttgccaacggccctgccagtcactttgagaccaggccacagacttacgtcgatcacatggatggctcctatagcctctcggccctccctttctcccaaatgtctgagctcctgaccagggcagaagagcgggttctggttaggccccacgagcctccgccccccccgccgatgcacggcgccggagacgctaaaccgataccgacttgcatcagctctgctacagggctgattgaaaatagaccgcagtctccggcgactgggcgcacaccagtgttcgtgtcccctaccccacctccacctcctcctcccctaccttcagccctctctacctctagcctgcgcgctagcatgacaagcacccccccaccacccgtccctccgccgccccctcctccagctacggccctccaggcccccgccgtgcctcccccgccagcaccactccagatcgccccaggggttttacaccccgccccccctccaattgcaccacccctggttcagccaagcccacctgtggctcgagctgcccccgtttgcgagactgtcccagtgcatccccttccacagggagaggtgcaggggttgccgccacccccaccaccaccaccccttccgccaccagggattagaccctctagccctgtcacggtgacagccctggcacatccgccttccggccttcaccccacccccagtaccgcacccggaccacacgtgcccctcatgcctccgtctcctccatctcaagtcattcccgccagtgagcccaaacgacatcccagcactctgccagttatttcggacgcgaggtccgtcctgttagaggccatcagaaaaggcattcagctcaggaaggtggaagaacaaagggaacaagaagcaaaacacgagagaatcgaaaatgacgtcgccacaatcctctccagaagaatcgctgtggaatactccgattctgaagatgattcagaatttgacgaagttgattggctggagtag

SEQ ID NO: 26998 - DNA, 1680 bp, synthetic construct
  misc_feature 1..1680: note = Description of Artificial Sequence: Synthetic coding sequence
  source 1..1680: mol_type = other DNA
atgcccctggtgaagcggaacatcgacccccggcacctgtgccacaccgctcttcccagagggatcaagaatgaactggagtgtgtcacaaatatatctctcgccaacatcattcgccaactatccagcctgagtaagtatgccgaggacattttcggggagctatttaacgaagcacacagcttcagcttcagggtgaattccctgcaggagcgggttgaccgtttgtccgtcagcgtgactcaacttgatcctaaggaggaagagctgagcctgcaggatatcaccatgagaaaggcattccgctcctctacaattcaggaccagcaactattcgacaggaaaaccctccctatccctctccaggagacttacgacgtttgcgagcagccaccgccactgaacatccttaccccataccgcgacgacgggaaggaagggttaaagttctatactaatcctagctacttctttgacctatggaaagagaagatgttacaagatacagaagacaagcgcaaggaaaagcgcaagcaaaagcaaaagaacctggataggccgcacgaaccagaaaaggtgcctagggcccctcacgacaggagacgggagtggcagaaactggcccagggacccgaactggctgaggacgatgcgaatctgctgcacaagcatattgaggtggctaatgggcctgcttctcatttcgaaactcgaccccagacgtacgtggatcatatggacggcagctatagcctctcagcgttgcctttttcccagatgtccgagttgctgacccgcgcggaggaacgcgtgttggtgcgaccccatgagcccccccctccgcctccgatgcacggcgctggggacgcaaagcccatccctacttgtatcagcagcgctaccgggcttatcgagaaccggcctcagtccccagcaacggggaggactccagtcttcgttagtcccaccccccctccaccacctcctccactgccgagcgcactgagcacgtcatctctgcgggcctccatgacctctaccccacctcccccggtcccgccccctccacccccccctgcaactgcgcttcaggcacctgcagtgcctccacccccggccccacttcaaatagcgcccggtgtgcttcatcctgcaccacctcccatcgccccaccccttgtacaaccaagtcctcctgtggctagggcagcgcctgtatgcgaaaccgtgcctgtccacccactcccccagggagaggtacagggcctgccaccaccccctccgccaccccccctgcccccaccaggaattcgcccttccagtcctgtcaccgttacagcactcgcccatcctccgagcggactgcatccaaccccctcaacagcccctgggccacacgttcccttgatgcctccgtctcccccctctcaggtcatcccggcttctgagccgaagcgacaccctagcacattgcctgtaatctcggacgctcgcagtgtgttgctagaggccatcaggaagggaattcagcttcgcaaagtggaggagcaaagggagcaggaagctaaacacgagaggatcgagaatgatgtggctacaattctttccagacgcatcgcggtagaatacagcgactctgaggacgacagtgagtttgacgaggtggactggctggaatag

SEQ ID NO: 26999 - DNA, 1680 bp, synthetic construct
  misc_feature 1..1680: note = Description of Artificial Sequence: Synthetic coding sequence
  source 1..1680: mol_type = other DNA
atgcccctggtgaagcggaacatcgacccccggcacctgtgccacaccgccctgccgcgaggaattaaaaacgagctcgaatgcgtgacaaatatttctttggccaacataattagacagttgtccagtctgtctaagtacgcagaggatatcttcggagaactgttcaacgaggcgcactcttttagtttcagagttaatagcctccaagaacgcgtggatcgactctcagtgtctgtaactcagcttgaccccaaggaagaggaactatctctgcaggacatcacgatgcgcaaggccttcaggtctagtactatccaggatcagcagttattcgatcggaaaaccttacccattcctctgcaggaaacatatgacgtttgcgagcagcctccgccacttaacatcctcaccccttatagagacgacggaaaggaagggttaaagttttacactaacccatcctacttctttgacctatggaaggaaaagatgttacaagacaccgaggacaagcggaaggaaaaacggaaacagaaacaaaaaaatttagacagaccacatgaacccgaaaaagtgccgcgcgccccccacgatcgcaggcgcgagtggcagaagttagcccagggacctgaactcgccgaggacgacgctaacttattacacaaacatattgaggtcgccaacgggcctgctagccacttcgaaaccagaccacagacatacgtagatcacatggatggctcatatagcttatccgcattgcctttctcccagatgagcgagctgttaacaagagccgaagagcgggttctggtgcgcccacacgaacccccccctcctcctcctatgcatggagctggagacgccaagccaatcccaacttgtatcagctctgctactggcctcattgagaacaggccacagtcaccagctactgggcgcacccctgtattcgtctccccgacacctcccccgcccccgcctcctctcccgtctgccctctcaacatccagtctgagagccagcatgacatctacaccccctccgcccgtcccgcccccaccacctccccccgcgactgccttgcaggccccagctgtgccgcctccaccagctcctctgcagatcgccccaggcgtgctccatccagccccccctcctattgcaccaccgctcgttcagccgtcccctcccgtggctagggcagccccagtctgtgagacggtacctgtgcacccactccctcagggcgaagtccaaggcctgccgccgcctccaccaccgccccccctaccacctcctggcattagaccctcctccccagtaactgtcactgccctcgcgcacccacccagtggcctccaccccactccctccactgccccaggcccacatgtgccgttaatgcctccctcacctccttcccaggtgattcctgcctcagaaccaaagcggcacccatctacactccccgtcatctcagatgcccgatctgttctgctggaggcaatcaggaagggaatccaactacgtaaggtagaagagcagcgggaacaggaggccaaacacgagcgcattgagaatgacgtggcaactattctgtcccgcaggattgcggtggaatatagcgactcagaggatgactccgagtttgatgaggtcgactggctggaatag

SEQ ID NO: 27000 - DNA, 270 bp, synthetic construct
  misc_feature 1..270: note = Description of Artificial Sequence: Synthetic coding sequence
  source 1..270: mol_type = other DNA
atgcccctggtgaagcggaacatcgacccccggcacctgtgccacacggccctgccacgagggatcaaaaacgagctggagtgcgtgacaaacatatcactcgcgaacatcatccggcagctgagtagcctgtccaaatacgctgaggacatcttcggcgaattgttcaatgaagcccactcattttctttcagggtgaactccctccaggagcgcgtggacaggctgtccgtgtctgttacacaacttgatcctaaagaagaagaatag

SEQ ID NO: 27001 - DNA, 543 bp, synthetic construct
  misc_feature 1..543: note = Description of Artificial Sequence: Synthetic coding sequence
  source 1..543: mol_type = other DNA
atgcccctggtgaagcggaacatcgacccccggcacctgtgccacacggccctgccccgcggtatcaagaatgaactggagtgtgtgaccaacatctccctggctaacatcattagacagctctcctccctctccaaatatgcggaggacatttttggggagctgttcaatgaagcacactctttctcctttcgcgtaaattctttgcaggagagagtcgaccggctttccgtgtcagtaacacagcttgatccaaaggaggaagagctgagcctgcaggacatcacgatgagaaaagcttttcgtagctctactatacaagaccaacaactattcgatcggaagacactacccattcccctacaggagacatacgacgtgtgtgagcagccgcctcccctgaacattcttaccccatacagagacgacgggaaagagggactgaagttttacactaacccatcctatttctttgacctgtggaaggagaaaatgttacaagacacagaggataagagaaaagagaaacggaaacaaaagtag

SEQ ID NO: 27002 - DNA, 270 bp, synthetic construct
  misc_feature 1..270: note = Description of Artificial Sequence: Synthetic coding sequence
  source 1..270: mol_type = other DNA
atgcccctggtgaagcggaacatcgacccccggcacctgtgccacacagctctaccccgagggattaaaaatgaattagagtgcgtgaccaacatctccctcgccaatattataaggcagttgtctagtctcagtaaatacgctgaagacatcttcggggagctgtttaatgaggcccatagctttagctttcgcgttaacagcctccaggagagagtagatcgactgagtgtgtctgttacgcagttggaccccaaggaggaggaatag

SEQ ID NO: 27003 - DNA, 1497 bp, synthetic construct
  misc_feature 1..1497: note = Description of Artificial Sequence: Synthetic coding sequence
  source 1..1497: mol_type = other DNA
atgcccctggtgacccggaacatcgagccccggcacctgtgccggcagaccctcccaagtgtaaggtctgagctggagtgtgtgactaacatcacgctagcaaatgttatcaggcaactgggcagcttatcgaagtacgctgaggatattttcggcgaacttttcacccaggccaataccttcgcctcacgggtgtcaagcctcgccgaacgggttgatcgccttcaggtcaaagtgacccaactggatcccaaagaggaagaggtaagccttcaggggatcaacacccgcaaagcctttcgcagctctactattcaggatcagaagttattcgatcgaaactcactgcctgtcccggtgcttgaaacatataatacctgtgacacccctccgccccttaataatttaaccccataccgggacgacgggaaagaagctctaaagttttataccgatccttcctatttctttgacctttggaaagagaaaatgcttcaggatacaaaagacattatgaaggaaaagaggaaacaccggaaagagaaaaaagataatcccaaccggggcaatgtaaatcctcgcaaaatcaagacgaggaaggaggaatgggagaagatgaaaatgggacaggaattcgtagagtccaaggagaagttagggacctctggataccctcccacgcttgtgtatcagaacggctctatcggctgcgtggagaacgtggacgcttcttcatatccaccacccccacagtccgacagtgcatctagcccctccccatcctttagcgaggacaacctgccccccccccctgccgagttctcatatcctgtggataatcaacgcggcagcggcttggccgggcccaaaagatcttccgtcgtgtctcccagccacccaccaccggcaccgcctctgggatctccacctggacccaaaccgggtttcgcccccccacccgcacctccaccccctcccccgcctatgataggcatacccccccccccacctcccgttggttttgggtcacccggaacccctcccccgccttcccctccgtccttccccccccaccccgatttcgccgctcctccaccgcccccaccacctccagcagctgactaccctacactgccccctccaccgctcagccagcccactggtggggcaccacccccaccaccccctccgccccctccaggtccgcctcctcctccgttcacaggcgcagacgggcagccagccatccccccgcccctgtccgacacaaccaagcctaaatcgtccttgcccgctgttagcgacgccaggtctgatctgctgagcgccatacgtcaggggtttcagttgcgccgggtggaagagcagcgcgaacaggagaagagggacgtggtcggaaatgacgtggctaccatcctgagcaggcgcatcgctgtggagtattctgattctgaagatgacagttccgagtttgacgaggatgattggtcggattag

SEQ ID NO: 27004 - DNA, 846 bp, synthetic construct
  misc_feature 1..846: note = Description of Artificial Sequence: Synthetic coding sequence
  source 1..846: mol_type = other DNA
atgcccctggtgacccggaacatcgagccccggcacctgtgccggcagacacttccttcagtgcggagcgaattggagtgcgtaaccaatattactctcgccaatgttatcagacagcttgggagcctgtctaagtacgctgaggacatcttcggtgagcttttcacacaggctaacacattcgctagtagagtgtcctccctcgccgagagggtagatcggctccaggtcaaggttacccagttggatcccaaagaagaggaagtgtcccttcagggtatcaacacccgaaaggcgttccgcagctccacaatacaagaccagaaactgttcgaccggaattccctgcccgtgcccgtgcttgaaacctataatacttgcgatacaccaccgccactaaacaatctcactccatacagagatgacggcaaggaagccctgaaattttacaccgatccttcatatttcttcgatctttggaaggagaaaatgctgcaggatacaaaggatattatgaaggaaaaaagaaagcacagaaaagagaagaaggacaatccaaatcgtgggaatgtcaatccaagaaagattaaaacccgcaaggaagaatgggaaaagatgaaaatgggccaggaattcgtagaaagcaaagaaaaactgggcacctccggctaccctcctaccctcgtgtatcagaatgggagtatagggtgcgttgagaacgtagatgcctcttcctacccaccacctccacagtccgattctgccagctcaccgtctccaagtttcagtgaggacaacctacccccaccgcccgcggagtttagattcagtgcagcgcagggctag

SEQ ID NO: 27005 - DNA, 1533 bp, synthetic construct
  misc_feature 1..1533: note = Description of Artificial Sequence: Synthetic coding sequence
  source 1..1533: mol_type = other DNA
atgcccgtgccccccccccccgcccccccccccccccccaccttcgccttggcgaacacagagaagcctacactgaacaagaccgagcaagcaggccggaatgccttactgtctgatatatccaagggcaagaagcttaagaagacagtgactaatgaccgtagcgcacctattttggataaacccaaaggggccggtgcagggggaggcggcgggggcttcgggggcggaggtggtttcggcgggggcggtgggggtggcggaggtgggagtttcggcggcggcggccccccaggcctgggggggctttttcaggcaggcatgcctaaacttcgctcaactgcaaatcgggacaacgattcagggggctcgcggcccccgcttctcccccccggtgggcgcagcacctccgctaagccctttagtcctccatcgggcccgggccgcttccccgtgccctcacctggtcataggtctgggccaccagagccccagaggaataggatgcctcctccccgaccagacgtgggcagcaagccagattctattccgcctcctgttccgagcacacccagaccaattcagtcctcccctcacaacagaggttcacctccggtgcctggcggaccacgacagccctctccaggcccgactccccctcccttcccagggaatagagggactgccttaggggggggttctataagacagtctccccttagctcctcaagccctttcagcaaccgacctcccctgccccctacacctagtagggccctggacgacaagccacctcctcctcccccacccgtgggaaatcggccttccattcatagggaggcggtaccaccccctcctcctcaaaacaacaagccacctgtaccaagtacaccaagaccttcagccagctctcaggccccaccaccgcctcccccaccttcacgccccgggccccctccgctgcccccttcctctagtggaaacgatgagaccccaagattaccacagaggaatcttagtcttagctcatcaacccctcccctcccctcccctggcagatctgggccactgccaccccctccatctgagagacctcctccccccgtcagagaccctcccggccgctccggcccgctgccccctccacctcctgtgtctagaaacggaagcaccagccgcgcactacccgctaccccgcagctgcccagtcggtccggggttgattcccccagaagcggcccccgtcccccactaccgcccgaccggcctagcgctggcgcaccccccccaccaccaccgtcaaccagcatcagaaacggatttcaggattctccatgcgaggatgaatgggaaagtaggttttattttcaccccatatctgaccttcctccccccgaaccctatgtacagactactaagagttacccaagtaaattagcccggaacgagagcagaagtggtagcaaccgaagagagcgcggagcaccgccactcccccccataccacgacccccaaagcaggcagctgagtag

SEQ ID NO: 27006 - DNA, 1512 bp, synthetic construct
  misc_feature 1..1512: note = Description of Artificial Sequence: Synthetic coding sequence
  source 1..1512: mol_type = other DNA
atgcccgtgccccccccccccgcccccccccccccccccaccttcgcactagccaatactgagaagccgactctcaacaaaacagagcaggccggacggaatgctctcctgagcgacatttccaaagggaagaagctgaaaaagactgtaactaacgaccgctcagcccccattcttgataagccaaaaggcgccggcgcaggaggaggggggggaggattcggcgggggaggcggcttcggagggggcggcggggggggcggcggcggatcgttcggcggtggggggccgcccggtcttggggggctgttccaggccggcatgcctaagctgcgaagcactgccaatagagataatgactcaggcggaagtcgacccccattgctaccacctggcggaagatcgacaagtgcaaagcccttctccccaccctctggcccaggaaggttccctgtgccctcacccgggcatcggtcaggtcctcctgagccgcagcgtaaccggatgcccccaccacgtccagacgtcggatcaaagcccgacagtatccccccgcccgtgcccagtaccccgagacccatacagtccagtccgcacaatcggggctcacctcccgtgcccggtggtccacgccagccgagccctggcccgacccccccgccatttccaggcaatcgcggaacagcactcgggggaggaagcattcggcaaagcccactgagtagctctagcccattttccaatcgccctccgctgccccctaccccatctcgcgctctggacgataaacctccaccccctccacccccggtcggaaaccgaccctctatccatcgggaagcggtacctcccccacctccacagaataacaagccccccgtgccttccacaccaaggccaagtgcatcaagccaagcaccacctccacctccacctccttcccgacctggtccacccccgctaccaccatccagtagcgggaacgatgagaccccacggctgcctcaacggaatctgtctctgagcagctcaacacccccacttcctagtccaggtaggagtggacccctaccccctcctcctagcgagagacctcccccaccagtgcgggatccacctggcaggagtgggcctctgccacccccccccccagtgagccgaaacggctctacttcacgcgcattgccggctacaccccaactcccctctcggagcggggtggatagcccgagaagtggtccacggcccccactccctcctgacagaccatctgccggagccccacccccgcccccccccagcacaagcattagaaatgggttccaggattccccttgcgaggatgagtgggagtcacgtttttacttccaccctatttccgacctgcctccacctgagccctatgtccagaccacaaagagctaccctagtaagcttgccaggaatgagagtaggtccggctctaatcgcagagaacgcggggctccccccctcccaccgatccctaggtag

SEQ ID NO: 27007 - DNA, 1512 bp, synthetic construct
  misc_feature 1..1512: note = Description of Artificial Sequence: Synthetic coding sequence
  source 1..1512: mol_type = other DNA
atgcccgtgccccccccccccgcccccccccccccccccaccttcgctttggcaaacaccgaaaaaccaaccttaaataagactgaacaagctggtcgaaatgcactgttaagcgatatttctaaaggaaagaagctgaagaagactgtgactaatgaccgctccgccccaatacttgataaacctaagggtgcaggcgcaggcggaggcggtgggggatttggcggcgggggcggattcggcggaggcggtgggggcggaggcgggggctccttcggcggagggggcccgcctggcttgggaggactattccaagcgggcatgcccaagctaaggtcaacagcaaaccgtgataacgatagtggcggtagcagaccaccactgctccctcctggtggacggtcaacctccgccaagccattcagtcccccctccggccccggccgatttcccgtccccagccctggccatcgatcaggacctccggaacctcagaggaaccgaatgccacctcctcggcctgatgttgggagcaaacctgactccattcccccccctgtgccatccactccacgcccaatccagtccagcccgcacaatcggggatcacctcccgtgccgggcgggccccgccagcctagccctgggccaaccccccccccctttcctggcaatagaggcacagctttaggaggtggaagtattaggcagtcgcccctgagtagctccagtccatttagtaaccgcccacctctgccccccaccccgtcccgggccttagatgacaaaccccctcctccacctcccccagtagggaaccggccgtctatacatagggaggcggtccctccgcctccacctcagaataacaaacctccggtgcccagtacccctaggccttctgcctccagtcaggctcctccacccccaccaccacctagccgaccagggccacctccactaccaccatctagttcaggaaatgacgagacaccccgacttcctcagcggaacctttcactgtcctcctctaccccccccctgcccagccccgggcgtagtggccctctgcctccacctccctccgagcgacctcctccacccgtgagggatcctcctggtcgcagtggacccctacctccccctcccccggtttctcgcaatggttccaccagtcgcgcgctgccagccaccccccagctgcccagccgaagcggcgtggattctccaaggagcggacctcgaccacccctgcccccggaccgtccaagcgccggagccccgcctccaccaccaccttccacttccatccgaaatggattccaggactcaccctgcgaagacgagtgggaatcccgcttctatttccaccccatatcagatctgccgccccctgagccctacgtccagacaacaaagagctacccctctaagttagcacgcaatgaatctagaagcggctccaatcggagggaacgcggggcccctccattgccaccaatcccacgttag

SEQ ID NO: 27008 - DNA, 1512 bp, synthetic construct
  misc_feature 1..1512: note = Description of Artificial Sequence: Synthetic coding sequence
  source 1..1512: mol_type = other DNA
atgcccgtgccccccccccccgcccccccccccccccccaccttcgcacttgctaatactgagaaaccaacactgaacaaaacagaacaggcaggaagaaacgcgctcctatccgatatatccaaagggaaaaagctaaagaagacggttaccaatgatcgctccgcgcccatactcgacaagcctaaaggagctggagcgggcggaggaggaggtgggtttggggggggaggggggtttgggggcggtggcggcggcggtgggggtggcagttttggtggggggggcccacctggactgggcggactgtttcaggcgggcatgccgaaattacgctctaccgctaaccgagacaatgacagcggaggctctagaccgcctctgctccctcccgggggcaggtccacatcagccaagccattttctccgccaagtggacccggacgatttcccgtaccgtctccaggccaccgctcaggaccccccgaaccccagcgtaacaggatgccccctccccgccccgacgttggctctaaacctgacagtataccacctcctgtaccatccacccccagacctatccaatcgtctcctcataataggggcagtcctcctgtccctggcggtccacgacaaccttcacccggtcctacaccccccccgtttccagggaaccggggaaccgcactgggtggtgggtctattagacagtccccactgtcatccagctctccctttagcaataggccccctctgccccccactccaagccgcgcccttgacgataagccacctcctccaccgccgccagtggggaaccgacccagtattcaccgcgaggcagtaccaccccctcccccccagaataataagccccccgtgccgagcacaccacgtccaagcgcaagctctcaggccccccctcctcccccgccaccttccaggcccggaccacctcccctgcctcctagctcgagcgggaatgatgaaaccccgcgactcccccaaaggaacctgtccttatccagcagcacccctccactccccagtccaggccgctccggcccattaccacctcctccaagcgagcgaccccctccaccagtccgtgacccccccggcagaagcggccctcttccccctcctccacccgtgagccgtaatggttccacgagccgagcccttccagcaacaccacagctcccaagccggtcaggcgttgactcacctagatcaggaccgcgcccccctctgcctccagaccggccctcagcaggcgcaccccctcccccacccccctccacaagcatcaggaatggattccaggattctccctgcgaggatgaatgggagtctcgcttctacttccatcctatcagcgatttgccacctccagagccctacgttcaaacaactaagtcttaccccagtaagctggcgaggaacgaaagccgctccggctccaaccggagagagcgcggagcccctccactcccccccattcccaggtag

SEQ ID NO: 27009 - DNA, 1080 bp, synthetic construct
  misc_feature 1..1080: note = Description of Artificial Sequence: Synthetic coding sequence
  source 1..1080: mol_type = other DNA
atgcccgtgccccccccccccgcccccccccccccccccaccttcgccctggcgaataccgagaagcctacactgaacaaaacagagcaggccggacgcaatgcattactctcggatatatcaaagggtaagaagttgaagaaaaccgttacaaacgaccgcagcgcgcctattctggacaaaccaaaaggggctggcgctggtggtggcggcgggggcttcgggggtggtggcggatttggtggcggcgggggcggtggaggcgggggcagtttcgggggggggggccctcctgggttgggtggactgttccaggctggaatgccgaagctgcgcagcactgcaaaccgcgataacgacagtgggggttcacgacctccgctgctgcctcccggaggccgctcaacaagtgcaaagccattcagccctcccagcggacctggaaggttccccgtgcctagtcctggacatcggtccgggccacccgagccacagaggaaccgaatgccacccccacgtcccgacgtggggagtaagcctgattccattcctccacccgtcccaagcactccaagacccatccagtcttccccacataatagaggctcccctcccgtccctggcggcccacgccagccaagcccaggcccaactccgccacctcctcccccagtacgcgatcccccagggcgtagcggccccctgccaccaccacctcccgtgagccggaatggcagcacctcaagggcccttcccgctacccctcaactgccctcaaggagcggagtcgattcccctcgttctggcccaagaccacccttgcctcccgaccggccatctgccggagctcctcctccacctcccccaagtacgtccatcagaaacggattccaggattccccatgcgaggacgagtgggaatcacgtttttactttcatcctatctccgaccttccacctcccgagccatatgtccaaaccaccaaaagttatccaagcaaacttgctcgaaacgagagtcggagcggatcaaatagacgggagagaggagctcctccattgccccctatcccccgctag

SEQ ID NO: 27010 - DNA, 1482 bp, synthetic construct
  misc_feature 1..1482: note = Description of Artificial Sequence: Synthetic coding sequence
  source 1..1482: mol_type = other DNA
atgcccgtgccccccccccccgcccccccccccccccccaccttcgctctggccaatacagaaaaaccaaccctaaataaaaccgagcaagccggccgcaacgccctccttagtgacatttccaagggcaagaaactgaagaaaacagtgaccaatgaccgcagtgccccaattctggacaagccgaagggagcgggcgccggagggggaggagggggcttcggtggagggggagggttcggcggcggaggagggggggggggcggaggaagcttcggcggtggcgggccccccgggcttggtggactctttcaggccggcatgccaaaactccggtcgaccgcgaacagggacaacgattctggaggatccaggccaccgctattgcccccgggcggacgttcaacttcggctaagccgtttagtccaccttccggccctggacgattccccgttccgtcgccgggccataggagtggacctccagagccacagaggaataggatgcctcctcctaggcctgacgtgggctcgaagcctgacagcataccccccccagtgcccagtaccccccgccccattcagagttctccccacaaccgggggagcccaccagttccgggaggacccagacagccatcgcccgggccaacaccgccgccttttcctgggaaccgcggcaccgccctgggaggtggctccattaggcagtcccccctgagctcttcctcccctttcagcaaccgcccgccgctgcctccgaccccttctcgagcattagatgacaagcccccacccccgcctcctccggtgggaaaccggccttccatccaccgggaagccgttcccccccctcctcctcagaacaataaaccacccgtgccaagtacccctaggccgtcagcatcgtcacaggccccacctccacctccgcctccgtcccggcctgggcctccccccctgcctcccagcagttcaggaaatgacgaaaccccccgtttaccacagcgcaacctcagcctcagctcatcaaccccccccctgcccagccctggaagatcggggccacttccacctcctccatctgagaggcctccaccacctgtgcgcgatccccccggcagatcagggcctctgccccccccaccacctgttagtagaaacgggtccacctcacgcgccctcccagctacaccccagctgccgagccgatcaggcgttgattctccacgtagcggtcctagacctccattgccgcccgataggcccagcgccggcgctccgccccctcctcctccttcgacatcgatccgaaacggctttcaggatagcccatgcgaggatgagtgggaaagtagattctactttcacccaatatcagacctgccccctccagagccctacgttcaaactaccaagtcgtatccaagcaagctggccaggaacgagtctaggagcgaatacttctgccaaggcttttag

SEQ ID NO: 27011 - DNA, 303 bp, synthetic construct
  misc_feature 1..303: note = Description of Artificial Sequence: Synthetic coding sequence
  source 1..303: mol_type = other DNA
atgcccgtgccccccccccccgcccccccccccccccccaccttcgctctggcaaatactgagaagccaactctgaacaagactgagcaagctggccggaatgcactcctgtctgacatcagcaaaggaaaaaaactcaagaagaccgtaacaaacgaccgtagcgcccctatcctcgacaagccgaaaggtgctggggccgggggcggcggcggcggatttggggggggtggcggctttggcgggggcgggggcggcggcggcggtggatcctttggggggggggggccaccaggcctgtag

SEQ ID NO: 27012 - DNA, 1647 bp, synthetic construct
  misc_feature 1..1647: note = Description of Artificial Sequence: Synthetic coding sequence
  source 1..1647: mol_type = other DNA
atgaagaccctggagacccagcccctggcccccgactgctgcccctccgaccaggacccggctccggcccatcctagcccccatgcgagccccatgaacaagaatgccgacagtgaactgatgccgccaccccccgagcggggtgaccctccacggctgtcccctgatcccgtggctgggtccgccgtctcccaggaactgcgtgagggcgatcctgtttctctgtcgacacctctggagaccgaatttggctcaccgagcgagttatcgcccagaatcgaagaacaagaactctccgaaaatacgagtctacccgccgaagaggccaacggttccctttctgaggaggaggctaatgggccagagctgggtagtggaaaggctatggaggatacttctggcgaaccggctgcagaagatgagggcgacaccgcctggaattacagtttcagtcagctcccgcgatttctgtccggctcttggagtgagttctcaacacagcctgagaactttctgaaaggctgtaaatgggcaccagacggctcctgtatcctgaccaattctgccgataacatcctgaggatctacaatcttccacccgagctttatcatgagggggaacaggtggaatacgccgaaatggtaccagtgttacggatggttgagggggatacgatatacgattattgttggtactccctgatgtcatctgcccaaccagacacctcttacgtggcctcaagctcaagggagaaccctatccacatctgggacgcctttaccggcgagttacgggcgtcattcagggcctacaaccatctcgacgagttaacagccgcccactctctgtgtttttctccagatggttcacagttgttttgtggcttcaataggaccgtcagagtgttctctaccgcacggccagggagagactgtgaagtgcgcgccacctttgcaaagaagcagggccagtctggcatcatcagctgcatcgctttcagcccggcccagccactttatgcatgtggttcatacggccgcagcctaggattgtacgcctgggacgatggttcccctcttgcacttctggggggacatcaaggggggataacccacctctgttttcatcctgatggcaatcgctttttttccggagccagaaaggatgctgagctgctttgctgggacttacgacagtccggataccccctctggagcctgggtcgggaggttacaactaaccagcgaatttactttgacctggaccccactggtcagttcctggtgtctggtagtacgtcaggagccgtgagcgtgtgggataccgacgggcctggaaatgatggcaaaccagagcccgtgctgagcttcttgcctcagaaagactgcacgaatggggtgtctttgcacccgtcgcttccgctgttagccactgcctccgggcagcgggtcttcccagaacccaccgagtccggcgacgagggagaggaactggggctcccgcttctcagcaccagacacgtgcacctcgaatgtcgcctccagctgtggtggtgcgggggagctcccgactcgtcaatccccgacgatcaccagggggagaagggccagggtggaactgagggtggtgtgggggagctgatatag

SEQ ID NO: 27013 - DNA, 1647 bp, synthetic construct
  misc_feature 1..1647: note = Description of Artificial Sequence: Synthetic coding sequence
  source 1..1647: mol_type = other DNA
atgaagaccctggagacccagcccctggcccccgactgctgcccctccgatcaggatcctgcacccgcccacccctcacctcacgcctcaccaatgaataaaaacgctgactctgagctcatgccacctccccctgagagaggcgacccacctagattgagtccagatccagtggccggatctgcagtttcgcaggaactgcgtgagggggaccctgtgagtctctccacgcctttggaaaccgaattcggatccccatcagaattaagcccaagaattgaggaacaggagctgagcgagaatacatccctgccagcagaggaggcgaacggttccctgagtgaagaagaagcgaacggaccagagcttggctccggcaaggcgatggaggacacctcaggggagccggccgcagaagacgaaggcgataccgcttggaattactcattctcacagctgcctaggttcctgtccgggtcttggagcgaattcagcactcagcccgaaaattttctgaaaggttgtaagtgggcgcctgacggctcctgtattctgaccaactctgcagataacatactgcgaatttacaacctgcctcccgaactttaccacgagggcgaacaggtcgagtatgcagaaatggtcccagtgcttcgaatggtggagggagacaccatctacgattattgctggtactccctcatgtccagcgctcaacccgatacaagctacgtggctagtagcagtagggagaaccccatccatatatgggacgcattcacaggcgagctgcgagcttctttccgtgcttacaaccacctagatgagttaacagccgcacactccttgtgcttttctccagatggctcacagctcttttgcggctttaatcggacagtccgggtttttagcaccgcccgcccggggcgggattgcgaggtgcgagcaacctttgccaagaaacagggccagtctgggattatttcgtgtatagccttcagtcctgcccagcctctctatgcttgtggaagttatggacgttctctgggtctttacgcatgggacgatggcagtccacttgctctcctgggaggccaccagggaggaattacgcatctgtgctttcaccccgacggcaaccgtttcttcagtggagccagaaaggatgccgagctactgtgctgggatctgagacagtccggctacccactgtggtctttggggagggaagtcaccacaaaccagcgaatctatttcgatctggatcccacaggacagttcttagtgtctggcagcacatctggggctgtgtcagtgtgggataccgacgggcccgggaatgatggcaaacccgagcccgtcctgtcatttttgccccagaaagactgcaccaacggggtatcgttgcacccctctttgcctttgctggctactgcaagcgggcagagagtcttcccagaaccaactgaatcaggcgacgagggcgaagaattgggattgccactgctgagcactagacacgtgcatctggagtgcagacttcagctgtggtggtgtggaggggcacctgattcatccatcccagatgaccaccagggagagaaaggtcagggcggcactgaaggcggcgtgggcgagcttatttag

SEQ ID NO: 27014 - DNA, 1647 bp, synthetic construct
  misc_feature 1..1647: note = Description of Artificial Sequence: Synthetic coding sequence
  source 1..1647: mol_type = other DNA
atgaagaccctggagacccagcccctggcccccgactgctgcccctctgaccaagacccggcacccgcccatcctagcccgcatgcttctccaatgaacaaaaatgctgacagcgagctaatgcctcccccaccggagcgaggcgatccgcccagactaagtcccgacccagtggccggcagcgccgtgagtcaagaattacgcgagggtgaccctgtgagtctgtctacaccactggaaaccgagtttggaagcccctctgaactgtcccctaggatagaggagcaggaactctcggagaacaccagtctgcccgctgaggaagcaaacggctctctctcagaggaagaagctaatggaccggagttgggttcgggcaaagccatggaggatacctccggtgaacccgccgccgaggatgagggagatacagcctggaattattcattttcccaactgcctaggttcctgtctgggagttggtccgaattctctacacagccagagaactttcttaagggctgcaagtgggcgcctgatggtagctgcatccttaccaacagcgccgataacatactgcgcatctataacctgccaccagagctgtaccatgagggtgagcaagtcgagtatgcggagatggtaccagttctgagaatggtggaaggcgataccatttatgattattgttggtactccttgatgtcttctgcccaaccagatacgtcgtacgtagctagttcgagcagggaaaaccctatccatatttgggacgcattcactggcgaattaagagccagctttagagcgtataatcacctcgatgaactgacagcagctcatagtctctgtttttcaccggacggatctcagctgttctgcgggttcaatagaaccgtgcgagtttttagcactgctcgaccagggcgggactgcgaggtgcgcgccacctttgctaagaagcaagggcagtcaggcattatctcttgcatcgcattttcgcctgcccagcctctttacgcatgtggtagctacggacgcagtctgggcctgtatgcctgggatgacggctcgcctctggctttgcttggcggccatcagggaggcatcacccatctgtgcttccatccggacggcaaccggtttttcagcggcgctagaaaggatgcagaactgctgtgttgggacctgcgacagtctgggtaccctctgtggtctttaggtagggaggttacaacaaaccagcgcatatattttgacctggatcccactggacagttcttagtgtctggaagcactagcggcgcagtgagtgtgtgggacactgatggacctggcaacgatggaaaacccgagccagtgctgtcgtttttgcctcagaaagattgtaccaacggagtgtcattgcaccctagtctgcctctccttgccacagccagtggtcagcgagtgttccccgagcccacggaatccggagacgaaggagaagaactcgggttgcctctcttatccactagacatgtccatcttgagtgtcgcctacagctgtggtggtgtggcggcgcaccagacagctccattcccgatgaccaccagggagaaaaaggccagggcggcactgaagggggggtcggagagttaatttag

SEQ ID NO: 27015 - DNA, 567 bp, synthetic construct
  misc_feature 1..567: note = Description of Artificial Sequence: Synthetic coding sequence
  source 1..567: mol_type = other DNA
atgaagaccctggagacccagcccctggcccccgactgctgcccctcggaccaggacccagctcctgctcagcccgatacatcctatgtcgcctcaagctcgcgagagaaccctattcatatctgggatgcctttactggcgagctccgtgcgagctttagggcctataatcacctcgatgagctcactgcggcacatagcttatgcttcagtccagacggctcccaactcttctgcggcttcaatcggaccgtgcgcgtgttttccacggctagacctgggcgcgactgtgaggtccgggctacttttgggaagcatctttgtctgcaggggagaaggcgggggaagggcaccgccacatgtaccggggccttctgcgagcccggcgctacctgcggtggctcccgcagaccactctacggtccgggaagcagatgttctcccgtgggccgcggcgcaaatcgtctgagggccggacgcaagccctcacaggggcagcccgcgggccaacggaccgcgagcttcttgaactcataccccgttagttgcggtgcttttggactgtag

SEQ ID NO: 27016 - DNA, 1647 bp, synthetic construct
  misc_feature 1..1647: note = Description of Artificial Sequence: Synthetic coding sequence
  source 1..1647: mol_type = other DNA
atgaagaccctggagacccagcccctggcccccgactgctgcccctccgaccaggatccagcccccgcccacccctctccccatgcatctccaatgaacaaaaacgcagatagtgagttgatgccccctcctccggagaggggcgacccaccccgcctatctcctgaccctgtcgcaggttcagccgtttcgcaagaactccgagagggtgatcccgtcagtctctcaacgccgctggagactgagtttggaagcccttcagaactgtcaccaaggatcgaggagcaggagctttccgaaaatacgagcctacctgccgaggaagcaaacggatcacttagcgaggaggaggccaatggacctgagctgggttctggcaaagcaatggaagacactagcggggagcccgccgccgaggacgagggggacacggcttggaactactcattttcacagctgcctcgtttcttgtcggggtcctggtccgagttcagtacgcagcctgagaattttctgaaggggtgcaaatgggctcccgacggctcatgcatcctgacaaattctgccgacaatattctgaggatctacaacttgcctccagaattataccacgagggcgaacaggtggagtacgccgaaatggtccccgtgctccgaatggtggagggagatacaatctacgattattgttggtactctctgatgtctagcgcccagcccgacacttcctatgtggccagctcctcgcgggaaaacccaattcacatatgggacgctttcaccggggaacttagggcctccttcagagcctataatcacttagatgagctcactgccgcacactccctctgcttcagtcctgacgggagtcagctcttctgcggcttcaaccgaaccgttagggtgttcagtaccgcacggccaggaagagactgtgaagtgagagcaacattcgcaaagaaacaagggcagagtggtatcatcagctgtattgcctttagtcccgcacagcctctgtacgcctgcgggagctacgggaggagtttaggtctgtacgcctgggatgacggcagtccacttgctctgctggggggacatcaggggggaatcacccacttgtgcttccaccctgacggaaacagatttttttcgggggcacgtaaggatgccgagttgttatgttgggacttacggcaaagcgggtatcctctgtggtctctcggaagagaggtgaccactaatcaaaggatttatttcgatctggacccaacagggcaattcctggtcagcgggagtacttccggtgcggtgtccgtctgggacaccgatggccctggaaatgatggaaaaccagagcctgtcctgtccttcctgccacaaaaagactgcacaaacggggtctccctccatccaagcctgcctttgttggctacagcatctggacagcgcgtctttccagagccaaccgagtccggcgatgaaggagaggaactcgggttacctctgctgtccactcgccacgtccatctagagtgccggctgcagctgtggtggtgtgggggagcacccgatagttccatcccggacgaccatcagggggaaaagggacaaggcggtaccgaaggtggcgtcggtgagctaatctag

SEQ ID NO: 27017 - DNA, 1299 bp, synthetic construct
  misc_feature 1..1299: note = Description of Artificial Sequence: Synthetic coding sequence
  source 1..1299: mol_type = other DNA
atggacaccgagaagagcggcaagcgggagttcgacgtgcggcagactccccaggtgaacattaatccttttacgccagatagcttgttgttgcacagctctggccagtgtcggcggagaaagcgaacctattggaatgacagctgtggagaagatatggaggccagcgactacgaactggaagacgaaacccggccagctaaacgcattacaattaccgaatctaatatgaaatctaggtatactactgaattccacgagctcgagaagatagggagcggcgagtttggctctgtgttcaagtgcgtgaagcgcctggacggatgtatatatgccatcaagagatcaaagaaacctctggcgggatctgtcgacgaacagaatgctctgagagaagtttacgcccatgccgtcctcggccagcattcccatgtagtaaggtatttctccgcctgggccgaggatgatcacatgctcattcaaaacgaatattgtaatggcggctcgctggctgacgcgatttccgagaattatcggattatgtcctacttcaaggaagccgagctgaaggacctgctgctgcaagtcggccgcggcctgcgttatatccactccatgagcctggttcacatggatattaagcctagtaatatcttcatcagcaggaccagtatcccaaacgcagcctccgaggagggtgatgaagacgattgggcctccaataaagttatgttcaagattggagatttgggacatgtcaccagaatctcctcaccccaggttgaagagggggatagcagattccttgcaaatgaggtgctgcaggaaaattacactcacctccctaaggccgacattttcgcactggctctgactgtagtttgcgccgccggggccgaacccctgcccaggaacggggatcagtggcacgagattcgccagggaaggctgcccagaattccgcaagttctctctcaagaattcactgagctcctcaaggtcatgatacatcccgatccagagcgtaggccgtcagctatggcactggtgaaacacagtgtactcctgtctgctagcagaaagagtgcagagcagctccgaatcgaactgaacgccgaaaaattcaagaactctctcttgcaaaaagagctaaagaaagcccagatggcaaaagccgccgccgaggagcgtgctctattcacagacagaatggctacacggtcaaccacacagtctaacagaacgagcaggctgatcggcaagaaaatgaatagatcagtatcactcactatctactag

SEQ ID NO: 27018 - DNA, 1941 bp, synthetic construct
  misc_feature 1..1941: note = Description of Artificial Sequence: Synthetic coding sequence
  source 1..1941: mol_type = other DNA
atgagcttcctgagccggcagcagcccccccccccccggcgggccggggctgcttgtaccctgcgccagaagctgattttttcaccatgttcagactgtgaggaagaggaggaggaggaggaagaggagggttcgggacacagcacgggcgaagatagcgccttccaggaacccgactccccgcttccgcccgctagatcacctaccgaacccgggcctgagcggaggaggtctcctggtccagcacccggaagcccgggagagttagaggaggatttgctcctgcctggagcatgtcccggagcagacgaggctggaggtggcgccgagggagacagttgggaggaggagggatttggatcctcgtccccagtcaaaagcccagccgctccttacttcctgggctcctcttttagtcctgttcgctgtggaggccctggggatgcaagcccgagaggttgtggcgctagacgagcaggtgaaggcaggaggtcacctaggcccgatcatcccggaacacctccgcataaaacgttccgcaagctacgtctttttgacacaccacacacccccaaaagtttgctgtcaaaagcaaggggaattgacagctcaagcgtaaagttgcggggatcgtcactgttcatggataccgaaaagtccggtaaacgggaatttgacgtcagacaaacgcctcaggtaaatattaatcctttcacccctgattctctgctgctgcatagctctggccaatgccggaggcgcaaacggacttactggaacgattcgtgtggcgaggacatggaagcatccgactacgagctagaggacgaaactcgcccagccaaacgcattaccatcacagagagcaatatgaagtccaggtatacgaccgagtttcacgagctcgaaaagatcggttccggagagttcggcagcgtgtttaagtgcgtgaaaaggttggacggctgtatctatgccatcaaaaggagcaagaaaccccttgccgggtccgttgacgaacagaatgcactgcgcgaagtctatgctcacgcagttctggggcaacatagccatgtggttagatatttctccgcatgggcagaggatgatcatatgcttatccagaacgaatattgtaatggaggtagcttggcagacgcaatcagcgagaactacaggatcatgtcctacttcaaggaagccgagctgaaagaccttctcctgcaggttggacggggcctgaggtatatccatagcatgtcacttgtacatatggacataaagcccagtaatatatttatcagccggacatccatccctaacgcagcatccgaggaaggagacgaagacgattgggccagcaacaaggtgatgtttaagattggcgacctgggtcatgtcacaaggatttcttcaccacaggtcgaggaaggggacagtcggttcctcgcaaacgaggtgctgcaggagaattatacacacctgcctaaggctgatattttcgcactcgctttgaccgtggtttgtgcagctggcgcagagcctctcccgagaaacggggatcagtggcacgagatccggcagggaagactcccccgcatacctcaagtgctcagtcaggagtttactgagcttttgaaagtgatgatccacccggatcccgagcggcgccctagtgccatggccctcgtgaaacattccgtcctgctgtcagcttcgagaaagtccgctgagcagctaagaattgaactcaacgctgaaaagttcaagaattccctgctacagaaggagctgaagaaggcacagatggctaaggccgccgcagaagaaagggcactattcactgatcgcatggccactcgttccacgacccagagcaacagaaccagccgcttaatcggtaagaagatgaatcgatctgtgagcttgactatttactag

SEQ ID NO: 27019 - DNA, 1554 bp, synthetic construct
  misc_feature 1..1554: note = Description of Artificial Sequence: Synthetic coding sequence
  source 1..1554: mol_type = other DNA
ctgcaggaccccgccagcacctgcgtgcccgagcccgccagccagcacaccttacgcagcggccccggctgcctccaacagccagaacagcagggcgtacgcgacccggggggtatatgggcaaagctgggtgctgcagaggcgtccgcagagcgcctgcagggtcggagaagccgaggcgcctccgggtctgaaccccagcagatgggttcagacgtgcgagatctgaacgctctactgcctgccgtccccagtttgggtgggggcggggggtgcgcattacctgttagcggcgcggcacagtgggcacctgtgctggactttgccccccccggcgcctccgcatacggctccctaggcggcccagccccacccccagcccctcctccccccccacctcccccgccccacagtttcataaagcaggagcccagttgggggggtgcagaaccacatgaagagcagtgcctctcagcgttcactgttcacttctcaggtcagttcacaggtacagcgggcgcctgccggtacggcccattcggcccccccccgccatcccaggcctcatcagggcaggctcggatgttcccgaatgctccatatctgccttcctgtctggaatcccagcccgcaattagaaatcagggatattccacagtgacgtttgacggtactccatcttatgggcatactccttcacaccatgcggcccagttccctaaccacagtttcaaacacgaggacccaatgggccagcagggaagcctcggggagcagcagtacagcgtccctcccccagtctacggctgccatactcccaccgacagttgtacaggatcacaggccttgctgctcagaacaccatatagctcagataatctttatcagatgacatcccagctggagtgcatgacttggaatcagatgaacctgggagcgactcttaagggagtcgctgccggcagcagtagctctgtgaaatggacagaaggccagagcaaccacagtaccggttacgaaagcgataaccacacaacacccatcctgtgtggggctcagtaccggattcacacgcacggagtgtttcgaggtatacaggacgtacggcgcgtgccgggtgtggctccgaccctggttaggagcgcatctgaaacttcagaaaagagaccgtttatgtgcgcctatcctggatgcaataagcggtattttaagttgtcgcacctgcaaatgcactctcgtaagcacaccggcgaaaagccttatcagtgcgattttaaggactgcgagcgtcgcttctcacgaagcgaccagctgaagagacatcagagaagacacacgggtgtgaagcctttccagtgcaaaacatgtcaacgcaaattttctcgtagtgaccatctcaagacccatacccgcacacacacaggaaaaacctctgagaagccgttttcctgtagatggccttcgtgtcaaaagaagtttgcgcggagcgatgaactggtgaggcaccacaacatgcaccagcggaatatgacaaagctccagctggccctctag

SEQ ID NO: 27020 - DNA, 954 bp, synthetic construct
  misc_feature 1..954: note = Description of Artificial Sequence: Synthetic coding sequence
  source 1..954: mol_type = other DNA
ctgcaggaccccgccagcacctgcgtgcccgagcccgccagccagcacacattaaggtcaggtcccggttgcctgcaacagcccgagcagcaaggcgtgagggaccccggcggcatctgggccaaactgggagcagccgaggccagtgcagagagattacagggccgaagatctcgcggagcttctggatccgagccacagcagatggggagtgacgtgcgggatttgaatgcactcctccccgccgtgccctcattgggggggggaggaggctgcgcactgcctgtcagcggagccgcccagtgggccccagtgttagatttcgccccgccaggagcgtcggcatacggttccttgggtggtccagcccctcccccagccccgcccccacccccacctccacctccacactctttcataaagcaagagccctcgtggggtggcgcagaaccccacgaagaacaatgtcttagtgcatttactgtccactttagcgggcagtttaccggtactgctggagcctgtcggtatggaccatttgggccacctccaccaagccaggcatcctccggacaggcccgtatgtttcctaatgcaccttatttgcccagctgcctggagagccagcctgccatcagaaatcaggggtatagcaccgtgacctttgacggcactccaagttatggccatacgccctcccaccatgccgctcagttccccaaccattccttcaagcacgaggacccaatgggccagcagggttctctgggggagcagcagtactccgttcctccacctgtctacgggtgccatacgccgacggactcatgtaccgggtctcaggcattgctgctccggactccttatagctccgacaatctgtaccagatgacaagccagttggaatgcatgacgtggaaccagatgaatcttggggccaccctgaagggctag

SEQ ID NO: 27021 - DNA, 909 bp, synthetic construct
  misc_feature 1..909: note = Description of Artificial Sequence: Synthetic coding sequence
  source 1..909: mol_type = other DNA
atggagaagggctacagcaccgtgaccttcgacggcacccccagctacgggcacacaccctcacatcatgctgctcaattccccaatcactcattcaaacacgaagatcccatgggtcagcaggggtcattaggagaacagcagtatagtgttcccccgcccgtttacgggtgtcacaccccaaccgattcatgtacgggctctcaggccttgttacttcggaccccttattctagtgataacttgtaccaaatgacctcccagcttgagtgtatgacgtggaatcagatgaacttgggcgccaccctgaagggggtggcggcaggttcttctagctctgtgaagtggaccgaggggcagtctaaccattctacgggctatgaatccgataaccacactacacccatcctgtgcggagctcagtatcggatacacacacatggggtttttcggggaatccaagatgtgcgacgcgtgccgggggtggcccctaccctggtgcggtcagcttccgaaacttccgagaagcgccctttcatgtgcgcctaccccggttgcaacaaacggtacttcaagctgtctcatttgcagatgcatagtcgcaaacataccggagaaaaaccatatcagtgcgacttcaaagactgcgaacgcagattcagccgctctgatcagctgaagcgacatcagaggagacataccggcgtcaaaccctttcagtgcaaaacatgccaaaggaaattcagtcgctcagatcaccttaagactcacacccggacacacaccggagaaaaaccattctcatgcagatggccaagctgccagaagaagtttgctcggagcgacgaacttgttaggcaccacaacatgcaccagcgtaacatgactaagcttcagctagccctctag

SEQ ID NO: 27022 - DNA, 1545 bp, synthetic construct
  misc_feature 1..1545: note = Description of Artificial Sequence: Synthetic coding sequence
  source 1..1545: mol_type = other DNA
ctgcaggaccccgccagcacctgcgtgcccgagcccgccagccagcatacacttcgtagcggaccgggatgtttacagcagcctgagcagcagggcgtaagagacccaggcggaatatgggctaagttaggcgctgcggaagcctcagcagagagactccagggccggaggagtcggggtgccagtgggtccgagccccagcaaatgggctccgatgtgcgggatctgaacgccttactcccagccgtgccttccctcggcgggggcggcggttgcgcattaccagtgtccggggcagcccaatgggcgcccgttttggacttcgcgcctccgggagccagcgcttatgggtccctaggcggcccagcccccccccccgccccaccaccacctcccccccctccaccccactctttcataaagcaagagcccagctggggtggcgccgagccccacgaggaacagtgtttaagcgccttcaccgtacattttagcggccagttcacaggtacggcaggagcctgtcgctacggaccctttggtccccctcctcctagtcaggcctcctcagggcaagctcggatgtttcccaatgctccatacctgccctcttgtctagaatcccagccggccattagaaaccagggctattctactgttacctttgacggcactccatcatatggccacaccccctcacaccatgccgcccagttcccaaatcacagttttaaacatgaagatcctatggggcaacaggggtcgttgggagaacagcagtactcagttccaccccccgtgtatgggtgtcacacccccacagacagttgcactggatcccaggccctgctcctcaggaccccatacagctccgacaatctttaccagatgacctcccagctcgagtgcatgacttggaatcagatgaacctcggagccacgttgaagggtgtggctgctggctcctcttcctcagtcaagtggacagaagggcagtccaaccactcaaccgggtatgaaagcgataatcatacaaccccgatcctatgcggcgcacagtaccgcatccacacccatggcgtattccgaggtattcaagatgtccgacgcgtccctggtgtagcaccaactctggtgcggagcgctagcgagacttctgaaaaaagaccattcatgtgtgcctatcctgggtgcaacaagaggtactttaaattatctcatctgcagatgcacagtcggaagcacacaggcgaaaagccctatcaatgtgacttcaaggactgtgaaagaaggtttagcagaagcgatcagctcaagagacatcagcgccggcataccggagtaaagccttttcagtgtaaaacctgtcagaggaagtttagtcgcagtgaccatttaaagacacacacaaggacacacacaggtgaaaaacctttctcttgccggtggccaagttgccagaagaagtttgcccgcagtgacgagctagtccgccaccataatatgcatcaacgcaacatgaccaaactgcagctggctttgtag

SEQ ID NO: 27023 - DNA, 1494 bp, synthetic construct
  misc_feature 1..1494: note = Description of Artificial Sequence: Synthetic coding sequence
  source 1..1494: mol_type = other DNA
ctgcaggaccccgccagcacctgcgtgcccgagcccgccagccagcatacgctccggagcgggccaggctgtcttcagcaaccggaacagcagggggtgcgcgatccggggggtatctgggctaagctcggggctgctgaggcctccgcagagaggttacagggcaggcgatcccgtggggcgtctggctctgaaccccagcagatggggagcgacgtgcgcgacctgaatgcactcttacccgctgtgccttcccttggaggcggcggtggttgcgcgttacccgtttcgggcgccgctcagtgggcgccagtattagactttgcccctcccggagcctcggcgtatggctccttaggagggcctgccccccctccagccccccccccgccacctccacctcccccacactcctttatcaagcaggaaccctcctggggtggtgcagagccacatgaagagcagtgtctctctgcctttacagtgcatttcagcggccagttcacaggaacagcaggggcttgccgctacgggccctttggaccaccacccccatcccaagcaagttcaggtcaggcccgcatgtttccaaacgccccctacctgccaagttgtctggaatcccagcccgcgatcagaaaccaaggatattctactgtgactttcgatggcaccccatcctacggtcatactccgagccaccacgccgcccagtttcctaaccactcctttaaacacgaagacccaatgggtcagcagggctcgctaggcgagcagcagtactcagttcctcccccggtttacggctgtcatacgccaactgattcctgtaccggttcccaggctctcctgttgcgcaccccttactctagcgataatttgtatcaaatgacatcgcaactcgagtgcatgacctggaaccagatgaacctgggcgctacactgaaaggacattctactggttacgagtcagataaccataccacgccaatcctgtgtggcgcgcagtatagaattcatacccatggcgtgttcagagggatccaagacgtacgccgcgttcctggtgtggccccaactttagtcagatcagctagtgagactagcgagaaacggccctttatgtgcgcctaccctgggtgtaataagcgctacttcaagttgagccacctgcagatgcattcaagaaaacacacaggcgagaagccttaccagtgtgattttaaagattgtgaacgccgctttagcaggagcgatcagctgaaacgccatcagcggagacatacaggggtcaagccatttcagtgtaagacatgccagcggaaattctcacgaagtgatcacctgaagacacacacgaggacccacacaggcgagaagcctttttcgtgtaggtggccgtcctgtcagaaaaagtttgctagatcagacgagcttgtgcgtcaccacaatatgcaccagcggaacatgaccaaattgcagctggccctgtag

SEQ ID NO: 27024 - DNA, 396 bp, synthetic construct
  misc_feature 1..396: note = Description of Artificial Sequence: Synthetic coding sequence
  source 1..396: mol_type = other DNA
atgggccagcagggcagcctgggcgagcagcagtacagcgtgcccccgcctgtctacgggtgccacacacccaccgatagctgcaccggaagccaggccctcctcttgaggacaccttatagtagcgataacctctaccagatgacaagtcaactggaatgcatgacctggaatcagatgaacctgggggccacattgaaaggcgttgccgctggttcctccagctcagtcaaatggacagaagggcagagcaaccatagcacaggttatgagtcagacaaccatacaacgcctattctttgtggggcccaatacaggattcatacacacggggtgttcaggggaattcaggacgtccggagggtgcctggcgtggcccccacactggtaagatag

SEQ ID NO: 27025 - DNA, 537 bp, synthetic construct
  misc_feature 1..537: note = Description of Artificial Sequence: Synthetic coding sequence
  source 1..537: mol_type = other DNA
tgactgggcgccaccctgaagggcgtggccgccggcagcagcagctctgtcaagtggactgaagggcagagcaatcactcaaccggctatgaaagcgataatcatacaacaccgatcctttgcggggcccagtaccgtatacacacacatggcgtctttcgcggaatccaagatgtgaggagagtgccgggggttgccccaactctagtgcgtagcgcttctgaaaccagcgagaaacggccattcatgtgcgcatatcccggatgtaataagagatactttaaactcagccatctgcaaatgcattcccgtaaacataccggcgttaaacctttccaatgtaagacttgccagcggaagtttagtcggtcagaccacctgaagacccatactaggacacatacaggaaaaaccagtgaaaaacctttctcctgtcggtggcccagctgccagaaaaaattcgctcggtcagacgaactagtacgacaccataacatgcaccaaagaaatatgactaaactgcaattagctctgtag

SEQ ID NO: 27026 - DNA, 867 bp, synthetic construct
  misc_feature 1..867: note = Description of Artificial Sequence: Synthetic coding sequence
  source 1..867: mol_type = other DNA
atggagaagggctacagcaccgtgaccttcgacggcacccccagctacgggcatacaccctcacaccacgccgcgcagtttcctaatcattcttttaagcatgaagatccaatgggacagcagggaagcctgggggaacagcaatactcagtccctcctcctgtgtatggctgccacactcccactgatagttgcacagggtctcaggctctgctcctgagaacgccatattcctcggacaacctatatcagatgaccagccagctcgagtgcatgacttggaaccagatgaacctgggtgccaccctcaagggacactccaccgggtacgagagcgataaccatacgacgccaattctgtgtggagcgcagtacaggattcacacacatggggttttccgcgggattcaggatgtcagacgagtgcctggtgtggctcctacactggtgcggtctgcttcagagacaagtgaaaagcgccccttcatgtgtgcttatccaggctgtaataagagatacttcaaacttagccatctgcagatgcactctcgaaagcacaccggggaaaagccctaccagtgtgatttcaaggactgcgagcgccgcttctctcgatccgaccagctgaaaagacaccagagacgccacactggtgtcaagccttttcagtgcaagacatgccaacgcaagttcagccggtcagatcacctgaaaacacatacaagaacgcatactggtaaaaccagtgaaaaaccgtttagctgtaggtggccttcctgccaaaaaaagtttgccagatcagatgagctggtaagacatcacaatatgcatcagcgcaacatgaccaaactccagctggccctttag

SEQ ID NO: 27027 - DNA, 1065 bp, synthetic construct
  misc_feature 1..1065: note = Description of Artificial Sequence: Synthetic coding sequence
  source 1..1065: mol_type = other DNA
atgcgggcccggccccaggtgtgcgaggccctgctgttcgccctggcactccagacaggtgtgtgctacgggatcaagtggctggcactgtctaaaaccccatctgcactcgcactgaatcagacccagcattgcaaacaactggaggggctggtgtcggcacaggtccagctgtgtaggtctaatctcgagctgatgcataccgtggtgcacgccgctagggaggtcatgaaggcctgccgacgggcgttcgcagacatgcgctggaattgttcctcaatcgagcttgccccgaattacttactagatttggagcggggcacccgggagagcgcttttgtatatgccctgtccgccgcagctattagccacgctatcgccagggcttgtaccagcggggacctgccggggtgttcttgcggccctgttcctggagagccccctggcccgggtaataggtggggagggtgcgctgataacttgtcttatggtctgctgatgggggctaaattctctgatgctccaatgaaggtcaagaagactggctcacaagctaacaaactgatgagactccacaatagcgaggtgggaaggcaggcactacgggcgagcctggagatgaaatgtaaatgtcatggcgttagcggatcatgctctatccgaacgtgctggaaaggactccaagaactccaagacgtcgctgccgatctaaaaacacggtatctgtcagccactaaggtggtgcacaggcccatgggaacccgcaagcacctggttcctaaggatctcgatatccggccagtgaaagactcggagcttgtttaccttcagtcatctcccgatttctgtatgaaaaacgaaaaggtcggaagccacgggacccaggacaggcagtgcaacaaaactagtaatggcagcgactcctgtgacctgatgtgttgtgggagaggctataatccctatactgatcgggttgttgaacggtgccactgtaagtaccactggtgttgctacgtgacctgccggcgttgtgaaaggacagtggagagatacgtgtgcaaatag

SEQ ID NO: 27028 - DNA, 762 bp, synthetic construct
  misc_feature 1..762: note = Description of Artificial Sequence: Synthetic coding sequence
  source 1..762: mol_type = other DNA
atgcgggcccggccccaggtgtgcgaggccctgctgttcgccctggctctgcagaccggggtttgctacggaatcaagtggctggctctttctaagaccccatccgccctggcgctcaatcagacacagcactgtaagcagctcgagggtctggtgtccgctcaggtccagttgtgtagatctaatctcgaattgatgcacactgtcgtccatgccgctcgcgaggtgatgaaagcctgtcgtcgagcattcgccgatatgcgctggaactgtagttccatcgagctcgcccctaactatctcttggatttggagcggggcactagggaaagtgctttcgtatacgctctgtctgcagccgctatcagccatgcaatagcacgggcctgtacctccggagacctccctggctgttcctgtgggccagttcccggggagcctcccgggcccggcaatcgttggggaggctgcgctgacaacctgtcttatgggcttctcatgggcgcgaagtttagtgatgctccaatgaaggttaagaaaactgggtctcaggctaacaagctaatgagactccacaactcagaggttgggagacaggctttgagagcctctctgctggtgaattcccggtgccaggcctgggaggcagcttgtgcgctgccttcattaggcagtcaccaggagcagaaggtgtggcctccctggaaagagggcaggaccagcaaagagacagacaaaatcaaaaacaacctggctgcatag

SEQ ID NO: 27029 - DNA, 18 bp, synthetic construct
  misc_feature 1..18: note = Description of Artificial Sequence: Synthetic coding sequence
  source 1..18: mol_type = other DNA
atgcgggcccggccctag

SEQ ID NO: 27030 - DNA, 1143 bp, synthetic construct
  misc_feature 1..1143: note = Description of Artificial Sequence: Synthetic coding sequence
  source 1..1143: mol_type = other DNA
atgaagaagagcatcggcatcctgagccccggcgtggccctgggcatggcagggtcagccatgagcagtaaattctttctcgtggccctcgccattttcttttctttcgcccaagtggtcattgaagcgaactcatggtggtcgctcggcatgaataacccggtgcagatgagcgaggtctatattattggtgcacagccgctgtgctctcagctagccgggttatcgcaaggccagaaaaaactgtgccacctttaccaagaccacatgcagtacattggagaaggtgcaaaaacaggcattaaggagtgtcagtatcagtttcggcatcggcgttggaattgctcaaccgtggacaacaccagtgtgtttggtcgggttatgcagataggctccagagagaccgcttttacctacgccgtgagcgcagcaggcgtcgtgaacgcaatgagtcgcgcctgccgggaaggcgagctgagcacatgtgggtgctctcgcgcagcaagacctaaggatttaccgcgggactggctgtggggtggctgtggagataacatcgattatggatatcgcttcgcaaaagaatttgtagatgcacgggagcgcgaacgcattcatgccaagggctcgtatgagtccgctaggattcttatgaacctgcataataatgaggccggcaggcgcacagtttataatctggcggatgttgcctgtaaatgccacggcgtgtccggaagctgcagcctgaagacgtgttggctgcaactggcagatttccggaaggtgggagacgccctcaaggagaaatacgattcggccgctgcaatgcgcctgaacagtagaggaaaacttgtccaggtcaatagtcggttcaactctccgactacacaggacttagtttatatagacccttcccctgattactgtgtcagaaacgagagcaccggcagcctgggcacgcaagggcgcctctgtaacaagaccagcgaggggatggacggatgtgagctgatgtgctgcgggcggggttacgatcagtttaaaaccgtgcagacagaacgatgccactgtaagtttcattggtgttgctatgttaaatgcaaaaagtgcaccgagatcgtggatcagtttgtatgcaagtag

SEQ ID NO: 27031 - DNA, 390 bp, synthetic construct
  misc_feature 1..390: note = Description of Artificial Sequence: Synthetic coding sequence
  source 1..390: mol_type = other DNA
atgaagaagagcatcggcatcctgagccccggcgtggccctgggcatggcaggctccgccatgtcttccaagttcttcctggttgccctcgccatctttttctcattcgcccaagttgtaattgaggcaaactcctggtggagcttagggatgaacaatcctgttcagatgtcacaggatgtgggaggtcatggatggttgcgggcccatgtacttagaccctggctgcggccggtacaggaccgtgcagacggggccctaccactgcaggtgcctctcgtgctactgcggcaggtgcaggaggtacacggagaccgcggacccgtgtgtgtgcaggtagttggggctacccaacatagcgcccccctgcccggccccgcgtacctgtag

SEQ ID NO: 27032 - DNA, 1143 bp, synthetic construct
  misc_feature 1..1143: note = Description of Artificial Sequence: Synthetic coding sequence
  source 1..1143: mol_type = other DNA
atgaagaagagcatcggcatcctgagccccggcgtggccctgggcatggccggtagcgccatgtcatcgaagttctttctggtggctttggcgatctttttctcttttgctcaggtggtgatcgaagctaattcttggtggtcactgggcatgaataaccccgtccaaatgagtgaagtgtacatcataggcgcccagcctctatgctcccagctggccgggctcagccagggccagaagaaactgtgtcacctgtatcaggaccacatgcagtacattggcgaaggagccaaaactggtataaaggaatgtcagtaccagttcaggcatcgccggtggaactgtagcaccgtggacaataccagtgtgttcggacgcgttatgcagattgggagtcgggaaacggcgttcacttatgccgtcagtgccgctggtgtcgttaatgcgatgtctcgagcctgtcgggagggggagctaagcacatgcggctgcagtagagcagcaagacccaaagatttgccccgagattggctctggggcggatgtggcgacaacatagactatggctacagattcgccaaagaattcgtcgacgcaagagagcgtgaacgcatccatgcaaagggctcttacgagtccgcccgcatactcatgaatcttcacaacaacgaggcgggacgtcgcacagtgtataacctggctgacgtggcctgtaagtgtcatggcgtctctggtagttgcagcttaaaaacatgctggctgcaactcgccgatttccgcaaggtgggtgatgccttaaaggagaaatacgactccgccgcggctatgcggctgaattcacgcggcaagctggtccaggtgaatagtagattcaacagcccaactacacaggacctcgtgtatattgacccaagtccagactactgcgtgcggaatgagagcaccgggagcctcggcactcaagggcggctctgcaataaaacgtccgagggtatggatggatgtgaactaatgtgttgcgggcgagggtatgatcagttcaagacagtgcagaccgagcgctgtcactgcaagttccattggtgttgctatgttaagtgcaagaagtgtacagagattgtcgatcagttcgtctgcaagtag

SEQ ID NO: 27033 - DNA, 645 bp, synthetic construct
  misc_feature 1..645: note = Description of Artificial Sequence: Synthetic coding sequence
  source 1..645: mol_type = other DNA
atggccggcagcgccatgagcagcaagttcttcctggtggccctggccatcttttttagcttcgcccaagtggttatcgaagccaatagctggtggagcctgggaatgaacaaccccgtgcagatgagcgaggtgtacattatcggagcccagcctctgtgctcccagctcgctggactgtcacagggccagaaaaagttatgtcacctatatcaggatcacatgcagtacattggtgaaggggcgaagacaggcatcaaagaatgccagtaccagttccggcacaggagatggaattgctccacagtcgataacactagtgtttttggtcgcgtgatgcagatcgggtcacgtgagactgcgttcacctatgctgtcagtgccgctggcgtggtgaatgctatgagcagagcgtgcagagagggcgagctgagtacatgcggctgctctcgagcggcccgccccaaagatttgcctcgtgattggctatggggcggctgtggggataacattgactatggctaccggtttgccaaggagtttgtggatgcacgggagagggagcggatacacgccaaaggttcctacgagtctgcccggatcctgatgaacttacataataacgaggctggtcgcagagtttag

SEQ ID NO: 27034 - DNA, 1098 bp, synthetic construct
  misc_feature 1..1098: note = Description of Artificial Sequence: Synthetic coding sequence
  source 1..1098: mol_type = other DNA
atggccggcagcgccatgagcagcaagttcttcctggtggccctggccatcttcttctcctttgcccaggttgtgatcgaggccaactcctggtggagtctcggcatgaacaatcccgtgcaaatgtccgaagtgtatataatcggggcccaacctctgtgttcccagctagctggactctcacaagggcagaaaaaactctgccacctctatcaggaccatatgcagtatatcggcgagggcgccaagaccggtatcaaggaatgccagtatcaattcagacataggcgctggaattgcagtactgtcgacaacaccagcgtgttcggcagagtaatgcagattggctccagggagacagccttcacctatgctgtgtccgccgctggggttgtgaacgccatgagccgagcatgtagggagggcgagcttagtacgtgtgggtgttccagggcagccagaccaaaagacctgccacgtgactggctgtggggcggctgcggggacaatatcgattacggctaccggtttgctaaggaatttgtagacgctcgtgaacgcgagcggatccacgcgaagggcagctatgagagtgcgcggatacttatgaatttacataacaacgaggccggcagaagaactgtttacaatttggcagacgtcgcttgcaagtgccatggcgtcagcggatcttgtagccttaagacttgttggctgcagttggcggactttcgtaaggtaggagatgctctcaaggagaaatacgattccgccgccgccatgcgcctcaattccagggggaaactggttcaagtaaattctaggttcaattctcctacgacccaggacctggtatacatagacccatcccccgactactgcgtccgtaacgagtccacagggtcactggggacacagggccggctctgtaataagacttccgagggaatggacggctgcgagctcatgtgttgcggaaggggttacgaccagttcaagaccgtccagactgaacgctgccattgtaagttccattggtgctgttatgtgaagtgtaaaaagtgcactgaaattgtggatcaattcgtctgtaaatag

SEQ ID NO: 27035 - DNA, 876 bp, synthetic construct
  misc_feature 1..876: note = Description of Artificial Sequence: Synthetic coding sequence
  source 1..876: mol_type = other DNA
atgcagtacatcggcgagggcgccaagaccggcatcaaggagtgccagtatcagttcagacaccgccgctggaactgtagcaccgtggacaatactagcgtgttcgggagagtgatgcagatcgggagccgcgagaccgcctttacctacgctgtgtcagccgctggggtggttaacgcaatgtcccgggcttgccgtgaaggtgagctgtctacctgcggatgtagcagggcggcccggcctaaggacctccctagagattggctgtggggtggttgtggggacaatatcgactatggctataggttcgctaaagagtttgtggatgccagggaaagagagagaattcatgccaaaggcagctacgaatctgcccgcattctgatgaatctgcataacaatgaggcaggaaggcgcactgtgtacaacctggcggatgtagcatgcaaatgccacggggtttcaggaagctgcagcttgaagacttgctggctccagcttgccgatttcagaaaggtgggtgacgcccttaaggagaagtacgactccgctgcggccatgcgtctcaatagccggggcaaactggtccaagtgaatagtagatttaattcacccaccacgcaggatctggtgtatatcgacccatcccccgattattgcgttaggaacgagagtactgggtccctcggaacccagggtcggctgtgcaacaagacatcagagggaatggatgggtgcgagctcatgtgctgcggcaggggctatgatcaattcaaaacagtgcagactgagagatgccactgtaaattccattggtgttgctacgtgaagtgtaaaaaatgcacagaaattgtggaccaattcgtgtgtaagtag

SEQ ID NO: 27036 - DNA, 1080 bp, synthetic construct
  misc_feature 1..1080: note = Description of Artificial Sequence: Synthetic coding sequence
  source 1..1080: mol_type = other DNA
atgcccagcctgctgctgctgttcaccgccgccctgctgagcagctgggcccaactcctgaccgatgcaaactcatggtggtcactggctctgaatcccgtccagcgtcccgagatgttcatcatcggcgcccaacctgtgtgcagccagctgccaggcctcagtcccgggcaacgcaaactgtgccagttatatcaggaacatatggcttacatcggtgagggcgccaagacgggtattaaagagtgccaacatcaatttaggcaaagaaggtggaactgtagcacagctgacaacgctagcgtgtttggtagagtaatgcagattggatcacgtgagacagccttcacgcatgccgtctccgcagctggagtggtgaacgcaatttcccgagcatgccgcgaaggggaactgtcaacttgcggatgtagcaggacggcccggcctaaggacctccctcgggactggctgtggggcgggtgtggtgacaatgtagagtacggataccgtttcgctaaagagttcgtggacgccagggaacgtgagaaaaactttgcaaagggctccgaggagcaggggagagtactgatgaatctgcagaacaatgaagccggtaggcgcgcagtctataaaatggctgacgtagcatgcaaatgtcacggcgtgagcggcagctgctctctcaagacatgctggctgcagttggccgagtttcggaaagtgggagacaggctaaaggaaaaatacgattccgctgctgctatgagggtaactaggaaaggacggcttgagctggtcaattcaagatttacccagcccactcctgaggacttagtatatgttgatccctctcctgattactgccttcggaatgagagcactggctcgcttggtacccaaggccgattatgcaataagacgtctgaagggatggacggatgtgaacttatgtgctgcggaagggggtacaatcaattcaagtctgtgcaagtggagcggtgtcattgtaagttccattggtgttgctttgtgcgttgcaaaaagtgcacggagatcgtcgatcaatacatctgcaaatag

SEQ ID NO: 27037 - DNA, 1080 bp, synthetic construct
  misc_feature 1..1080: note = Description of Artificial Sequence: Synthetic coding sequence
  source 1..1080: mol_type = other DNA
atgcccagcctgctgctgctgttcaccgccgccctgctgagcagctgggcccaactgctgaccgacgcaaactcatggtggtctctggctcttaatcctgtgcagcggcccgaaatgttcatcatcggggcccagcccgtatgctcgcagctcccaggcttgtcccccggacaaaggaaactgtgccaactgtaccaagaacacatggcatacattggcgaaggtgccaaaacaggaatcaaagaatgccaacaccagtttcgccagcgtcgttggaactgttcaactgctgacaatgcgtctgttttcggacgcgtgatgcaaatagggtctcgtgagacagccttcacccacgcagttagcgccgctggcgtagtgaatgcaatttctcgggcctgtcgcgaaggagagctctcaacctgcggttgtagccggaccgccagacccaaagacctgccaagagattggttatgggggggctgtggggacaacgtggagtacgggtatcgttttgcgaaggaattcgtggacgctcgcgagcgcgaaaaaaattttgccaaaggctccgaggagcaggggcgcgtccttatgaatttacagaacaacgaggccggccggagagctgtctacaaaatggccgacgtggcatgtaagtgtcacggcgtatcaggctcctgtagtctgaaaacgtgctggttacagctggccgagttccgcaaggtgggggatcgcttaaaagagaagtacgatagcgctgctgctatgcgagtcactagaaaaggaaggttagagctagtgaactcacgtttcacccaacctacgcctgaagacttagtgtacgttgaccccagtcctgactactgcctgcggaatgaaagcactggctctctcggcacgcaaggccgtctgtgtaacaagacttcagaaggcatggatggttgcgagctgatgtgttgcggacggggatacaaccagttcaagagcgtccaggtggagaggtgccactgcaagtttcactggtgttgcttcgtacgatgcaaaaagtgtacagaaattgtcgaccagtatatttgcaagtag

SEQ ID NO: 27038 - DNA, 1080 bp, synthetic construct
  misc_feature 1..1080: note = Description of Artificial Sequence: Synthetic coding sequence
  source 1..1080: mol_type = other DNA
atgcccagcctgctgctgctgttcaccgccgccctgctgagcagctgggcccagttgctcaccgacgctaacagctggtggtctttggccttaaaccctgtccagagacctgaaatgtttataattggagctcaaccggtctgttcccagcttcccggactctctcctgggcaacgcaaactttgccagttgtatcaggagcacatggcctacattggagaaggagcaaaaaccgggataaaggagtgtcagcatcagttccggcaaagaaggtggaactgcagtacggcagataatgcttcagtgttcggaagggtgatgcaaattggctccagggagaccgccttcacccatgccgttagcgccgctggtgtggtcaatgccatatcccgcgcttgtcgcgagggcgaactgtcaacctgcggatgctcacgaacagctagaccaaaagacctgccacgcgactggctgtggggcggctgcggcgacaatgtggaatacggatatcggtttgccaaagaattcgtggacgcaagggagcgtgagaagaactttgcgaagggcagcgaagaacagggacgggttttaatgaatctgcagaacaatgaagcagggcgccgagccgtttacaagatggctgatgttgcatgcaagtgccatggcgtgagtggctcatgctcacttaagacatgctggctgcaattggccgagttcaggaaggttggagaccgtcttaaggaaaaatacgatagcgctgcagctatgcgggtgactcgaaaagggcgcctggaactggttaattccaggttcacccaaccaaccccggaggatctggtctacgtcgacccaagtcccgactactgcctcagaaatgagtccacggggagcctggggactcagggcagactctgcaataagaccagtgaagggatggacggatgtgagctaatgtgctgtggacgggggtataaccaatttaaatctgtgcaggtggagaggtgccattgtaagtttcattggtgttgcttcgtgcgatgcaagaaatgcactgagatcgtggatcaatacatctgcaagtag

SEQ ID NO: 27039 - DNA, 1398 bp, synthetic construct
  misc_feature 1..1398: note = Description of Artificial Sequence: Synthetic coding sequence
  source 1..1398: mol_type = other DNA
atgaccggccgggccatggaccccctgcccgccgccgccgtgggcgcagccgccgaggccgaggccgatgaagaagccgatcctcccgctagtgacctccctacgccacaggccatagagccgcaggctattgtccagcaggtaccagctcccagccgtatgcagatgcctcaaggcaatccgctcttgcttagtcatacccttcaggagctactcgcaagagacacagtgcaggtggaactcataccagaaaaaaaaggcttatttctcaagcatgtggaatacgaggtgagttcccaacggttcaagtcaagcgtgtacagacggtacaacgactttgtggtttttcaagagatgctcctccataagttcccttatagaatggtgccagctctgcctccaaagcggatgctgggagcagacagggagttcattgaggccaggaggcgcgcattgaagcgcttcgtgaatctggtcgccagacatccattgttctctgaagacgtggtgctcaagctattcctgtcattctccggctcagatgtccaaaataaactcaaggagagtgcccagtgtgttggagatgagttcctcaattgtaaactggccacccgggcaaaggatttcctcccagcggatatacaggcacagtttgcgatttctcgagaacttattcggaatatctataatagcttccataagctgcgcgatagggctgaacggatcgcctcccgagccatcgacaatgccgctgatctccttatcttcgggaaagagctgagcgctattggaagcgacaccactccactccccagttgggccgcccttaatagcagtacctggggcagcctgaagcaggctcttaaaggcctgagcgttgaattcgctcttctagccgacaaggcagcacagcaggggaagcaggaagaaaacgatgtggtcgagaagctgaatctattcctggacttactgcagtcttataaggacctgtgtgagcgccatgagaaaggggtgctccataaacatcagcgtgcattgcacaaatattccctcatgaagcgccagatgatgagtgccacagcgcagaaccgggagccagagagcgtagagcagctcgaatcacgcattgtggaacaggaaaacgcgatccagaccatggagttaagaaactacttttctctgtactgtttacatcaggagacccaactcatccatgtttatctgcccctcacatcccatatcctccgggcctttgtgaactctcagatccaaggacacaaggagatgtccaaggtgtggaatgacctccgaccgaagctcagttgccttttcgcaggacctcattcaaccctcaccccgccatgttcaccccccgaagacggtctgtgtcctcactag

SEQ ID NO: 27040 - DNA, 174 bp, synthetic construct
  misc_feature 1..174: note = Description of Artificial Sequence: Synthetic coding sequence
  source 1..174: mol_type = other DNA
atgagcagcgtgcagcagcagcccccccccccccggcgggtgaccaatgtcggcagccttctcctgaccccccaggagaacgagtccctgttcactttcctgggaaaaaaatgcgtcaccatgtcgtccgccgtcgtgcagctttatgccgcagaccgcaacctttcgtgttag

SEQ ID NO: 27041 - DNA, 1140 bp, synthetic construct
  misc_feature 1..1140: note = Description of Artificial Sequence: Synthetic coding sequence
  source 1..1140: mol_type = other DNA
atggcccggcggagcgccttccccgccgccgccctgtggctgtggtctatcctcctgtgcttgctcgccctgagggccgaagctggacctcctcaagaggagagtctctatctgtggatagacgctcaccaagcccgcgtccttattggcttcgaagaagatatcctgattgtgtccgaggggaaaatggccccatttacccacgatttcagaaaagcccagcaaaggatgcccgcaatacctgtcaatatacacagcatgaacttcacctggcaggccgccggtcaggctgagtatttctatgaatttttgagcttacggtctctcgataaagggattatggccgaccccaccgtgaatgttccccttcttgggaccgtgcctcacaaggcctccgtggtgcaggtaggctttccctgcctgggcaaacaggacggggtcgcagccttcgaggtcgatgtcattgtcatgaactccgaagggaataccatcctgcagacacctcaaaatgcaatattttttaaaacatgtcagcaggcagagtgcccaggaggatgtcgaaatggaggcttctgtaatgaaaggcggatctgtgagtgtccagacggctttcatggcccccactgtgagaaagccttgtgcacccctagatgtatgaacggcgggctgtgtgtaaccccaggcttttgtatatgccctcctggcttttatggggttaactgcgacaaagctaactgctccacgacctgcttcaacgggggtacctgtttttatccaggcaagtgcatttgccctcccggtttggagggagagcagtgtgaaatcagcaagtgcccgcaaccctgcagaaacggtggcaaatgtatcggcaaatccaagtgcaagtgcagtaagggttaccagggcgatctttgttctaaacccgtttgcgagcccggttgtggagcacatgggacatgtcacgaacctaacaaatgtcagtgccaagaaggctggcatggacgccattgtaacaagcggtacgaggcgtcactcatccacgcactccggccagcgggcgcacaattgaggcagcacaccccaagtctgaaaaaagccgaggagagaagggacccccccgagagtaattatatctggtag

SEQ ID NO: 27042 - DNA, 120 bp, synthetic construct
  misc_feature 1..120: note = Description of Artificial Sequence: Synthetic coding sequence
  source 1..120: mol_type = other DNA
aagaagcggaaggagaagaagcgggagaagcggcggggcaaggagaggaaggaactgttcaaattagtatcccacgtcttggaaaatagaatgggatggcagcaccttaagtggatgtag

SEQ ID NO: 27043 - DNA, 1095 bp, synthetic construct
  misc_feature 1..1095: note = Description of Artificial Sequence: Synthetic coding sequence
  source 1..1095: mol_type = other DNA
atggcccgggccagcgaggccgtgagccggatcctggaggagtggcacaaggccaaggtcgaggccatgacgctggacctggcccttcttcgctctgtgcaacactttgccgaggcattcaaagctaagaatgtccctttgcacgtgttggtatgcaacgctgccactttcgcactgccttggagcctgacaaaagacggtctggaaactacattccaagtgaaccaccttggccatttctatttggtccagctcctgagaatgttttgtgccgcgcagctcctacctgtaagcctctggagcccacagagtcccattgatttacagatcctcacgaccccctgggaaaactggacctcagtcgcctctctgcaacagaaaacgaccatagggagatgttggctcattacgggccctagctcagcgacgtctagcagccctacgtcctgcacagtggcaccaactaggggtcacgttgagaggagcgcttcttggaaatatgatgtgctacaacattcaagccagctggtcggcgtgcacaccgcagtgtacctgggcgaggccttccatcaggtccacgccaccgggtcgtgccaccatcgcgtactgtgttgctgcccacgaactggcggctccgggcgtgacgtgctgcagcaactcctccctctgcacgcccttactcggagctctgagaggcgggacgggccggatccagtgggatccgagaggctaatacaagaacgcctcgcctcaccagcaaagtggtcgtctgaaaggatggggacccacacccgccctgtgtgcgtcccatccaggaagtgtcaaggcccactccctaacgtgccccctactcagattcggaaatccaagggcaacaagagctcacacaaccgggtcaagaatctcaaataccagtgggaggctggcaactcctgggggaaggtcagcctgttctggggctgggctcgacaccgtagcctctgtttccttgtcgtcgcttgccttaaagtcaaaacgtgtctggtttgccgctttcgtatatctctggaaaaacatcagcaatttagttttttctactgttataggattgcttag

SEQ ID NO: 27044 - DNA, 570 bp, synthetic construct
  misc_feature 1..570: note = Description of Artificial Sequence: Synthetic coding sequence
  source 1..570: mol_type = other DNA
atggccgccctgcggtacgccggcctggacgacaccgacagcgaggatgagttgcccccaggttgggaagaaagaaccacaaaggacggatgggtgtactacgccaaccacacagaggaaaagactcagtgggagcacccgaagactggtaagagaaagcgagttgccggggaccttccctacggatgggaacaggaaacagacgagaacggtcaggtcttcttcgtagatcatataaacaagcgcacgacatatctcgatccacgcctggccttcaccgtggacgacaaccctactaaaccaacaacacgacagagatatgatggaagcactactgccatggagattctccagggtcgcgacttcacagggaaagtcgtggtagttactggagcgaatagcggcatagggttcgagaccgcaaaaagtttcgctctccacggcgctcacgttatccttgcctgcaggaacatggcgcgggcatcagaggccgtgagcagaatcctggaagaatggaagaccaagtaccatcctccccctgagaagtgcagaatcaaaattttccattag

SEQ ID NO: 27045 - DNA, 936 bp, synthetic construct
  misc_feature 1..936: note = Description of Artificial Sequence: Synthetic coding sequence
  source 1..936: mol_type = other DNA
atggccgccctgcggtacgccggcctggacgacaccgacagcgaggatgaactcccaccagggtgggaggaaaggaccaccaaagacggctgggtatattatgcaaaccacactgaagagaaaacccagtgggaacaccccaaaacgggcaaaaggaaacgggtagctggtgacctgccatacgggtgggaacaggagacagacgaaaatgggcaagttttttttgtcgaccacataaacaaacggaccacgtacctggatccaagactggcgtttactgtcgacgataaccccaccaagcccacaacccgtcagagatacgatggatctaccaccgcaatggaaatcctccagggaagagatttcacggggaaggtggtcgtggtgactggggcgaacagtggcattgcgactgggtcttgtcaccatcgggtgctctgctgttgccctcgcacaggcgggtctggcagggacgtcttgcagcaactgctgcctctacacgccctgacgcgctctagtgagagacgcgatggcccggaccccgtcggggcgcaacgcgaggccgatccgcgcacggcctggcaacctgtgagacttagtggcgcccaatctgggtgggctcacacacccgccctatgtgtttcccctcatgctagcgcgcgggcgggccccctgcccaacgtcccgcccactcaaatacggaaaagtaaagggaataagtccagccataatcgggtaaaaaacctgaagtatcagtgggaggccggcaacagctgggggaaggtctccctattttgggggtgggctagacacaggtcactgtgctttctagtggttgcatgcctgaaggtgaaaacgtgtctggtctgcaggttccgcatttcactggagaagcaccaacagttttcgtttttctactgttataggatcgcatag

SEQ ID NO: 27046 - DNA, 705 bp, synthetic construct
  misc_feature 1..705: note = Description of Artificial Sequence: Synthetic coding sequence
  source 1..705: mol_type = other DNA
atggccgccctgcggtacgccggcctggacgacaccgacagcgaggacgagttgcctcccggctgggaagagcgaaccacgaaagacggatgggtgtactacgcgaaccataccgaagagaaaacacagtgggaacatcccaaaactggaaagagaaaacgcgtggccggagacctgccctacggttgggagcaggagaccgacgaaaatggccaagtgttttttgtggaccatattaataaacggacaacatatctggatcccagacttgcattcaccgtggatgacaatccaaccaaaccaacaacccggcagcgttatgatggatctacgaccgcgatggaaatccttcagggccgcgactttacaggaaaagtggtggtggtaaccggggctaattcaggaattggcttcgagacggctaaaagcttcgcccttcacggagcacacgtgattctggcctgccggaatatggcccgtgcctcagaggctgtttcacggatacttgaggaatggcagcaaggggctgctacaaccgtgtactgcgcagcagtgcctgaactggaaggattaggcggaatgtactttaataactgttgtagatgtatgccatcacccgaggcgcagtctgaagagacagcgagaactctgtgggcactctcagaaaggctcattcaagagaggctgggatcccagtctggatag

SEQ ID NO: 27047 - DNA, 1245 bp, synthetic construct
  misc_feature 1..1245: note = Description of Artificial Sequence: Synthetic coding sequence
  source 1..1245: mol_type = other DNA
atggccgccctgcggtacgccggcctggacgacaccgacagcgaggacgaactcccccctggttgggaggagaggactaccaaagacgggtgggtatactatgctaatcacaccgaagagaagactcaatgggaacatcccaagactggtaagagaaaacgagtggcgggcgacctcccctacggttgggaacaggaaacagacgaaaacggtcaggtattctttgtcgatcatatcaataagcggactacttacctggacccgcggctggcctttaccgtggatgataatcctactaaacccaccactagacagcggtacgatgggtctacgactgcgatggagatcctacaggggagagactttaccgggaaggtagtggtggtgacaggagctaactctggtatcggtttcgaaacagcaaagtcctttgctctgcacggggcacacgtgattttggcctgcagaaacatggcgcgagctagcgaagccgtcagtcgcatactagaggaatggcataaggccaaagtggaggccatgacccttgacttagcgctgctccgaagcgtacaacatttcgcagaggccttcaaagcaaagaatgttccacttcatgtcctagtctgtaacgctgcgacatttgccctgccttggagcctgaccaaagacggcctcgagactacttttcaagtgaatcacctcggtcatttttacctcgtgcagcttctacaggacgtcctgtgtagaagcgcccctgcccgggtgatcgtggtttcctcagaaagtcatcgctttactgatatcaacgacagcctcggaaaactggactttagccgcttatcacccaccaaaaatgactactgggccatgctggcctataaccgaagcaaactgtgtaatattctgttttcaaacgaacttcacagacggctctctcctcgtggtgtaaccagcaacgcagtgcaccctgggaacatgatgtatagtaacatccatcgtagctggtgggtctacacgttgctgttcaccctggcaagaccattcaccaagtccatgcagcagggcgccgcgactacggtctattgtgccgctgtgccagaactggaggggctgggggggatgtactttaacaactgctgtaggtgtatgccctcccccgaagcccagtccgaggagacggcccgcaccctttgggcgttatcagaacgtctaattcaagaacgcctcggctcccagagcgggtag

SEQ ID NO: 27048 - DNA, 642 bp, synthetic construct
  misc_feature 1..642: note = Description of Artificial Sequence: Synthetic coding sequence
  source 1..642: mol_type = other DNA
atggccgccctgcggtacgccggcctggacgacaccgacagcgaggacgagctacctcccggttgggaggaaaggaccaccaaggatggatgggtgtattacgccaaccatacagaagaaaaaacgcaatgggaacatccaaaaaccgggaagaggaagcgagtggccggtgatcttccatatggatgggaacaagagaccgatgagaatggccaggtattttttgtagatcacatcaacaagcgtactacctatctggatcctcggcttgcttttactgtggatgacaatccaactaagcccacaacgagacaaagatacgacgggagcaccaccgccatggaaatattgcagggtcgcgatttcaccgggaaggtcgttgtggttacgggagcgaacagtggtataggcaaggcctcttgtcatgttggaaggattctaaagcatacacgcgtggaggagttgtccctgctgcccacagccattaaccgggagctgcctcccccgtgcacagtcctcctcagccagaattggagagtgtgggagggttgtaccagcactactgccgcagcagcttgtccccatcagaagctacgggccaaacgaagacccgggccttgtggtaggtccgcgagaggatag

SEQ ID NO: 27049 - DNA, 1245 bp, synthetic construct
  misc_feature 1..1245: note = Description of Artificial Sequence: Synthetic coding sequence
  source 1..1245: mol_type = other DNA
atggccgccctgcggtacgccggcctggacgacaccgacagcgaggatgagttgccgccaggttgggaggagcgaaccactaaagacggctgggtttactacgccaaccacacagaggagaagactcagtgggagcacccaaagaccggaaagcgaaagcgtgtagccggagatctgccttacgggtgggaacaggagacggatgaaaacggtcaggtcttctttgttgaccatataaataagcgcacgacttatttggatccacgactagcctttactgtggatgacaatcccactaaacccactactaggcagcgctatgatggctcgaccacagccatggaaattcttcagggtcgggatttcaccggaaaggtggttgtggtgacaggggccaatagtggaattgggttcgagacagcgaaatctttcgccctgcacggggcccatgtgatactcgcatgtcgtaatatggcaagggcatctgaggcagtttccaggatccttgaggaatggcacaaagcaaaggtggaggctatgacacttgacctggctctcctccgcagcgtgcagcacttcgcagaagcattcaaggctaagaatgtgccacttcatgttctcgtgtgcaacgctgctacctttgcattaccgtggtccctgactaaagatggcctggagacaacgttccaggtgaaccacctgggacatttctatctggtgcagcttctgcaggacgttttgtgccgtagtgcgcccgctagagttatagtcgtgtcttccgagagtcaccgtttcacagacattaatgattctctggggaagctcgatttcagccgtctgagtcccactaagaacgactattgggcaatgttagcctacaatcgctccaagttgtgcaacatactgttcagcaatgagctgcaccgcaggttgagcccccggggggtgacaagcaatgctgtacatcctggcaacatgatgtatagcaacatccaccgcagctggtgggtatacacactgctttttaccctcgcaagaccattcacaaaatccatgcagcagggggcagccacaaccgtctactgtgccgcagttccagagctagagggactgggtggaatgtatttcaacaactgttgcagatgcatgcctagccctgaggcccaatctgaggagactgcaaggacgctatgggccctcagtgagcgactgatccaggaaagactgggcagtcagagtggctag

SEQ ID NO: 27050 - DNA, 111 bp, synthetic construct
  misc_feature 1..111: note = Description of Artificial Sequence: Synthetic coding sequence
  source 1..111: mol_type = other DNA
atggccgccctgcggtacgccggcctggacgacaccgacagcgaggacgaactgccccctggttgggaggagcgtaccacaaaagacggatgggtctattacgcaaagtag

SEQ ID NO: 27051 - DNA, 1047 bp, synthetic construct
  misc_feature 1..1047: note = Description of Artificial Sequence: Synthetic coding sequence
  source 1..1047: mol_type = other DNA
atggcccacagccagaacagcctggagctgcccatcaacatcaacgctacccaaatcacaacagcgtacggtcatcgcgcactaccgaaacttaaagaagagcttcagtccgaggacctgcagaccaggcagaaagcgcttatggcgttgtgcgatctgatgcatgatccagagtgtatttacaaagctatgaacataggctgtatggagaatctgaaagcactcctcaaggatagcaactctatggtccgaataaagaccacagaggtgctgcacatcacagccagtcacagtgtggggcgttatgcctttcttgagcatgatatagtattggccctcagcttcctactcaatgaccctagcccagtctgcagaggcaacctgtacaaagcctatatgcagctcgtacaggtgccacggggcgcacaagaaatcatatctaagggcttgattagctccctggtttggaagctgcaggtcgaggtggaagaagaggaattccaggaatttattctagataccctggtactctgtttacaagaagacgctaccgaggcattggggagcaacgtggtcctcgtccttaagcagaagctgctgagcgcaaatcagaatatccgatccaaggcagcacgggcccttctcaacgtctccattagccgcgaaggaaagaaacaggtttgtcactttgacgtcattccaatcctcgtgcatctgctgaaagatcccgtcgagcacgtgaaaagtaacgcagccggggccttaatgtttgccacagtcatcaccgaagggaagtacgcggccttagaggcacaggcgattggcttgctgctagagttactgcatagccctatgacaatcgcacgtctgaacgctacaaaggcacttacaatgttggctgaggcgcctgaggggaggaaggccttgcagacacacgtgcccactttccgggctatggaggtcgagacctacgaaaagccgcaggtcgcggaagctctacaaagagctgcacggattgctatcagtgtgatcgaattcaagccatag

SEQ ID NO: 27052 - DNA, 1131 bp, synthetic construct
  misc_feature 1..1131: note = Description of Artificial Sequence: Synthetic coding sequence
  source 1..1131: mol_type = other DNA
atggtggtggtggccgccgcccccaaccccgccgacggcacccccaaagtgcttctgctatcagggcaaccggccagcgctgctggagcgcccgccggacaggcccttccacttatggttcccgcccaaagaggggcaagcccagaggccgcctctggggggttaccacaagcgcgcaagcggcagcgcttaacccacctgagtcccgaggaaaaagctctgcgcaggaaattgaaaaacagggtggcggcccagactgcacgtgaccggaagaaagcgcggatgtccgagctggaacagcaggtggtcgacctggaggaggagaaccagaagttgctgctcgaaaaccaactgctcagagagaaaacccatggactggtggtcgaaaaccaggagctccgacagcgcctgggcatggatgcgctggtcgctgaggaagaggccgaagccaaaggcaatgaagtgaggccagtagcaggaagcgcggaatctgctgctggagctgggcctgtggttacacctcctgaacatctgcccatggacagcggaggcatcgactccagcgactctgaatctgacatcttactgggaattctggacaatctggaccctgtgatgttcttcaagtgtccgtcccctgagcctgcttcgttagaagagcttcccgaggtttatcccgaaggcccttcttcccttcccgcgagcttgagcctctcagtggggacctcctccgccaaactggaggcaatcaacgagctgatccggttcgaccatatctatacaaagcccttggtgcttgagattccgagtgaaaccgaatcccaggcaaacgtggtggtcaagattgaggaagcacccttaagcccaagtgaaaacgaccaccccgaatttatcgtatccgtcaaggaggagcccgtcgaggacgacttagtacctgaactggggatatcaaacctcctgagctcttctcattgcccaaagccttccagttgtctgctcgatgcttatagtgactgcggctatgggggctcgctcagtccatttagtgatatgtcatctctgctaggagtgaaccactcatgggaagacacgtttgctaacgagctgtttccacagttgataagtgtgtag

SEQ ID NO: 27053 - DNA, 801 bp, synthetic construct
  misc_feature 1..801: note = Description of Artificial Sequence: Synthetic coding sequence
  source 1..801: mol_type = other DNA
atggtggtggtggccgccgcccccaaccccgccgacggcacccccaaagtgctcctgctgtctgggcagcccgcgagcgccgctggcgcccctgctggccaggcgctgcccctgatggtcccagcccagcgaggcgcatctcctgaagcggcctcaggaggactgcctcaagcgcgcaagcgccagcggcttacacatctgtcccccgaagagaaggcccttagaagaaagctgaagaatagggtggccgcgcaaaccgcacgtgaccgcaagaaggctcggatgtcggagctagagcaacaggttgtcgacttggaggaggaggtgaagctacttaagaaccagaaactgctgcttgagaaccaacttttgcgcgaaaagacacatggattagtcgtagagaatcaggaattgcgacagcgattgggcatggacgccctggttgccgaagaggaggctgaggccaaggggaatgaggtgcgccccgttgctggttcagccgaatctgccgcattgcgcctgcgggcgcctcttcaacaagtgcaagctcaactgtccccactgcagaatatctccccttggattctggctgttctcacgcttcagatacagtcgctaatcagttgttgggcattttggactacatggacccaatcctgctctagcaatgccctgccgcagtctctacccgcctggcgtagcagtcagcggtccacacagaaagatcctgttccttatcaaccaccttttctctgtcagtggggccgacaccagccctcgtggaagccattgatgaattag

SEQ ID NO: 27054 - DNA, 636 bp, synthetic construct
  misc_feature 1..636: note = Description of Artificial Sequence: Synthetic coding sequence
  source 1..636: mol_type = other DNA
atgcgggcccccgtgttccaggccctgctgctgtgcggccggcggctggttgtgcaacccctgaattccgacatgcggaagctgaaaaatcgagtggcagcccaaactgccagagacagaaagaaggctagaatgtctgaacttgagcagcaggttgttgacctcgaggaggagaaccagaagctgctgcttgagaaccagctgctcagagaaaaaactcatggactggttgtcgaaaatcaggagctgagacaaagacttggcatggacgccctcgttgcggaagaagaagccgaggcaaaggggaacgaagtcaggcctgttgcaggctctgctgagtcagctgccctgcgcttgcgggccccacttcagcaggttcaagcacagttatcaccactgcagaatatttcaccctggattctggctgtgctaactttgcaaatccagtccctgatatcttgttgggcattttggacgacttggacacaatcctgttcttcaaatgcactgcctcagtcgctgcccgcctggaggagctcccagagatcaactcagaaagacccagtgccatatcagccgccctttctgtgtcagtgggggagacatcagccatcgtggaaacctctgatgaattag

SEQ ID NO: 27055 - DNA, 822 bp, synthetic construct
  misc_feature 1..822: note = Description of Artificial Sequence: Synthetic coding sequence
  source 1..822: mol_type = other DNA
atggccgccgccgacggcgccctgcccgaggccgccgccctggagcagccagccgagctcccagctagcgttagggcctccatcgagcgcaagcgccagagagctttgatgctgaggcaggcacggctcgcagcccgcccctacagtgctacggctgcagcggcaaccggcggaatggctaatgtgaaggctgcgccaaaaattattgacaccggtgggggttttatcctggaggaagaagaagaggaagagcagaagatcgggaaagtggtgcatcagccgggccctgtcatggaatttgattatgtgatctgcgaagagtgtggtaaggagttcatggactcatatcttatgaaccacttcgacctacccacttgcgataattgtcgtgatgctgacgataaacacaaacttatcacaaaaactgaggccaaacaggagtatctcttaaaggattgcgatttagaaaagcgcgagcctcctcttaaattcatcgtaaagaaaaatcctcaccattcccaatggggcgatatgaagctttacctgaagctccagatcgtgaagcgctccctggaggtctggggcagccaggaggcgctcgaggaagccaaggaagtccgtcaggaaaatcgagagaaaatgaagcaaaaaaaattcgataagaaagttaaagagctcaggcgggccgtcaggtcctctgtatggaaaagagaaaccatcgtgcaccagcacgaatatgggcctgaggaaaacctggaggatgacatgtaccggaagacgtgcaccatgtgtggccatgagctcacctatgaaaaaatgtag

SEQ ID NO: 27056 - DNA, 2823 bp, synthetic construct
  misc_feature 1..2823: note = Description of Artificial Sequence: Synthetic coding sequence
  source 1..2823: mol_type = other DNA
atggcccggaagcgggccgccggcggcgagccccggggccgggagctgagaagccagaagtccaaagcgaagtctaaggctcggagagaggaagaagaagaggatgcctttgaagacgaaaaaccacctaagaaaagcctgctgtccaaggtttctcaggggaagcgtaagagggggtgttcacatccagggggctcagccgatggtcccgcgaagaagaaggtggcgaaggtgactgtaaagagcgaaaatctgaaggtgatcaaggacgaagccctgtctgacggggacgacctgcgcgactttccttcagacctgaaaaaagctcatcaccttaagcggggagcaacgatgaatgaggattccaacgaagaagaggaggaatctgaaaatgactgggaggaggttgaagagctgtccgagcccgtgctcggggatgtcagagaatcgactgctttttccaggtctctgctaccggtaaaacctgtggaaattgaaattgagacaccggagcaggcaaaaactcgagaacgatctgagaagattaagctcgagtttgagacttatctcagacgagccatgaagcgctttaacaaaggcgtccacgaggacacccataaagtgcacctcctgtgcctcctagcaaacggcttttaccggaataatatctgttctcagcccgacttacacgcaattggcctttctataatcccggctagattcacacgggtcctccccagggacgtggacacttattatctgagcaacttggtgaagtggttcataggcacttttactgttaatgccgagttgtccgcttcagaacaagataatctccaaacaacactggagagaaggtttgccatttatagcgctagagatgatgaagagctggtgcacattttcctcctgatcctgcgggcactgcaacttctaacgagacttgtgttgagcttacaacctatcccgcttaagagcgccaccgctaaggggaaaaaaccatctaaagaacggttaacagctgatcctggcgggtccagcgaaacatcctctcaggttctggagaaccacacaaaaccaaaaacaagcaaaggtaccaagcaagaggagaccttcgccaaggggacatgtaggccttctgccaaaggcaagcgtaacaagggaggaaggaagaaacgttcaaagccaagttcctccgaggaggacgaggggccaggcgacaagcaggaaaaggccacgcagcgtaggcctcatgggcgggagcgcagagtggctagtcgagtctcatacaaagaggaatctggctccgatgaggctggctccggcagtgatttcgagctttctagtggagaggcaagcgatcctagtgacgaggatagtgagcctgggcctcctaaacagaggaaagcccctgccccgcagagaaccaaggctggaagcaaatcagcgagtcgcacacatagaggaagtcaccgcaaggatcctagcctgccagctgccagcagctcatcttcttcatcaaaacgtgggaagaagatgtgttcagatggggaaaaagctgaaaagcgttctatcgccgggattgatcagtggcttgaggtcttttgcgagcaagaagaaaaatgggtgtgcgtggattgtgtacatggcgtcgtgggtcagcctctgacttgttataaatatgccacgaaacctatgacctacgtagtggggattgattctgacggttgggtgcgcgacgtgacccagcggtacgacccggtctggatgactgtgactcgcaagtgtagggtggatgctgaatggtgggctgagactctgaggccctaccaaagcccatttatggatcgtgagaaaaaagaggatttggaattccaagccaaacatatggaccagcctttgcctaccgctatagggctgtacaaaaaccatcctctgtatgcactgaaacgccacctgctcaagtatgaggccatctatcccgagacagctgctatactcggttactgccggggcgaagcggtgtactctcgcgattgtgttcatactctgcacagccgggacacttggcttaagaaggcccgggttgtgcgcttgggagaggtgccctacaagatggtcaaggggttttccaaccgcgccaggaaagctcgtttagccgaaccgcaactccgcgaggaaaacgatctgggtcttttcggctattggcagaccgaagagtaccaaccacccgtcgccgtcgatgggaaagttccgcggaatgaattcggtaacgtgtatttattcctgcccagcatgatgccaatcggatgcgtacagctaaaccttccgaatctccaccgcgtcgctcgcaaacttgatattgattgcgtccaggcaattactggattcgactttcatgggggatattctcacccagtgacagatggctatatagtctgcgaggaatttaaagatgtgctgcttacagcttgggaaaatgagcaggccgtgatcgagcggaaggaaaaagaaaagaaggaaaagcgcgccctgggaaattggaagcttttggctaagggccttctcatacgggagcgactaaaaaggcgctatggcccaaagtctgaggcggccgcaccccatacagacgctggagggggactgtccagcgacgaggaagagggaaccagttctcaggcggaagccgcccgcattctggcagcgagttggcctcagaatcgagaagacgaggagaaacaaaaattgaaggggggccccaaaaaaaccaagcgggagaaaaaggccgctgcttcccatttatttccatttgaacaactgtag

SEQ ID NO: 27057 - DNA, 2712 bp, synthetic construct
  misc_feature 1..2712: note = Description of Artificial Sequence: Synthetic coding sequence
  source 1..2712: mol_type = other DNA
atggcccggaagcgggccgccggcggcgagccccggggccgggagctccggagccagaagtcgaaggctaagtcaaaggcaaggagagaggaagaggaagaggacgctttcgaagacgagaagccccccaagaagagtctcttgtctaaagtgtcgcaaggaaagaggaagcgtggatgcagtcatcctggtgggtccgcggacggtccggccaagaaaaaggtggccaaagtcactgtcaagtccgaaaatctcaaagttataaaggatgaggccttgtccgacggagacgacctgagggacttcccatctgatctcaaaaaagcacatcatcttaaacggggagcaacaatgaacgaagacagcaacgaggaagaggaggaaagcgaaaatgattgggaagaggccaaaaccagggaacggagcgagaaaattaaactagagttcgagacgtatctgcgacgggcaatgaagcgcttcaataaaggcgttcacgaggatacccataaagtgcatcttttgtgtctcctggccaatggattttatagaaacaatatctgctctcagccagacctgcacgccataggtctttcgataattcccgcccggtttacccgcgtgctgccgagggatgtcgatacctactatctatccaacctcgtgaagtggttcatcggcacttttaccgtaaacgccgaactgagcgcgagcgagcaagacaatttgcagactacattagaacgtaggtttgcaatatatagcgctagggatgacgaggaactggtacacatttttctgctcattctccgcgctctgcaacttctgactagattagtactatctttgcagcctatcccactgaagtctgcaacagcaaagggtaaaaagccttcaaaagagaggctcactgcagaccctggcggatccagcgagactagtagccaggtactggagaaccatacgaagccaaaaacctccaagggtaccaaacaggaagagaccttcgccaaaggaacctgtcgaccttcagccaagggtaaacggaacaaggggggcagaaagaaacggagcaagccgagttctagcgaagaggacgaaggacccggcgataagcaggagaaggcaacccagcgaagaccccacggccgcgaaagacgcgttgccagccgcgttagctacaaggaggagagcggcagcgatgaggcagggtccggctctgactttgaactgagttccggtgaggccagcgacccctctgatgaagactccgagcccggaccccctaagcagagaaaagcacctgccccacaacgcactaaggccgggagcaaaagtgctagcagaacccacaggggcagccataggaaagacccgagcttgccagctgcgagctcttcgtcgtcttcatctaagaggggaaaaaagatgtgtagcgatggagagaaagcagaaaagagatccatagcaggcattgaccagtggcttgaggtgttctgcgagcaggaggagaagtgggtctgtgttgactgcgtgcatggcgtggtgggtcaacccctgacatgttacaaatacgccacaaaacccatgacatacgtcgtaggcatcgattccgatggttgggtgcgagacgtcacccagaggtacgaccccgtatggatgactgtgacccgaaaatgcagggtggacgccgagtggtgggccgagactctcagaccttaccagagtccctttatggacagagaaaaaaaggaggatctggagtttcaggcaaagcatatggatcagcctttaccgactgcaataggactatacaagaatcacccattgtatgcactcaagaggcatctgctcaaatacgaagcaatctacccagagaccgccgccatactgggctactgtcgtggtgaagccgtctattcgcgtgattgtgtgcatacactccacagcagagatacttggcttaagaaggctagagttgttagattgggcgaggtcccttacaagatggtgaaaggtttctcaaatagagcccgaaaagccaggctggccgagccgcagctgcgcgaggaaaatgacctgggcctgtttggttactggcagactgaggagtaccaaccccctgtcgcagtggacggcaaggttcccaggaacgaatttggtaacgtgtatctgtttctcccaagcatgatgcccattggatgtgtccagcttaatctccccaacttgcatcgcgtggctcgcaagctcgacatcgattgtgtgcaggctatcacaggttttgactttcacggcggctactctcacccagtgactgacggttatattgtatgcgaagaattcaaagatgtccttctcaccgcctgggaaaacgaacaagcagttatcgaacggaaagaaaaggaaaagaaggagaagcgcgccctgggaaattggaagctcctggccaaaggcctcctcatccgtgaacgccttaaaaggcggtatggccccaagtcagaggccgcagctcctcatactgacgccggaggagggttgtcctcagacgaggaggaggggaccagcagtcaggcagaggcagcacgaatccttgcagctagctggcctcagaatagggaagatgaagagaaacagaagcttaaaggaggacccaagaaaactaagagggagaagaaggctgcggcctcccacctcttcccatttgagcagctctag

SEQ ID NO: 27058 - DNA, 423 bp, synthetic construct
  misc_feature 1..423: note = Description of Artificial Sequence: Synthetic coding sequence
  source 1..423: mol_type = other DNA
atggcccggaagcgggccgccggcggcgagccccggggccgggagttgaggtctcaaaagagcaaggccaaatctaaagccaggagagaggaagaggaagaggacgcgtttgaggacgaaaagccgccaaaaaagagccttctgtctaaggtcagccagggcaaaaggaagcggggctgtagccatcctggcggctccgctgacggtccggctaaaaagaaggttgcgaaagtgactgttaaaagtgagaacctgaaggtgattaaggacgaggctctttcagacggcgacgatctgcgcgactttccctctgacctgaaaaaggcccatcacctgaaacgcggcgccactatgaatgaggactctaacgaagaagaggaggaaagcgagaatgattgggaggaagtcgaggtgaaaagatag

SEQ ID NO: 27059 - DNA, 507 bp, synthetic construct
  misc_feature 1..507: note = Description of Artificial Sequence: Synthetic coding sequence
  source 1..507: mol_type = other DNA
atggcccggaagcgggccgccggcggcgagccccggggccgggagctgagaagtcaaaaatccaaagctaaatcgaaagccagacacgcatttgaggatgagaagccacccaaaaagagcttacttagtaaagtgtcccagggtaagcgaaagagaggatgcagtcatcccggcgggtcggctgacggacctgccaaaaagaaagtggccaaggtgacggtcaaaagcgagaatctgaaggtgattaaagacgaggctctttctgacggggatgaccttcgagacttccccagtgaccttaaaaaagctcaccatctcaaacggggagctaccatgaacgaggactcaaacgaggaagaagaagagtctgagaatgattgggaggaagtagaggaattatcggaacccgttttgggcgacgtgagagagagtactgccttctctagatcactgctcccagtcaaaccagtggagattgaaatcgagactcctgagcaagcgaagtag

SEQ ID NO: 27060 - DNA, 462 bp, synthetic construct
  misc_feature 1..462: note = Description of Artificial Sequence: Synthetic coding sequence
  source 1..462: mol_type = other DNA
agcagcagcaagcggggcaagaagatgtgcagcgacggcgagaaggccgaaaagcgctcaattgctggtatcgaccagtggctggaggtcttctgtgaacaagaggagaagtgggtctgcgttgactgcgtccacggagttgtgggccagccactcacctgctataagtacgccaccaaacccatgacctacgtggtgggcattgatagcgatgggtgggttagggatgtgacccaaagatatgaccctgtgtggatgacggtgactcgaaaatgccgggttgatgccgaatggtgggcagagactctcaggccttaccagagcccattcatggaccgagaaaaaaaagaggacctggaggggttgtgtgcccacagtgcctttcagggccacgtggctgaggaaagcaagagtggagaggcgtggcgatcgacactccaggacggagagagactcttttag

SEQ ID NO: 27061 - DNA, 177 bp, synthetic construct
  misc_feature 1..177: note = Description of Artificial Sequence: Synthetic coding sequence
  source 1..177: mol_type = other DNA
atgtgcagcgacggcgagaaggccgagaagcggagcatcgccggcatcgatcagtggctcgaagtcttctgtgaacaggaagagaagtgggtgtgcgtggattgcaggtgtggcggtcccgcaagcgacttgctgcaggttagacaccaggcccatgacctgtgcggcggtcactag

SEQ ID NO: 27062 - DNA, 231 bp, synthetic construct
  misc_feature 1..231: note = Description of Artificial Sequence: Synthetic coding sequence
  source 1..231: mol_type = other DNA
aaggccacccagcggcggccccacggccgggagcggcgggtggccagccgggtgagttacaaggaagagagcggctcagatgaggcaggttctggttccgatttcgaacttagctcaggagaggcatctgatccatcggatgaggactccgaaccaggcccacctaagcaacgaaaggcacctgctccccagcggaccaaagccgggtctaagagcgcctcccgcacctag

SEQ ID NO: 27063 - DNA, 849 bp, synthetic construct
  misc_feature 1..849: note = Description of Artificial Sequence: Synthetic coding sequence
  source 1..849: mol_type = other DNA
atggagggcgacttcagcgtgtgccggaactgcaagcggcacgtggtgtctgctaatttcacactccacgaagcttactgcctgagattcctggtactgtgccctgaatgtgaggagcctgtgcctaaggagacaatggaagaacattgtaagctcgagcaccagcaagcgaatgagtgccaggagagacccgtagagtgtaagttctgcaagctggacatgcaacttagcaagctggaattgcacgagtcttactgtggcagtcgtacagagctttgtcagggttgtggccagttcatcatgcatagaatgctcgctcagcatcgagacgtgtgccgttcggagcaggcccagctcggcaagggggagcgcatatccgcaccggaacgtgaaatttattgtcactactgcaaccaaatgatacccgaaaacaagtatttccatcacatggggaagtgttgccctgactcggaattcaaaaaacactttccggtgggcaaccccgaaatcttgccctctagccttccctcccaggccgctgaaaaccaaacatcaactatggagaaagatgtccgacctaaaaccagatccattaaccgatttccccttcacagcgagtcgtccagcaagaaagcgcctcggagtaaaaacaagactttggaccctctgctgatgagcgaacccaaaccaaggacaagttccccccgcggagacaaagccgcctacgatatcctcagaagatgtagtcagtgtggcatcctcttgccactgccaattttgaatcagcatcaggagaagtgtagatggctggcatcttctaagggtaaacaggtaaggaacttctcttag

SEQ ID NO: 27064 - DNA, 906 bp, synthetic construct
  misc_feature 1..906: note = Description of Artificial Sequence: Synthetic coding sequence
  source 1..906: mol_type = other DNA
atggagggcgacttcagcgtgtgccggaactgcaagcggcacgtggtgtcagcgaacttcacattgcatgaggcctattgcctgcgattcctcgttttgtgtcctgaatgcgaggagcctgtacccaaagaaactatggaggagcactgtaagcttgagcaccaacaagtaggatgcaccatgtgccagcagagtatgcagaaatcttccttggaatttcacaaagccaacgagtgtcaggaacgccccgtcgagtgtaagttttgtaaactggacatgcagctgtcgaaactcgagctgcacgaaagctattgtgggtctcgaacggaattatgccaaggatgcggacagtttatcatgcatcggatgttagcccaacatcgggacgtgtgcaggtctgagcaggcacaattggggaagggagagcggatttcggctcctgaacgggaaatctattgtcactactgcaaccagatgatcccggaaaacaaatacttccaccacatgggtaaatgttgccccgactccgagtttaagaaacatttcccagtgggtaatccggagatattgcccagctccttgccatcccaggccgcagagaatcaaacttctactatggaaaaagatgtccggccaaaaacccggtccattaatagatttcctctccattctgaaagttcctctaaaaaggcaccccggagtaaaaataagaccctcgacccgctgctaatgtcggagccaaagccccggacaagttccccacgcggcgacaaagctgcttatgacatcctgcggcgatgctcccagtgtggcattctgctaccactgcccattctgaaccagcaccaggaaaagtgtagatggctggccagcagcaagggaaaacaggtccggaacttcagctag

SEQ ID NO: 27065 - DNA, 600 bp, synthetic construct
  misc_feature 1..600: note = Description of Artificial Sequence: Synthetic coding sequence
  source 1..600: mol_type = other DNA
atgagcctgcactacggctgctgctgccccgagtgcaccagcgtggctataaaggagatgatgtgggtgatccgcccacgggtggcctgcgtagtgaaagacgccggcagtgcaggggagagaatcagcgctcccgagcgcgagatttattgtcattactgcaatcagatgattccggaaaacaaatactttcatcatatgggaaaatgctgcccagacagcgagttcaaaaagcacttcccagttgggaatccggagatactgccttcaagccttcctagtcaggctgctgagaaccaaacatccacaatggagaaggacgttcgccctaaaacccgcagcatcaacaggttcccattgcactcagaatcatcctccaaaaaagcaccgcggtctaaaaataagaccctggaccctctgctcatgtctgagccaaagcccagaactagttctcctcggggtgacaaggcagcatacgacatattacgcaggtgctcacagtgcggtatcctgctgcccctccctatcctcaatcagcaccaggaaaagtgccggtggctggccagctcgaaaggcaagcaagttcgtaatttctcatag

SEQ ID NO: 27066 - DNA, 495 bp, synthetic construct
  misc_feature 1..495: note = Description of Artificial Sequence: Synthetic coding sequence
  source 1..495: mol_type = other DNA
atggagggcgacttcagcgtgtgccggaactgcaagcggcacgtggtcagtgccaatttcaccctgcacgaagcctattgtcttcggttcttagtgctgtgcccagaatgcgaggagccagtgccaaaggagacaatggaggagcactgtaaactggaacaccagcaggtaggatgtacaatgtgtcaacagtcaatgcagaagtccagcctcgaattccacaaggccaacgagtgccaagagcggcctgtagagtgcaaattctgcaagttagacatgcagctgtcgaaactggaacttcacgagagctattgcgggtctaggacggaactgtgccaagggtgcggccaattcattatgcaccgaatgctcgcacagcatagggacgtgtgtagatctgaacaggctcagctgggaaaggaaacgagcccagacccggggaagtgtctgtcaattacagtcgccgccgctctgtctgctcacctgtggccttag

SEQ ID NO: 27067 - DNA, 906 bp, synthetic construct
  misc_feature 1..906: note = Description of Artificial Sequence: Synthetic coding sequence
  source 1..906: mol_type = other DNA
atggagggcgacttcagcgtgtgccggaactgcaagcggcacgtggtgagcgcaaacttcacactccatgaagcttactgtctccggttccttgttttgtgcccagaatgtgaagaacccgtccccaaggagacaatggaggaacattgcaagctcgaacaccagcaggtgtccgagatggggtctggtcgtggcaaatgcagcattttgccagcacgcaaaaaagccaatgaatgccaggaacgtccagtcgagtgcaagttctgcaagctggacatgcaattgagcaagctggagctacacgagtcgtactgtggatctaggacggaactatgccaaggctgcggacagtttatcatgcaccgaatgctcgcgcagcatcgcgatgtgtgccgctctgagcaagcgcaattggggaagggtgaacggatttccgcgccagagcgagaaatctattgccactattgtaaccagatgattcctgagaacaaatacttccaccacatgggtaagtgctgtcccgatagcgaatttaagaagcatttccccgtcggaaacccagagatccttccttcctcactgccctctcaggctgccgagaaccagacctccacaatggagaaggacgtgcgccccaaaacacgctctattaaccgattccctctgcacagtgagtcgagttctaaaaaggccccgagatccaagaataaaaccctggatcccctcctcatgtccgagccaaagcctcgcacaagttccccacggggtgacaaagctgcgtacgatattctgcgacgctgtagtcagtgcggcatcctactgccgctccctattctcaaccaacaccaggagaaatgccgctggctggcatcttcaaaaggaaagcaggtcagaaatttttcttag

SEQ ID NO: 27068 - DNA, 1494 bp, synthetic construct
  misc_feature 1..1494: note = Description of Artificial Sequence: Synthetic coding sequence
  source 1..1494: mol_type = other DNA
atgaccttcaacagcttcgagggcagcaagacctgcgtgcccgccgacattaataaggaggaagaattcgtggaagagttcaatagactgaagacattcgctaacttccccagcggctcccccgtgtcagcctctaccctggccagagcgggctttttgtacaccggcgagggcgatacagtcagatgtttttcttgccacgccgccgtagacaggtggcagtatggggacagcgcggtcgggcggcaccggaaggtgtcccccaactgtcgctttattaatggcttttaccttgaaaacagtgctacccagtcaacaaactccggaatccagaatgggcagtataaggttgagaactacctcggcagtcgtgaccactttgccttagaccgccctagtgaaacacacgcagactatttgctgagaaccggacaggttgtggacatcagcgacaccatttaccctaggaatcccgctatgtattctgaagaggcgcgacttaagtccttccaaaattggcctgattacgcccacctgactcctagagaattagcaagtgccgggctttattacacgggcataggcgatcaggtgcagtgcttttgttgtggcggaaagcttaaaaattgggaaccatgcgacagagcatggagtgagcaccggagacacttccccaattgcttttttgtcctgggccggaacctaaacatccggtctgagtccgacgcggtcagtagcgatcgcaactttcccaatagtacaaatctacctcggaacccctctatggccgactacgaagctcggattttcacatttggaacttggatctactctgtaaacaaggagcagcttgccagggccggcttttatgccctgggcgagggagataaagtcaagtgtttccactgcgggggtgggcttacagattggaaaccgagcgaggacccttgggagcaacatgcaaagtggtatccagggtgcaagtatctgctggagcaaaaaggacaggagtatataaataatattcaccttacacactcactcgaggaatgtcttgtcagaaccaccgaaaagaccccatctctgacacggcggatagacgataccatcttccagaaccctatggtgcaggaagctatccggatggggtttagtttcaaggacattaaaaaaattatggaggagaagatccagattagcggcagcaattataagtctctcgaagtgctggtggctgacctcgtcaatgcccagaaggattcgatgcaggatgagtcttctcagaccagtttacagaaggagattagtaccgaggagcagctgcggaggctgcaggaagagaagttgtgtaaaatctgcatggacaggaacatcgctattgtcttcgtgccgtgcggccacctcgtgacgtgtaagcaatgtgctgaggctgtcgataaatgccctatgtgctatacagtgatcactttcaagcagaaaatcttcatgagctag

SEQ ID NO: 27069 - DNA, 1494 bp, synthetic construct
  misc_feature 1..1494: note = Description of Artificial Sequence: Synthetic coding sequence
  source 1..1494: mol_type = other DNA
atgaccttcaacagcttcgagggcagcaagacctgcgtgcccgccgacattaacaaggaggaagagtttgtcgaggagtttaacaggctgaagacatttgcgaactttccttcaggcagtccagtgagcgcctccacgctagccagagctggcttcttatatactggcgagggcgacacagtgagatgcttctcttgtcatgctgcggtggacaggtggcaatatggggacagtgcggtggggcggcatcggaaggtctcccctaactgcaggttcattaatgggttctacctcgaaaactctgcaacccagtcgaccaattctggcatccagaacggccaatacaaggtggaaaactatctgggctcgcgggaccactttgcactggaccggcctagcgagactcacgcggactacttgctacgcaccggtcaggtcgtggacatcagcgatacaatctatcccagaaaccctgctatgtacagtgaagaagcccggctgaaatcatttcagaactggcccgattatgcacatcttaccccaagagaactggccagcgctgggctgtactacaccggcatcggagatcaggtccagtgcttctgttgcggaggcaagctgaaaaactgggaaccctgcgatagagcctggtctgagcataggcgccacttcccgaactgcttcttcgtgcttggccggaatctgaacatcagaagtgaaagcgacgctgtttcctcggacaggaactttcctaacagcacaaatctcccccgcaacccttccatggccgactatgaggctcgcatattcacattcgggacttggatctactccgtgaataaggagcagctggccagagctggcttttacgcacttggagagggtgataaggtgaaatgctttcattgtggaggagggctgacagattggaaaccctccgaggatccctgggagcaacatgctaaatggtacccagggtgtaaatatttactggaacaaaagggtcaggagtacataaataatatccatttgacccactcgttggaggagtgtctggtgcggactacagagaaaaccccgagcctgactagacgaatagacgataccatctttcagaatcctatggttcaggaagccatcaggatgggcttcagcttcaaagatattaagaaaattatggaagagaagatccaaatctctggcagtaattataagtcccttgaggtcctggtggccgatctcgtgaatgcccagaaagactctatgcaagacgagtcctcgcagacatcactccagaaagaaataagcactgaggaacagctgcggagactacaggaagaaaaattgtgtaagatatgtatggatcgcaacattgccatcgtgtttgtgccctgcggacatctggtcacgtgcaagcaatgcgctgaggccgtggacaagtgccctatgtgttacaccgtcataactttcaaacaaaagatctttatgtcttag

SEQ ID NO: 27070 - DNA, 51 bp, synthetic construct
  misc_feature 1..51: note = Description of Artificial Sequence: Synthetic coding sequence
  source 1..51: mol_type = other DNA
atgaccttcaacagcttcgagggcagcaagacctgcgtgcccgccgattag

SEQ ID NO: 27071 - DNA, 471 bp, synthetic construct
  misc_feature 1..471: note = Description of Artificial Sequence: Synthetic coding sequence
  source 1..471: mol_type = other DNA
atgaccttcaacagcttcgagggcagcaagacctgcgtgcccgccgatattaataaagaggaggaatttgtagaggagttcaacagattgaagaccttcgcaaacttcccttctgggtcccctgtttccgcttccacccttgctagagccggcttcctctatacaggcgagggcgatacggtgcgctgtttttcatgtcatgccgcagtcgacagatggcaatatggcgactccgccgttggaaggcaccggaaagtcagccccaactgccgcttcattaatggcttttatctggagaacagtgccactcagagtacaaactctggaatacagaacggacagtacaaggttgaaaactatctggggagcagagatcactttgcactcgaccggccttccgaaacacacgccgactacctcttaagaacagggcaagttgttgacatcagcgacaccatatatccacgctag

SEQ ID NO: 27072 - DNA, 1494 bp, synthetic construct
  misc_feature 1..1494: note = Description of Artificial Sequence: Synthetic coding sequence
  source 1..1494: mol_type = other DNA
atgaccttcaacagcttcgagggcagcaagacctgcgtgcccgccgacatcaacaaggaagaagaattcgtggaagagtttaatcggctcaaaacattcgccaactttccgtcaggttcccctgtttctgcgagcactttggcccgcgccggattcctgtacaccggcgaaggcgataccgtgcggtgtttcagctgtcacgccgctgtggatcgctggcagtacggggacagcgctgtcgggcgccaccgcaaagtcagcccgaactgtaggtttatcaacgggttttatctggaaaactctgccacccagagtacaaactccggcatccaaaacggccagtacaaggtggaaaactatctgggatctcgtgatcactttgctctagatcggcctagtgagacgcacgccgattaccttctgcgcacagggcaggtagttgatatcagcgatacaatttatccaagaaacccggccatgtattccgaagaggcccgactgaagagttttcagaattggccagattatgcccacctcactccacgggaattggcttccgccggattgtactacaccggcatcggagatcaggtccagtgcttttgctgcggaggtaaactcaaaaactgggagccttgcgatagagcctggagcgaacatcggcgacattttccgaattgtttctttgtccttggccgcaacctgaatattaggtctgagagcgacgcggtgtcttctgacaggaattttcccaactccactaatttgccaaggaatcctagcatggcagactacgaggcccgcatctttacctttggtacgtggatttattccgtgaataaagaacagctcgcgagagccggcttctacgctctcggagagggcgataaggtgaaatgcttccactgcgggggcggattgactgattggaagcctagtgaggacccatgggaacagcacgctaagtggtacccgggatgcaaatatctgctggagcaaaaaggtcaggaatacattaataacatccacctgacccacagtctggaggaatgcctagtaaggaccactgagaaaacaccctcactgacaaggcggattgacgacacaatattccaaaacccaatggtgcaagaagccattcggatggggttcagcttcaaggatatcaagaaaatcatggaggaaaagattcagatttccgggagcaattataaatctctggaagtcctggtggccgatcttgtgaacgcacagaaggactctatgcaggacgagtccagccaaactagcttgcagaaggaaatttccaccgaagagcagctccgaagattgcaggaggagaagctctgtaagatctgtatggatcggaacatcgccatcgttttcgtaccatgtgggcatcttgtgacttgcaaacaatgcgctgaagcggtagacaaatgtcctatgtgttataccgtcattacctttaaacagaaaatctttatgtcatag

SEQ ID NO: 27073 - DNA, 2568 bp, synthetic construct
  misc_feature 1..2568: note = Description of Artificial Sequence: Synthetic coding sequence
  source 1..2568: mol_type = other DNA
atggtggtgatggcccggctgagccggcccgagcggcccgacctggtgtttgaggaggaggatctaccctatgaggaagaaatcatgaggaaccagtttagcgttaaatgctggctgaggtacatcgagttcaagcagggagctcccaaacctcggctgaatcagctttatgagcgggctctcaaactacttccatgcagctataagctctggtatcgatacttgaaggcgcgcagagctcaggtcaagcatagatgtgtcaccgacccggcatatgaggacgtcaacaactgccatgagcgcgcatttgtgtttatgcacaagatgccacggctgtggctcgattactgtcaattcttgatggatcagggacgcgtaacacacacgcgcaggacttttgacagagcactgagagccctgcctattacacagcactcaagaatctggccactgtatttgcggtttttaagaagccacccgctaccggaaacggctgttagaggatacagaaggttcctcaagctgtcccctgaatcggcagaggagtacattgagtacctgaagagcagcgatcgcctggatgaagccgcccagagacttgcaaccgtggtaaatgatgagagattcgtgagcaaagccggcaaaagtaattaccaactatggcacgaactttgtgacctgatctctcagaacccagataaggtacaatcattgaatgtagatgccattatccggggtgggctgacaaggtttaccgaccagctcggcaaactctggtgttcccttgctgactattacatccgcagcggacactttgaaaaggccagagatgtctatgaggaggcgatccgcacggttatgacagtgagagatttcacccaagtgttcgactcatacgcccaatttgaggaatccatgatcgccgcaaaaatggaaaccgccagcgaattaggaagagaggaagaggatgatgtggatctggagctaaggttggctcgcttcgagcagctgatatccaggcgacccctgcttctgaactcagtccttcttcggcaaaatcctcaccatgtgcacgagtggcacaagcgagtggcgttgcatcaaggacgcccgagggagattatcaacacatacaccgaagcagtgcaaacagtcgatccattcaaggccacaggaaagccgcatacattgtgggtagctttcgcaaagttctacgaagacaacggccaactggacgacgctcgcgtgattctcgagaaagctaccaaggtgaacttcaaacaggtggacgatctggcatctgtttggtgtcagtgcggggagcttgagttgagacacgagaattacgatgaagccctgagattgttaagaaaggccactgcacttcctgccagaagagctgagtatttcgacggctcagaaccggttcagaatcgggtgtacaagtccctgaaggtttggtctatgctggcggacctcgaagagtccctaggcacgttccagagtacaaaggcagtctacgaccgcattctggatcttaggattgcaacgccacagatcgttatcaactacgcaatgttcttggaggagcacaaatattttgaagagtcttttaaggcctacgaacgcggtatttcactgtttaaatggcctaacgtgtccgatatctggtccacatatctgactaaattcattgccaggtacggcggtcgcaaactggagcgcgctagggatctgtttgagcaggctcttgatggatgccctcccaagtatgccaagactttgtatctgctctatgctcagctcgaggaggaatggggcctggccagacacgcgatggctgtgtacgaaagagccacacgagctgtggagccagctcagcaatacgacatgttcaatatttacattaaaagagcagccgaaatctatggagtcacacacacccgggggatatatcagaaagctattgaagttctgtcagacgaacacgcccgcgagatgtgccttcggttcgccgatatggagtgcaagctcggagagatagacagggcgagagccatttattccttttgctcccagatttgcgacccccgaacaacaggcgcattttggcagacgtggaaggatttcgaagtccgccacggcaacgaggacaccattaaggaaatgctgcggatcaggcgttccgtccaggcgacatacaacactcaagtaaactttatggcctctcagatgcttaaggttagcgggtcagctacaggcacagtaagcgacttggctcctggacagtctgggatggatgacatgaaactgttagagcagagagctgagcagctggctgctgaagccgaaagagaccagcccctgagagcgcaatccaagatccttttcgtgagatctgacgccagcagggaagagctcgccgaactcgctcagcaggttaatcctgaagagattcaactgggtgaagatgaagacgaagatgagatggacctcgagccgaacgaagtgcgcctggaacagcagagcgttcccgcagccgtgttcgggtcactgaaggaggattag

SEQ ID NO: 27074 - DNA, 2559 bp, synthetic construct
  misc_feature 1..2559: note = Description of Artificial Sequence: Synthetic coding sequence
  source 1..2559: mol_type = other DNA
atggcccggctgagccggcccgagcggcccgacctggtgttcgaggaagaagacctcccttacgaggaagagattatgaggaatcagttttctgttaaatgttggttgcgatacatcgagtttaagcagggcgctccaaagccccgcttaaaccagttatatgagagggctttgaagctgctaccttgctcctacaagctgtggtacaggtatctcaaagctagacgcgctcaggtaaaacaccgttgcgttacagaccctgcatatgaggacgtcaataattgtcacgagcgcgcctttgtgtttatgcacaagatgccccgcctttggcttgactactgccagtttctgatggaccaagggagagttactcacacgagacgaacattcgaccgtgcactgcgagctctgcctattacccagcacagtcgcatctggccattatacctgcgctttctcaggtcacacccattacccgagaccgccgtcagaggctaccgacgtttcctgaagttgagtcctgaaagtgctgaagagtacatagaatatctgaagagctccgacaggctggacgaagctgcccaacggctggccaccgtggtgaacgatgagcggttcgtctccaaggccggcaaatcaaactaccagctgtggcatgaattgtgcgatttgatatcccaaaaccctgacaaggtacagagcctaaacgtcgacgctataattcgagggggactgactagatttactgatcagctgggaaagctgtggtgctctttggccgactattacattcgcagcgggcactttgagaaagctcgggacgtgtacgaggaggccatcaggaccgtcatgacggtgcgagactttacccaggtgttcgacagctacgcccagttcgaggagtcaatgatcgctgcgaaaatggaaactgccagtgagttggggagagaggaagaagacgacgtggatctcgagctgaggctagcccgctttgaacagctcatctctcggcgtccattgctcctaaacagtgtgctactaaggcaaaatcctcatcatgtgcatgagtggcataaaagggttgcgctgcaccaggggagaccacgcgagatcattaatacatacacagaagcagtacagactgtggatccttttaaggcaactgggaaaccacacaccctgtgggtcgcttttgctaagttctatgaggacaatggtcagttagacgatgctagagtcattctagaaaaggcgaccaaggtgaattttaaacaggtggatgatctagccagtgtttggtgccaatgcggggagctggagctgaggcatgagaattacgatgaggctctgaggctgctgcggaaggccaccgcactacccgcccgacgtgccgagtacttcgatggaagcgagcccgttcagaaccgggtctacaagagcttgaaggtgtggtctatgctcgcggacttggaagaatccttgggcacgttccagagcactaaggcagtgtacgaccggatcttagatttgcggatcgccactcctcagattgtgatcaattatgctatgttcttggaggaacataagtattttgaagaatcattcaaggcatacgaaaggggtattagtctgttcaaatggccaaacgtctcggatatatggtccacttacttgacaaagtttatcgcccgctacggtggaagaaagctggaaagggcccgggacctgtttgaacaggcccttgacgggtgcccacctaaatatgctaaaactctgtacctgctgtacgcacagcttgaagaggaatggggcctagctcgtcacgcaatggcggtgtatgagagagccaccagggccgtggaacctgcacagcagtacgacatgttcaatatctacataaagcgggccgctgaaatctatggcgtgacacacaccaggggaatctatcagaaggctattgaggtgttgagcgacgaacatgcccgcgaaatgtgtctgcggttcgcagatatggagtgtaagctgggtgaaattgacagagccagagcgatctactccttctgcagccagatatgtgaccctagaactaccggggcattctggcagacttggaaagactttgaggttagacacggcaacgaagacacaattaaagagatgctgcgtattcggaggagcgtccaggccacgtacaacacacaagtcaacttcatggcatcacaaatgctgaaagtcagcggctccgcaactgggacagtatctgacttggccccaggccagtccgggatggatgatatgaagctgctggaacaacgggccgaacagcttgcagcagaagccgagagggaccagccgctgagagcccaaagcaaaatactattcgtgaggagtgatgcctcgcgcgaggagctcgccgagctcgcccagcaggtgaacccggaggagattcaactgggcgaagatgaggatgaggatgaaatggacttagagcccaatgaagtgcggttggagcagcaaagtgtgcccgctgcagtcttcggttcactgaaggaagactag

SEQ ID NO: 27075 - DNA, 1902 bp, synthetic construct
  misc_feature 1..1902: note = Description of Artificial Sequence: Synthetic coding sequence
  source 1..1902: mol_type = other DNA
atgcccgagatccggctgcggcacgtggtgagctgcagcagccaggactccacccattgcgctgaaaacctactcaaagccgacacgtatagaaaatggcgggcagcgaaggctggcgagaaaacgataagcgtggtccttcagctagagaaagaggaacagattcactctgtagacatcggcaatgacggctccgccttcgttgaagtgcttgtcggaagctcagcgggtggggccggggagcaggattacgaggtgcttttggtcacaagttcgttcatgagcccctccgagtctcgaagcggcagcaatcccaatagagtgcggatgttcggcccggacaagctagtacgtgcagccgcagagaaaagatgggatcgggtaaaaatcgtgtgcagccagccttacagcaaagattctcccttcggcctttcctttgtccgattccactcgcctcccgacaaagatgaggccgaggccccttcacagaaggttactgtcaccaaactgggacaattcagagtcaaagaggaggatgagagcgcgaattcccttcggcccggggccctgtttttttctcgtattaacaagacctctcccgtgacagcctccgatccggcagggccaagctatgcggccgctacgctgcaagcatcttctgccgccagctctgcttcccccgtatctcgcgctatcgggagcacttccaagcctcaagagagtccaaagggcaaaaggaagttagacttgaaccaggaggaaaaaaagaccccctccaagcccccagcccagctaagcccttccgttccaaagcgacctaagcttcccgcccccacccgaacaccagcgaccgcccctgttcctgccagagcccagggggcagtcacaggcaagcctagaggcgagggtaccgagcctagacgaccgcgggccggccccgaggaacttggtaagatactgcagggggtggtagttgtgctgagtgggttccagaatccctttcggtccgagcttcgcgacaaagcactggaactcggcgcaaagtacagacctgactggactagggatagcactcacctcatctgcgccttcgccaacactcctaagtactctcaagtcctaggattgggaggccggatcgtacggaaagagtgggtgttagactgccacagaatgcgccgaaggcttccttctcagaggtatcttatggctggaccggggtcgagctcagaggaagacgaagcatcgcatagtggtggctctggcgacgaagcacctaagctccctcagaagcagcctcagacaaagactaagcccacgcaggctgccggccccagttcacctcagaagcctccaacaccggaagaaacgaaggctgccagtccggtgctccaagaggatatcgacatagaaggcgtgcagtcagaggggcaggacaatggagctgaagactctggcgacactgaggatgagctgcggagagttgccgagcagaaggaacataggctacctccgggacaggaagagaacggcgaggacccgtacgcaggatccacagacgaaaacaccgatagtgaggaacaccaagagcctcctgaccttccagtgccagagctacccgatttctttcagggcaaacacttttttctctacggcgaatttcccggtgacgagcgccggaagctcatacggtacgtgacagcttttaacggagaactggaggataatatgtctgacagggtacagttcgtgatcaccgcacaggagtgggacccctccttcgaggaagccttaatggacaatcccagtctggccttcgtgaggcccaggtggatttatagctgtaatgaaaaacagaagcttctgccgcaccagctgtacggtgtcgtgccacaggcttag

SEQ ID NO: 27076 - DNA, 1944 bp, synthetic construct
  misc_feature 1..1944: note = Description of Artificial Sequence: Synthetic coding sequence
  source 1..1944: mol_type = other DNA
agcaccagcagcttctggcccggcgaggcccacgacgtggacatgcctgagatccggctccggcacgtagtcagctgttctagccaagacagtacacattgcgccgaaaatctgctcaaggctgacacctatcggaagtggagagctgccaaagctggcgaaaagactatctccgtggttcttcaactggagaaagaggaacagattcattcggttgacattggcaatgatggatccgcctttgttgaggttctggtgggaagttcagcaggaggggcaggtgaacaagattacgaggtccttttggttacttcaagtttcatgagcccttccgaatctagatccgggagcaatcccaatagggttagaatgtttggacctgataaactcgtgcgtgcagccgccgaaaaacggtgggacagggtgaaaatcgtgtgtagtcagccctactccaaggattccccattcggactttcatttgtgcgtttccacagcccaccagataaagatgaggccgaggctccgagtcagaaggttaccgtgacaaagctcggccagtttagagtgaaggaagaagatgaatccgccaacagcctgcgcccaggcgcactgttttttagtagaatcaataaaacgtcgcctgtcaccgcctctgaccccgcaggaccgagttacgcagctgctaccctgcaggcatcttctgcagcgagctcagccagccccgtgtctcgcgctattggaagcaccagcaagccacaggagagtcctaaggggaagaggaagttggatctgaaccaagaggaaaagaagacccccagcaaaccacccgcgcagctgtcaccctccgtaccgaagaggccgaaactgccagcacctactcgcacccccgctaccgcccctgtgccagcacgagctcagggggctgtcaccggcaagcctcgcggcgagggtacagagccgagacggcctagggcaggaccggaagagctcggtaagatactacagggcgtcgtggtcgtgctgagcggatttcaaaatccctttcggagcgagctacgggacaaagcccttgagctgggtgccaaatacaggcccgactggacaagggactcaactcatctgatctgtgcctttgcaaacaccccaaagtattcccaggtgttaggactgggaggcaggatcgtgcggaaagagtgggtgctggactgtcaccggatgagaagacggttgccaagtcagaggtacttgatggctgggccaggcagcagcagcgaggaggatgaggcttctcattcaggagggagtggcgacgaagcccctaagctgcctcagaagcagcctcagacaaagaccaaacccacacaggctgccggaccctcctcccctcagaagcctccaacacccgaggaaactaaggcagcatctcctgtcctgcaagaagatatcgatatcgagggcgtacagtcggagggtcaggataacggtgctgaggattctggggatactgaggatgagctacgccgggtcgcagaacaaaaggagcataggctgccccctggccaggaagagaacggcgaagatccctacgcaggcagtacagatgagaacacagacagcgaagagcaccaggagccgcccgacctgccagtgcccgagttgccagatttttttcagggcaaacactttttcctgtatggagagtttccaggtgacgaacgtcggaagcttataagatacgtaactgcctttaacggtgaattagaggataatatgtcggatagggtccaattcgtgatcactgcacaggagtgggatcctagtttcgaggaagcactaatggataacccatctttggcctttgtccggcctaggtggatctatagttgtaatgagaaacagaaactgcttccacaccagctttacggagtggtaccgcaggcctag

SEQ ID NO: 27077 - DNA, 1203 bp, synthetic construct
  misc_feature 1..1203: note = Description of Artificial Sequence: Synthetic coding sequence
  source 1..1203: mol_type = other DNA
atgcccgagatccggctgcggcacgtggtgagctgcagcagccaggacagtactcattgtgccgagaatctactcaaagcggatacttatcggaaatggcgggctgctaaagccggggaaaagaccataagcgttgtcttgcagcttgagaaagaggagcagattcattccgtcgatattggaaacgacgggtccgcttttgtcgaagtccttgtgggttcctccgccgggggagctggggaacaagactacgaggtgctcctagtgacctccagctttatgagcccttccgaatcacggtcagggtccaaccctaaccgggtgaggatgttcggacctgataagctggtgcgtgcagcagcagaaaaacggtgggatagagttaagatagtctgcagtcagccatattcaaaggatagtccattcgggctgtcttttgtccgtttccactcgccaccagacaaagacgaggctgaggccccatcacagaaggtaactgtcactaaattggggcagtttagggttaaggaagaagatgagagcgccaactcactgcgacctggcgcgttgtttttctctcggatcaacaagacctcccccgtcaccgcatccgacccagcaggaccaagttacgccgcagcgacccttcaggcatcttccgcggccagctctgcttcaccagtatccagagccattggatctacgagcaaacctcaggaaagtccaaagggcaaaaggaagttggatctgaaccaagaagaaaaaaagaccccaagtaagcccccagcccagctgagtcctagcgtgccaaagcgcccgaaactgccagcccctaccaggacaccagccactgctcccgtccccgctcgggctcagggggccgtgactggtaagcccagaggggagggtacagaacctcgccggcctagggccggacccgaggaactcggcaaaatattgcaaggggtcgtggtggtccttagtgggtttcagaaccccttcaggagtgagctgcgtgataaggctttggaattgggcgccaaataccgccccgactggaccagagattccactcacttgatctgtgcctttgccaatacacccaagctgccccagaaggttccacctcaacacacgcctgatcagaaccaggcccactcaggatcctggacccaattgacccccgaggcacctaacccttag

SEQ ID NO: 27078 - DNA, 1809 bp, synthetic construct
  misc_feature 1..1809: note = Description of Artificial Sequence: Synthetic coding sequence
  source 1..1809: mol_type = other DNA
atgcccgagatccggctgcggcacgtggtgagctgcagcagccaggactctctggaaaaagaggagcagatccattcagtggatattgggaatgatggttccgcattcgttgaagtgctcgttgggagctccgccggaggagcaggcgaacaagattacgaggtcctgttagtcacctcatcttttatgtccccgtctgaaagccggagcggctctaatcccaatcgagtcaggatgttcggcccagacaaactggtccgcgctgccgcggagaaacggtgggatcgcgttaagatcgtctgctctcagccttatagcaaagactctccatttggcttaagctttgtgcgattccattcacccccagacaaagatgaggctgaggcacccagccagaaagtcaccgttactaagttgggccagttccgcgtcaaggaagaggatgaaagcgcgaactccctaaggccaggcgctctcttttttagcaggatcaacaaaacatcacctgtgacagcttccgatcctgccgggccctcctacgccgccgcaactctgcaggcatcgtccgcagctagttccgcctcccccgtgtcccgcgccatcgggagcacctccaaacctcaagaatctcccaaggggaaaagaaagcttgatttaaatcaggaagagaagaagacccctagcaagccccctgcacagctcagtccatccgttcctaagcgccccaagctgccagctccaacccgaactcccgcaaccgctccagtgccggcgagggcccaaggcgcggtaacaggaaagccacgcggggaaggtacagagccacggaggccaagggctggtccggaagagttaggaaaaatcctgcagggagtggtcgttgtgctcagtgggtttcagaacccatttcgctccgaactccgagacaaggccctggagctcggcgccaagtacagacctgattggactagagacagtacccacttgatttgtgcctttgcgaacacgcccaagtattcacaggtccttggactcggaggaagaattgtgagaaaggagtgggtactggactgccacaggatgaggcggaggctgccatcccaacggtatctgatggctggccccggaagctccagtgaggaggatgaagcttcgcatagcggtggatctggtgacgaggcacccaagctgccacagaaacagcctcagaccaagacaaagccaactcaggcagctggccctagttcgccacagaaacctccaacccccgaagagacaaaagcagcctccccagtgctccaggaagacatcgacatcgagggggtccagtcagaaggacaggataacggagcggaggactccggcgataccgaagatgaactgcggcgcgttgcggagcaaaaggagcacagactgccaccaggccaggaggagaatggagaagacccatacgctggttccacagatgagaatacggacagcgaagaacatcaggaaccccccgacctgccagtgccggaactcccagattttttccagggaaagcacttctttctatatggcgaatttcctggcgacgagcgcagaaaactcattcggtacgttaccgcctttaatggagagctggaagacaacatgtccgaccgagttcagttcgtgattacagctcaggagtgggacccttcctttgaagaggctctgatggacaatccctcattggccttcgtcagacccaggtggatctactcttgtaacgagaagcagaaattgctgccacaccaattgtatggagtcgtgccccaagcatag

SEQ ID NO: 27079 - DNA, 843 bp, synthetic construct
  misc_feature 1..843: note = Description of Artificial Sequence: Synthetic coding sequence
  source 1..843: mol_type = other DNA
atgtgcagcgccttccaccgggccgagagcggcaccgagctgctggcccgtctagagggaagatcctctctgaaagagatagagccgaacctcttcgcagacgaggattctcccgtgcacggagatatcttggaatttcacggtccagagggcacaggcaagaccgaaatgctttaccatctgacagcccgctgcattctcccaaaaagtgagggaggcctagaggtggaggtcctctttatcgacacagattaccacttcgatatgcttagactggttaccatcctcgagcacagactttctcagagcagcgaggagatcatcaaatattgcctcggcagattttttctggtgtattgctctagctccacccatctgctgctcaccttgtactctttggaatccatgttttgcagccacccatctctgtgtctactgatccttgactcactgagcgcattctactggatcgatagggttaatggaggggaaagcgtgaacctccaggagagtaccctgcgcaagtgcagtcagtgtcttgagaaactggtgaacgattacagactcgttctgtttgcaacaacacaaaccataatgcagaaggcctcaagtagcagtgaagagccttcacatgcatcccggaggctgtgtgatgtggacatagactacagaccctatctttgtaaggcttggcaacaacttgtgaaacatcggatgtttttcagcaagcaggacgattcccagtcttcaaatcaatttagccttgttagtcggtgtctgaagagcaacagtctcaaaaagcactttttcatcattggtgaatccggcgtggagttttgctag

SEQ ID NO: 27080 - DNA, 1041 bp, synthetic construct
  misc_feature 1..1041: note = Description of Artificial Sequence: Synthetic coding sequence
  source 1..1041: mol_type = other DNA
atggacctggacctgctggacctgaacccccggatcatcgccgccatcaaaaaggccaagctgaaaagcgttaaggaggtcctgcacttttccggacctgacctcaagcgcttaactaacctcagcagtcccgaagtctggcatctcttacggaccgcatccctacacttaagaggatcatcaattctgacagctctgcagctgcaccagcagaaggagaggtttcccactcagcatcaaaggctgagtcttgggtgtcccgtcctggatgctttgctccgcggcggtctgcctctggatggcatcactgagctggccggaagatcctccgcagggaagacgcagcttgccctgcagttatgcctcgccgtgcagttcccgagacagcacggcggacttgaggccggcgcggtatatatttgtacagaggatgcgtttccccataagcgactgcagcagctgatggctcagcagccaagactacgcactgatgtgccgggtgaactgctgcaaaagttgaggttcggcagccaaatctttatagagcatgtagccgatgtcgacacccttttagagtgtgtgaacaaaaaggtgccggtgctgctgtcaaggggaatggctcgcctggtcgtgattgattctgttgccgctcccttcaggtgcgaatttgattctcaggcgtcggcgccccgggcccgacatctgcagtctctgggagctacactgcgagaactgtcgagcgcttttcagagccccgttctctgcattaaccaggtaaccgaagctatggaagagcagggggctgctcatggtccacttggattttgggacgagagagtgtcccccgcactggggattacttgggcgaatcagctgttggtccgtctcttggcagatcgtttgagagaagaggaggccgccctgggctgtccagcacgaaccctgcgagtgctgtccgcaccccatctaccacctagctcgtgctcatacaccataagcgcagaaggggtcaggggcactcctggtacccaatcgcattag

SEQ ID NO: 27081 - DNA, 1041 bp, synthetic construct
  misc_feature 1..1041: note = Description of Artificial Sequence: Synthetic coding sequence
  source 1..1041: mol_type = other DNA
atggacctggacctgctggacctgaacccccggatcatcgccgccatcaagaaagccaagctcaagtctgtgaaggaggtgttacatttttccgggcctgatctgaaacgcctgactaatctatccagcccagaggtctggcacctgctaagaaccgcatcactgcacctgagagggtctagcatcctcacggcgttgcaactgcatcagcaaaaggagcgtttcccaacacagcatcagcgactgagcctagggtgtcccgtgctagatgcactgctgcggggcggcctccccctagatggtatcacggagttggccgggagaagctccgcggggaagacccaactggctctccagctatgtctggctgtacagttccccagacaacacgggggccttgaagctggcgcagtgtacatttgtactgaagacgcatttccacataagaggctgcagcagctcatggcgcagcagccacgacttagaaccgacgttcctggtgagcttttgcaaaaactgcgcttcggttcccagatatttattgaacatgtggctgatgtggacaccctcctggaatgcgtgaataagaaggttcctgttcttctcagccgggggatggcccggctggtggtgatcgacagcgtggctgctcccttccggtgtgagttcgactcacaagccagcgcgcccagggcccgacaccttcagagtctgggtgctacactcagagagttaagcagcgcattccaatctcccgtgctctgcataaatcaggtgacagaggccatggaagagcagggagctgcccacggtccactcggtttttgggatgagagggtgtccccagcccttggaataacatgggcaaaccaactcctggtgaggctgctggccgacagattgcgagaggaagaggcggcactgggctgcccagcccgcactctgcgcgtcctgagcgccccccacttgcccccgtcttcatgctcatacacaatttctgcagagggcgtcagaggcacacccggcactcaatcccattag

SEQ ID NO: 27082 - DNA, 1041 bp, synthetic construct
  misc_feature 1..1041: note = Description of Artificial Sequence: Synthetic coding sequence
  source 1..1041: mol_type = other DNA
atggacctggacctgctggacctgaacccccggatcatcgccgccatcaaaaaggcaaaactgaagtcagtgaaggaggtgctgcactttagcggcccagacctcaaaaggctgacaaacctctcttctcccgaggtttggcacttgctgcgtactgcgagcctccacttgaggggaagctctatcttaactgcgctgcagctgcaccagcagaaagagcgatttcccacccagcaccagcgcctgagcctggggtgtcccgtgctggatgccctcctacgagggggtcttcctctggatggcattaccgagttagcagggaggagtagcgcaggcaaaacacagcttgccctgcaattatgcctggcagtccagtttccccgccagcacggcggccttgaagctggggccgtatacatctgcaccgaggacgcatttccccacaagcgcctccagcaacttatggctcagcagcccagattaaggactgatgttcctggcgaactactccagaaactgcggtttggatcccagattttcatagagcatgttgctgacgttgataccctgctagagtgcgtcaataagaaagtgcctgttctgctgtcccgaggtatggcccggctagtggtaattgattccgtcgcagcaccatttcgctgcgagtttgatagccaggcatccgcccctcgagcaaggcatcttcaaagcctgggagccacgttgagagagctgtctagcgctttccagtctccagtcctctgtatcaaccaggtgaccgaagcgatggaagaacaaggagcagcacacgggccccttggcttctgggacgaaagggtcagtcccgctcttggcataacatgggcaaaccagcttctggtgcgccttcttgccgatcgtcttagagaagaagaggcggccctcgggtgccctgcacgcacattaagggttctcagtgccccacacctgccccccagcagctgctcttacacaatttcagcggagggtgtgagaggtactccggggacccaaagccactag

SEQ ID NO: 27083 - DNA, 144 bp, synthetic construct
  misc_feature 1..144: note = Description of Artificial Sequence: Synthetic coding sequence
  source 1..144: mol_type = other DNA
atggacctggacctgctggacctgaacccccggatcatcgccgccataaaaaaggccaagctgaaaagtgtgaaggaagtcttgcacttttccggaccagatctcaagcgccttacgaatctgtcctcccctgaggtttggtag

SEQ ID NO: 27084 - DNA, 138 bp, synthetic construct
  misc_feature 1..138: note = Description of Artificial Sequence: Synthetic coding sequence
  source 1..138: mol_type = other DNA
atggacctggacctgctggacctgaacccccggatcatcgccgccattaaaaaagcgaaactgaaaagcgttaaagaggtactccatttcagcggccctgacctaaagaggctgaccaacctctctagcccagagtag

SEQ ID NO: 27085 - DNA, 1041 bp, synthetic construct
  misc_feature 1..1041: note = Description of Artificial Sequence: Synthetic coding sequence
  source 1..1041: mol_type = other DNA
atggacctggacctgctggacctgaacccccggatcatcgccgccatcaagaaagcaaagctgaaaagtgtcaaggaggtgctccatttctctggaccagacctcaaacgcctgacaaacctctctagccccgaagtttggcacctcctccgtaccgcatctcttcacctgaggggctcatccatcctgactgctctccaattgcatcaacaaaaggaaagattccccacacagcatcagaggctcagcttgggctgtccagtgctggacgcactgctccgtggagggctgccactggacggcattacagaactggccggacgaagtagcgcggggaagacccagctggcgctgcagttgtgtcttgccgtgcagttccctcgacagcacggagggttagaagctggagccgtgtacatctgcacggaagatgcatttccgcacaaaagattgcaacagctgatggcccagcagccccgcctgcgcacagatgtgcccggggaattactgcagaaactgcggttcggatcacagattttcatcgagcacgttgctgacgtcgacactcttcttgagtgtgtgaataaaaaggtaccagtgcttctctctcgaggcatggctcgcctcgtggtgatcgattccgtcgccgccccgttccgatgtgaattcgattcccaggcatcagctcctcgggctcgacacctacagagcctgggtgcaaccctgagagaactgtcctcagcattccagtctcctgttctgtgtataaatcaggtgacagaggcaatggaggaacagggcgccgcacacgggcctctgggcttctgggatgagcgggtgagccctgcccttggcatcacctgggctaatcagctgctggttcgtctgcttgctgatcgactccgagaggaagaggcagcccttgggtgccccgccaggactcttagggttcttagcgcccctcatctcccaccctcgagctgtagctacaccatctctgccgagggagtccggggtactccaggcacacagagccactag

SEQ ID NO: 27086 - DNA, 1041 bp, synthetic construct
  misc_feature 1..1041: note = Description of Artificial Sequence: Synthetic coding sequence
  source 1..1041: mol_type = other DNA
atggacctggacctgctggacctgaacccccggatcatcgccgccattaagaaggcaaagctcaagtccgttaaggaagtgctccacttttccggacctgacctgaagcgtctgacaaacctgagctcccccgaggtgtggcatctcttgagaacagcttctcttcacctcaggggctcatctattctgactgcccttcagcttcaccagcaaaaggaacgcttcccaacgcagcaccagaggctctcactcggttgccccgtcctcgacgccctcctgagaggtggcctcccccttgatggtattacagaattagctgggcgctctagcgctggcaaaacccagttggccctgcagttgtgtctcgcagtacagtttccccgccagcatggggggctggaagccggggctgtctatatttgcacggaggatgctttcccacacaagagattacagcagctgatggcccagcagccaagactgcgcactgacgtgccaggggaactccttcagaaattacgctttggctctcagatcttcatcgagcacgtagccgatgtagacacactgctggagtgcgtgaataagaaggtgcctgtactgctcagcagagggatggcccggctcgtggtaatcgactcagttgccgccccttttagatgcgaatttgactcccaagcatcagcccctagggccaggcacctgcagagtcttggcgccacactgcgggagttgagctccgcttttcagagtccagtgctctgtatcaaccaagtgaccgaggccatggaagagcagggtgcggcccatgggcccctgggcttctgggacgaaagagtttctccagccttgggtatcacctgggcaaatcaattgctagtccgtctccttgccgataggctgcgtgaagaggaagcagccttgggatgtcccgcacgaaccttgcgcgttctttcagcgcctcacctgcccccctcttcttgttcatacacgataagtgccgagggcgtgagggggaccccaggcacacagagtcactag

SEQ ID NO: 27087 - DNA, 309 bp, synthetic construct
  misc_feature 1..309: note = Description of Artificial Sequence: Synthetic coding sequence
  source 1..309: mol_type = other DNA
atggacctggacctgctggacctgaacccccggatcatcgccgccatcaaaaaagctaaactaaagtcagtcaaggaggtcctgcacttttcaggccccgacctgaagaggctaaccaacttgtcttccccggaggtttggcaccttctccgaacagcatctctgcatttgcgcggttctagtatcctgacggcgctgcagcttcaccagcaaaaagagcgctttcctactcagcatcagaggttatcgctgggctgtccggtcttggatgcccttctccggggggggctgcccttggacggcatctag

SEQ ID NO: 27088 - DNA, 186 bp, synthetic construct
  misc_feature 1..186: note = Description of Artificial Sequence: Synthetic coding sequence
  source 1..186: mol_type = other DNA
atggacctggacctgctggacctgaacccccggatcatcgccgccatcaagaaagcgaagctcaagtccgttaaggaagtgctgcacttctccggacccgacctgaaaagactcacaaatctgtccagtcctgaggtctggcatctgctgagaactgcgtctctgcacctgcgagggtctagctag

SEQ ID NO: 27089 - DNA, 339 bp, synthetic construct
  misc_feature 1..339: note = Description of Artificial Sequence: Synthetic coding sequence
  source 1..339: mol_type = other DNA
atggacctggacctgctggacctgaacccccggatcatcgccgccatcaagaaggcgaaacttaaaagtgtcaaggaagttctgcacttttccggccctgacctgaaacggcttacaaatctgtccagtccagaggtttggcatctgctgaggaccgcttccctgcacctcagggggtccagcatcctgacagcactgcagctgcatcagcaaaaagaacgctttcccacccaacaccagcgcctatctctgggctgcccagttctagatgccctgctgcggggaggactgcctcttgatgggatcacagaacttgccggacgcagctctgcaggttag

SEQ ID NO: 27090 - DNA, 1005 bp, synthetic construct
  misc_feature 1..1005: note = Description of Artificial Sequence: Synthetic coding sequence
  source 1..1005: mol_type = other DNA
atggagcggaagatcagccggatccacctggtgagcgagcccagcatcacacactttcttcaggtttcctgggaaaagacccttgaaagtggcttcgtgatcactctgacagatggccattcagcatggacaggtaccgtgtcggaaagcgagatcagtcaggaagccgatgatatggctatggagaagggtaaatatgttggagagcttagaaaggccctgctctccggcgccggtcctgccgatgtgtacacgtttaatttttcaaaagaaagctgttattttttcttcgagaagaacttgaaagatgtctcgttccgcctcggctcatttaatttggagaaagtggaaaaccctgccgaggtaattcgcgagcttatatgctattgcctggatacgattgccgaaaatcaagccaaaaatgaacacctgcagaaggagaatgagagattactgagagattggaacgatgtccaggggaggttcgagaaatgcgtttccgccaaggaagccctcgagactgatctctataagagattcattctggttttgaacgaaaagaagaccaagattcgctctcttcacaacaagcttcttaatgccgcccaggagcgcgagaaggatatcaaacaagaaggcgagactgccatatgtagcgaaatgacggctgaccgggaccccgtttatgacgagtctactgacgaggagagcgagaaccagaccgatctgagcggccttgctagcgctgccgtctcaaaggacgattccattatctcctcccttgatgtgaccgatatcgcccccagtcggaaaagaagacagcgcatgcaaagaaacctagggacggaaccaaagatggcccctcaggagaatcaactccaggagaaggagaaacctgattcatctttacccgagacctcaaaaaaggagcacatctccgctgagaacatgtcactggagacccttagaaattcaagtcctgaggacctattcgacgaaatttag

SEQ ID NO: 27091 - DNA, 1011 bp, synthetic construct
  misc_feature 1..1011: note = Description of Artificial Sequence: Synthetic coding sequence
  source 1..1011: mol_type = other DNA
atggagcggaagatcagccggatccacctggtgagcgagcccagcatcacgcacttcctgcaagtctcatgggaaaagaccttggaaagcggattcgtcataactttgacagatgggcactccgcttggacaggtaccgtgtccgaaagcgaaataagtcaggaggctgacgatatggccatggaaaaaggtaaatacgtgggagaactgaggaaggctctgctcagtggtgctggacccgcagatgtatacactttcaatttcagcaaggagtcttgctatttttttttcgagaaaaacctgaaggatgtaagcttcagactcgggagcttcaatctggaaaaggtcgagaatccagcagaggtgattcgcgagctgatctgttactgcctggatactatcgccgaaaatcaggctaagaacgagcacctccagaaggagaacgagaggcttctgcgcgattggaatgatgttcagggccgctttgaaaaatgtgtctctgccaaggaagcccttgagactgacctgtataagagattcatactggtcttaaatgagaaaaagaccaagattcgttcccttcataataaattactcaatgccgcacaggaaagagaaaaagacattaagcaggagggtgaaaccgccatttgttccgagatgacggccgaccgggatcccgtgtatgacgaatccaccgacgaggagagcgaaaaccaaactgatctcagcggacttgctagtgctgccgttagtaaggacgactcaatcattagttccctggatgtcactgacattgccccatctagaaagagacgccaacggatgcaaagaaacctcggtactgagcctaagatggctccccaggaaaaccagctccaagagaaggagaactctaggccagacagtagtctgcccgaaacctccaaaaaagagcatatctcggcagagaatatgagtctggaaactcttcggaactcctctcccgaggacttatttgatgagatctag

SEQ ID NO: 27092 - DNA, 1005 bp, synthetic construct
  misc_feature 1..1005: note = Description of Artificial Sequence: Synthetic coding sequence
  source 1..1005: mol_type = other DNA
atggagcggaagatcagccggatccacctggtgagcgagcccagcatcacacatttcttgcaggtttcctgggagaagacgctggaatcaggcttcgtcatcacattgaccgatgggcattcagcatggacaggtacagtgagtgaaagcgagatcagccaggaggctgacgacatggcaatggaaaagggcaagtacgttggagagctacgcaaggctctgttatcgggtgccggaccagccgacgtgtacacctttaatttctccaaggagtcttgttacttctttttcgaaaagaacctgaaagacgttagctttcggctgggctcattcaacctcgagaaggtggaaaatcccgccgaggtgattcgtgaactgatttgctactgtcttgatacaatcgcagagaaccaggccaagaatgagcatctgcagaaagagaacgaacggcttctccgagactggaacgatgtgcaggggaggttcgaaaagtgcgtctcagcaaaagaagccctggaaaccgatctctataaacggttcattctggtgctcaatgaaaaaaagacaaaaattcggtcactgcacaacaaactactgaatgccgcccaagagcgagagaaggacattaaacaggaaggagagacagccatatgcagtgagatgacagcggatcgggatcccgtttacgatgagagcactgatgaagagtctgagaaccagacagatctcagcgggcttgccagtgcggccgttagtaaagacgattccattatctccagcttggacgttactgacattgccccttctcgaaagcggagacagagaatgcaacggaacttagggactgagcctaaaatggccccccaagagaaccaactgcaagagaaagaaaagccagattccagtttgccagagacatccaagaaggagcacatctcagcggagaacatgtcacttgagacgcttaggaatagtagcccagaggatctgttcgatgaaatctag

SEQ ID NO: 27093 - DNA, 1011 bp, synthetic construct
  misc_feature 1..1011: note = Description of Artificial Sequence: Synthetic coding sequence
  source 1..1011: mol_type = other DNA
atggagcggaagatcagccggatccacctggtgagcgagcccagcatcacgcacttcctgcaggtgtcttgggaaaagacgctcgaaagcggttttgtgataacactgaccgatggtcactctgcctggaccggcactgtctccgaaagtgagatcagccaagaggccgatgatatggctatggaaaagggtaagtacgtgggcgaactgaggaaagccctcctgtctggagctggcccagctgacgtatacacttttaatttctcaaaggagagctgctattttttttttgagaaaaatctgaaggacgtgagctttcgactgggatcatttaatcttgaaaaagtggaaaatcccgccgaggtgatcagggagctgatctgttattgcctggacaccatagcagaaaaccaggctaagaacgagcacctgcagaaggagaacgaacgactgcttcgggactggaacgatgtgcagggccgctttgaaaaatgcgttagtgctaaggaagcactggagacagatctctacaagaggtttatcctcgtcctgaatgaaaagaagactaagatccggagtttgcataacaagctgctgaatgcagcgcaagaacgggaaaaagacataaaacaagaaggagaaacagcgatctgctcagaaatgaccgcggaccgcgatccagtgtatgacgagagtaccgatgaggagagcgagaatcagacggacctgtcagggttagcctccgccgccgtttctaaagacgattcaattatcagttcactggacgttacagatatcgccccatctagaaagcgcaggcagcgaatgcagcgcaacctcggaacagaacccaagatggcccctcaggagaatcagctgcaggagaaagagaactcccgaccggactcaagcctgcccgaaacgagtaagaaagagcatatcagtgccgagaatatgagcttggagactcttaggaactcctcacctgaagacctttttgacgaaatttag

SEQ ID NO: 27094 - DNA, 186 bp, synthetic construct
  misc_feature 1..186: note = Description of Artificial Sequence: Synthetic coding sequence
  source 1..186: mol_type = other DNA
atgcagcggaacctgggcaccgagcccaagatggccccccaggagaaccagctccaagagaaggagaattcaaggcccgacagctcattgcctgagacgtcaaagaaagagcacatctccgcagagaatatgtccctggagacacttagaaatagttctcctgaggatttgtttgtgtccatctag

SEQ ID NO: 27095 - DNA, 2199 bp, synthetic construct
  misc_feature 1..2199: note = Description of Artificial Sequence: Synthetic coding sequence
  source 1..2199: mol_type = other DNA
atggtgcggagcggcaacaaggccgccgtggtgctgtgcatggacgtaggctttactatgtccaatagtatccctggtatcgaatcccctttcgaacaggccaaaaaagttatcacaatgttcgtccagaggcaagtgttcgcagaaaacaaggacgagatagccctcgttctgttcggtaccgacggcacggacaacccgctgagtggcggcgatcagtatcagaacattaccgtccaccggcacctaatgcttcctgatttcgacttattagaggatatcgagtccaagatacagccaggatcacagcaagccgatttcctagacgcactcatagtgtctatggacgtgatccagcatgagacaatcgggaaaaagtttgagaagcgccatatcgagattttcaccgacctgtctagtagattctctaaatcacagctcgacataattatccacagcctgaagaagtgtgacataagcttgcagttctttctacccttcagcctcggaaaggaggacggttctggcgaccggggcgatggtcctttccggctgggtggtcacggcccgtcttttcctctgaagggtattactgaacagcagaaagaaggccttgagattgtgaagatggtcatgattagcctcgagggagaggacgggctggacgagatctattcgtttagcgagtctcttagaaagctgtgcgtgtttaagaagatcgaacggcattcaattcattggccatgtcggctgaccatcgggtccaatcttagcataagaatcgccgcatacaaaagcatactccaggagagagtaaagaagacatggactgtagtggacgcgaaaaccctaaagaaggaagatatacagaaagaaacagtgtattgtttaaacgatgatgacgagacagaggtcctgaaggaggacatcattcaggggtttaggtatgggtccgacattgtgcccttctccaaagtggacgaagaacagatgaagtataagtccgagggtaaatgtttttcggtgctaggcttttgcaagagctctcaggtgcagaggcgattctttatgggaaatcaggttttgaaggtattcgctgcacgcgacgatgaggccgctgcagtggcattgagcagcctaatacatgcattggatgatctggacatggtcgcgattgtccgctacgcgtacgacaagagagctaatccgcaggtcggtgtcgccttccctcatatcaagcacaattacgagtgcctggtgtacgtccagttacccttcatggaagatcttaggcaatatatgttctcttctttgaaaaattcgaaaaaatacgcaccaactgaggcccagctgaatgccgtggacgctctgatcgactccatgagcttggcaaaaaaagacgagaagacggataccctggaagacttgttccctaccaccaagatcccaaacccccgctttcaacgattgtttcagtgcctgttgcaccgtgctctgcatccacgtgagcctctccctcccattcagcaacacatatggaacatgctgaacccacccgctgaagtcacaacaaagagccagattcccctatctaagataaagactctgttccctctcatagaggctaagaagaaggaccaggtcactgcgcaggagatttttcaggacaatcacgaggatggccccactgccaaaaaactgaagacggagcagggtggagcccatttctccgtgagctccctcgctgaaggctccgtaacgagtgtcggctctgtaaaccccgcagagaacttcagagtattggtaaaacagaagaaagccagtttcgaggaggcctcaaaccagctaattaaccacattgagcaattcctggataccaatgaaacaccctatttcatgaagagcattgactgcattagggcattcagagaagaggccattaagttctccgaggaacaacgcttcaacaattttctgaaggctctccaagagaaggtagagattaagcagctgaatcacttttgggagatcgtcgtgcaggacgggattaccttgatcactaaagaggaggcatctggatcatcagtgaccgccgaggaggccaagaaatttctcgctcctaaggacaagccgtccggtgacaccgcggctgtgttcgaagaagggggcgacgtggacgatttgctggatatgatttag

SEQ ID NO: 27096 - DNA, 2199 bp, synthetic construct
  misc_feature 1..2199: note = Description of Artificial Sequence: Synthetic coding sequence
  source 1..2199: mol_type = other DNA
atggtgcggagcggcaacaaggccgccgtggtgctgtgcatggacgtgggcttcacaatgagcaacagtatccccggaatagagagccctttcgaacaggctaaaaaggtgatcacgatgtttgtacagcgacaagtattcgcagagaacaaggacgagatcgcccttgttctgtttggaactgacgggactgataaccccctgtctggtggagatcagtaccaaaacataacagtgcaccggcatctgatgctcccagactttgatctgttggaggatatcgagtctaaaattcaacctgggtcacaacaggccgattttctcgatgccttgatagtgagcatggacgtaatccagcacgaaaccattgggaagaaattcgagaagaggcacatcgaaattttcactgacctcagctcccgcttttcaaagtcccagctggatatcattatccatagtctgaaaaagtgcgacatttctctccaattcttcctgcctttctctctcgggaaggaggacggctctggcgatcggggagacggaccctttcgactggggggacacggaccaagcttccccctgaagggaatcactgagcaacagaaagaaggtctggagatcgttaaaatggtgatgatcagcttggagggcgaagacgggctagatgagatctacagcttcagcgaatcactaaggaagctttgcgtgtttaagaaaattgaaaggcattccatccactggccctgtcgtcttactatagggtccaatctaagtattcggattgctgcctacaaatccatcttgcaggaacgggtgaaaaagacgtggacagtggtggatgcaaaaaccctgaaaaaggaggatatccaaaaggagacagtgtactgcttgaatgatgacgatgagaccgaggtgctgaaggaggacattattcagggcttccgctacggaagcgacatcgtcccattcagcaaagtggatgaggagcagatgaagtataagtctgaaggcaagtgtttcagcgtgttagggttttgcaagagctcgcaggtgcagcgccggtttttcatggggaatcaggtactaaaggtcttcgccgcaagagacgacgaagcagccgctgtggccctgtcaagtcttatccatgctctggacgacctggacatggttgctatcgtgagatacgcctacgacaagcgcgccaaccctcaggtcggcgtggcttttccacacataaaacataactacgagtgtttggtatacgtgcagctcccttttatggaagaccttaggcaatatatgtttagcagcctaaagaacagcaaaaagtacgctcctacagaagcccaactcaacgctgtcgatgcattgatcgattccatgtctctcgccaaaaaagacgaaaaaactgacactcttgaggacttgtttcccaccacaaagatcccaaacccaaggtttcaacggctattccaatgtctcctgcaccgggctctgcatccccgcgaaccacttcctccaattcagcagcacatatggaacatgctgaatccccctgctgaggttacgacaaaatcacaaatccctctcagcaagatcaaaaccctttttccactcatcgaagctaaaaagaaggaccaagtgacggctcaagaaattttccaggacaaccacgaggacggccccacggctaagaagttaaagacagagcagggtggcgcccatttcagcgtttcatctctggccgaggggagcgtcacttcggtaggttcagtcaaccccgctgagaatttccgggtgctcgtgaagcagaagaaagcatctttcgaggaagcttctaatcagcttattaatcacattgagcagtttctggatacaaacgaaactccatacttcatgaaatccatcgattgcatccgcgcctttcgcgaggaagctatcaagttcagcgaggagcaacggttcaacaactttctgaaagccctgcaggagaaagtggaaattaaacaactgaatcacttctgggagatcgtcgtacaggacggaataacactcattaccaaagaggaggccagtgggagttctgtgacggcagaggaggccaaaaaatttttagctccaaaggacaagccgtcgggagacaccgcagcagttttcgaggaaggcggcgatgtggacgatttgctggacatgatctag

SEQ ID NO: 27097 - DNA, 1830 bp, synthetic construct
  misc_feature 1..1830: note = Description of Artificial Sequence: Synthetic coding sequence
  source 1..1830: mol_type = other DNA
atgagcggctgggagagctactacaagaccgagggcgacgaggaggcagaagaggagcaggaagaaaatctggaagcatccggggattacaaatattctggacgggattccctcatttttctcgtggacgctagcaaggccatgttcgagtcacagagtgaagacgagctcactcctttcgatatgagcattcaatgtatccagagtgtgtatatctccaagattatatcaagtgatagggatcttctcgctgttgtgttttacggcacagagaaagataagaacagtgtgaattttaagaatatttacgtgctgcaggaactggacaacccaggcgccaaacggatcttggaattggaccagttcaagggccagcaggggcagaaaaggtttcaggatatgatgggccacggaagtgattatagcctctccgaggtgctgtgggtctgtgcgaacctcttctctgatgtccagttcaaaatgagccacaagagaatcatgttgtttacaaacgaagataatccccatggcaacgactccgccaaagcctctagggccaggacaaaagccggagacctgagggacacgggcatttttttggacctgatgcacctcaaaaagcccgggggatttgacatcagcctgttctaccgcgacattatttcaatcgcggaggatgaggatttgagggtgcattttgaggagagcagtaaactcgaagacctgctgaggaaggtgagagcaaaggagaccagaaagagggccctgtctaggctgaaactgaagttgaataaggacattgtaatatctgtcggtatctacaaccttgtccagaaggctctaaaacctcctccaatcaaactctaccgggaaacaaacgaacctgtcaagaccaaaactcgaaccttcaacacctcaaccggaggactactgttgcccagcgatacaaaacgctcccaaatctacgggtctcggcagatcatcctggaaaaagaggaaacggaagaactcaagcgtttcgacgaccccggactgatgctaatgggattcaagcctctcgtgttgctgaaaaaacaccactacctgcgccctagcctattcgtgtacccagaggaaagtctcgtcattggctcaagcaccctgttttccgccttactgatcaaatgtcttgaaaaggaggtggccgcgttgtgccgctatactcctaggagaaatatccccccgtattttgtcgccctggtgcctcaggaggaagaattggatgatcagaagatccaggtcacacccccgggtttccagctcgtgttcctaccctttgccgatgacaagagaaaaatgccatttactgaaaaaataatggcaacccccgaacaggtcgggaagatgaaagctatcgtggagaagctcaggtttacttaccggtctgatagcttcgagaaccctgtgctgcagcagcactttaggaaccttgaagcactggcactggacttgatggaaccagaacaggcggtggatctgacccttcccaaagtggaagccatgaataaaaggctgggcagtctagtagacgagttcaaggagctggtttacccgccagactacaaccccgaaggcaaggtaacgaagcggaagcacgataacgaaggctccggcagcaagagacctaaggtggagtacagtgaagaagagctcaaaacacacatctccaaaggtacactggggaaatttacggtcccaatgctgaaggaggcatgtagggcctatggactgaaaagcggtctgaaaaagcaggagctgttagaggctttaactaaacactttcaggactag

SEQ ID NO: 27098 - DNA, 1830 bp, synthetic construct
  misc_feature 1..1830: note = Description of Artificial Sequence: Synthetic coding sequence
  source 1..1830: mol_type = other DNA
atgagcggctgggagagctactacaagaccgagggcgacgaggaggctgaagaggagcaggaggagaacctggaggcctccggcgactacaagtatagtggtcgcgattccttgatctttttggtggatgcttcgaaagccatgttcgaatcccagtcagaagacgagctgacaccgttcgacatgagtattcaatgtatacagagcgtttacattagcaaaattataagctcggatcgcgatcttctggccgtcgtgttttatggaactgagaaagacaagaactcagtgaactttaaaaatatttacgttctgcaggaactggataacccaggcgccaagagaatacttgagctcgatcagtttaaggggcaacagggccagaaaagatttcaggacatgatgggtcacggttcagactattctctgagcgaggtcctttgggtttgtgcaaatctgttctcagacgttcagtttaaaatgtcccacaagcgcataatgctgtttaccaatgaagataatcctcacggaaatgatagcgcaaaggcctctcgggctagaactaaggccggcgacttgagggataccgggatcttccttgaccttatgcaccttaagaagcctggcgggtttgatatcagcctattctacagggatatcatatcaattgccgaagatgaagatcttcgcgtgcatttcgaggagtcatctaagttagaggacctgctgcggaaagtacgcgcaaaagagacccgcaagcgcgccttaagtcgactgaaacttaagcttaataaggacattgtgatatctgttggaatctacaatctcgtgcagaaagctttgaaaccccccccaattaaactctatagggagactaatgagcccgtcaaaacgaaaactaggaccttcaatacctcgacgggcggacttctccttccatctgatacaaagaggagccagatttacggaagcagacaaataatactggagaaggaggaaacagaggagctcaaacgtttcgacgacccagggctgatgctgatgggtttcaagccactcgtcctcctcaagaaacatcattacttgagaccctcattgttcgtgtaccccgaggagagtctcgttataggaagcagcaccctgtttagcgccctcctcatcaaatgcctggagaaagaagtggccgcactgtgtagatatacccctaggcgcaatattccgccatactttgttgcactcgtgccgcaggaggaggagctggatgatcagaaaatacaagtgacaccacctggtttccagttggtgttcctcccctttgcagatgataagagaaagatgccgtttaccgagaagatcatggcaacaccagagcaggtaggcaagatgaaagccattgtggaaaagctgcggtttacctatagaagtgattcttttgaaaacccagtgctgcagcagcattttagaaatctggaggctctggcccttgatctaatggagcctgagcaggccgtcgacttgacactacccaaagtggaggccatgaataagagactcggatccctggtggacgagtttaaggagctcgtctatccaccagactacaatccagaaggtaaagtgacgaagcgaaagcatgacaacgagggatccggctctaagaggccaaaggtggagtattctgaggaggaacttaaaacccacattagtaagggtactctaggtaagttcacggtgccaatgctcaaagaggcttgtcgcgcctacggtctgaaatccggactcaagaaacaagagctgctagaggccttgacaaagcatttccaggactag

SEQ ID NO: 27099 - DNA, 1674 bp, synthetic construct
  misc_feature 1..1674: note = Description of Artificial Sequence: Synthetic coding sequence
  source 1..1674: mol_type = other DNA
atgagcggctgggagagctactacaagaccgagggcgacgaggaggccgaggaagaacaggaagagaatctggaagcatccggggattacaagtactctggacgggactcactgatctttctggtggatgctagcaaggcaatgtttgagagccaaagcgaggacgagctgaccccctttgacatgtcaattcagtgtatacaaagtgtctacatctctaagattatttcttctgatagagacctgctggccgtggtgttctacggcaccgaaaaggataaaaactccgtcaacttcaaaaatatctacgtactgcaagagctcgataacccgggggccaaaagaatcctcgaactggaccagtttaaggggcaacagggccaaaagcgtttccaagacatgatgggccacgggtccgactacagtctctccgaggtcctgtgggtctgcgctaatctgttcagtgatgtgcagttcaaaatgagccacaagaggattatgctctttaccaacgaggataacccacacgggaacgatagcgctaaagcctcaagggctcgcactaaggcaggcgacctgcgcgatactggcatcttcctggatttaatgcatctaaagaagcccggcgggttcgatataagcctcttctaccgggacataatcagcatcgccgaggacgaggacctgcgggtgcatttcgaagagtctagtaagctagaagacttgctcaggaaagtgcgtgccaaagaaacgagaaaacgcgccctcagccgcctcaaactcaagttgaataaagacatagtaatctccgtcggcatttacaaccttgtccagaaggcgctgaaaccgccccccatcaagctgtatagagagacgaacgagcctgtgaaaactaagacacgcacatttaacacctcgaccgggggattgctgctgccatccgacactaagaggtcccagatctatggctcccgtcagatcatcctggagaaggaagaaactgaagagctcaaaagatttgatgacccaggccttatgcttatggggtttaaacctctcgtgctgcttaaaaagcaccactacctgcgaccttcactttttgtgtatcctgaagaatccctcgttataggctctagcacactcttttctgccctactgatcaaatgtctagaaaaggaggtcgctgcactatgccgttataccccccgccgcaatattcctccctacttcgtggccctggtcccacaggaagaggagctagacgaccagaagatccaagtcaccccacccggcttccagttggtgttccttcccttcgcagacgataagaggaaaatgcctttcaccgagaagatcatggctacacctgaacaggtcggcaagatgaaggcgattgtggaaaaattgaggtttacttatcgctcagatagttttgaaaatcctgtgttacaacagcactttcgtaatctcgaagccctcgccctggacctcatggaaccagaacaggctgtggacttaaccctcccaaaggtggaggcgatgaataaaagacttggatccttggtggacgagttcaaggaactggtttacccaccagactataaccctgagggtaaggtgaccaagcgaaagcacgctaaagggcctaggtggtcgatacaaaagcggtcgtag

SEQ ID NO: 27100 - DNA, 1707 bp, synthetic construct
  misc_feature 1..1707: note = Description of Artificial Sequence: Synthetic coding sequence
  source 1..1707: mol_type = other DNA
atgagcggctgggagagctactacaagaccgagggcgacgaggaggcagaggaggaacaggaagaaaatcttgaagcttctggtgactacaagtattccggcagagattccctgatcttcttggtcgacgctagcaaggctatgttcgagagtcagagtgaggacgagcttacgccttttgatatgtcaatccaggaattggataatcccggagctaaaaggatcctggaactggatcagttcaagggccagcagggccagaaacgctttcaggatatgatggggcatggatcagactacagcctgagtgaggtgctatgggtctgtgccaatttgttcagcgacgtgcaattcaagatgtctcataagagaatcatgctattcacgaatgaggacaaccctcacgggaatgatagcgcgaaggcatcccgggcccgtactaaggcaggcgacctccgcgacaccggcatattcctggacttaatgcacctaaaaaagccaggcggctttgacataagtcttttttaccgtgatattatcagtattgcggaggacgaggaccttcgagtgcacttcgaggaatcctccaaacttgaggaccttctccggaaagtgcgcgctaaagaaaccagaaagagagctctgtctcgactgaagctgaagctcaacaaggacatcgtgatctcagtggggatctacaatctggtgcagaaagcgctgaaaccacctccaattaaactgtatagggagaccaacgagccagtaaagactaaaacccgaacttttaatacatccaccggagggctcctgttgccctcagacaccaagcgctctcagatttacggctcccgccagatcattctcgagaaggaggaaaccgaggaactgaaacggttcgacgatccgggactgatgttgatgggtttcaaaccactggtgctgctgaaaaaacaccactatctgcgcccatcactgtttgtttaccctgaggagagcttggtgattggaagtagcacacttttttctgctctgctgattaaatgcctggaaaaagaggtggctgctttatgcaggtatacccctcggagaaacataccgccatattttgtggctctcgtccctcaagaggaggagctcgatgatcagaagatccaggtaacgccacccggctttcaactcgtatttttgccatttgccgacgacaaacgaaagatgccctttacagagaagatcatggcaaccccagaacaggtcggtaagatgaaagctatcgtggagaagcttagattcacctatcggtctgacagcttcgagaaccccgtccttcagcaacatttcagaaatttagaggctcttgctcttgacctcatggagcctgaacaggctgttgacctgacactgcctaaagtggaggccatgaacaaaaggttgggcagcctcgttgacgagtttaaggagctcgtctatccgccagattataacccggagggcaaggtgacaaagcgcaaacatgacaatgaagggtctgggagcaagcggccgaaggtagaatattcggaggaggaactgaaaacacatataagcaagggtactctgggcaagttcaccgtgcccatgctgaaagaagcctgccgggcttatggcctgaagagtggcttgaaaaaacaagagcttcttgaagcactgaccaaacactttcaagactag

SEQ ID NO: 27101 - DNA, 1680 bp, synthetic construct
  misc_feature 1..1680: note = Description of Artificial Sequence: Synthetic coding sequence
  source 1..1680: mol_type = other DNA
atgaagaagcagcggaagaacaagaagcggaccctgaagcaggtgtgtatccagtcggtctacatcagcaaaatcatatcctcggatagggatctgcttgcggttgtcttctatggaacagagaaggacaaaaatagcgtgaatttcaagaacatttatgtgctgcaggaactggacaatccgggagctaagagaatcctggaactggaccagtttaaggggcagcagggacagaaacggttccaagatatgatgggccatggctctgactactcgttatctgaggtgctgtgggtatgcgcgaatctgttctcggacgtccaatttaagatgtctcataaacggatcatgctgtttaccaacgaagacaacccccatggaaacgacagcgccaaagcttcaagagcccgtaccaaagctggcgacctccgggatactggcatattcttagatctgatgcacttgaaaaaaccaggcgggtttgacatatccctattctatcgcgatataatcagcatcgcagaggacgaggacctccgagtgcacttcgaggaaagcagtaagctggaggatcttctacgcaaggtgcgcgctaaagaaacccgcaagagagcccttagccggctgaagctcaaactcaataaggatattgtgataagcgtcggaatctacaatctggtccagaaggcactgaaacctcccccaatcaagctttatcgcgagacaaacgagccagtgaaaactaagacaaggacattcaacacgtcgaccggcggcttgctcctgccgagtgacactaagcgtagccagatttatggatccaggcagatcatcttagagaaggaagagactgaagagctaaagcggttcgatgaccctgggttgatgctgatgggattcaagccactggtgctccttaaaaaacatcactatttgaggccttccttgtttgtgtatcccgaagaaagtctcgtcataggatccagcactctattcagcgctttgctgattaagtgcctggagaaggaggtggcagcgttatgcaggtacaccccaaggagaaacattccaccttactttgttgcgctggtacctcaggaggaggagttggacgatcagaagattcaggtgacacccccggggtttcagctggttttcctgcctttcgccgatgataagcggaagatgccttttacagagaagatcatggcaacccccgaacaggtcggcaaaatgaaagccatcgtggagaaacttaggtttacctacagatctgattcttttgaaaatcctgtgctgcagcagcacttcagaaacctggaggcccttgccctcgacctgatggaacccgagcaggctgtggacctgacccttcctaaggttgaagccatgaataaacggttaggtagcttagtagacgagttcaaagagttagtttacccaccggactataatcccgaaggcaaggtgacaaagcggaaacatgacaatgagggcagcggatccaagcggccaaaggtcgaatacagcgaggaggagctgaagactcacataagtaaaggcaccctgggcaagttcacggtgccaatgctcaaagaggcttgccgcgcctacgggttgaaatcaggactgaaaaaacaggagctgctggaagctctgacaaagcacttccaggactag

SEQ ID NO: 27102 - DNA, 1830 bp, synthetic construct
  misc_feature 1..1830: note = Description of Artificial Sequence: Synthetic coding sequence
  source 1..1830: mol_type = other DNA
atgagcggctgggagagctactacaagaccgagggcgacgaggaggctgaagaggagcaggaagagaaccttgaagcgtctggggactataaatatagcgggcgtgacagtctgatcttcctggtggatgctagcaaggccatgttcgagagccagagcgaggatgagctcactcctttcgatatgtctattcagtgtatccagtccgtgtatatttctaagatcatctcatcagacagggaccttctggccgtcgttttttatgggacggaaaaggataagaactcagtcaactttaagaacatatacgtgttgcaggagctggacaatcctggcgctaaacggattcttgagctggaccagtttaagggccagcagggacagaaacgattccaggatatgatgggacatggtagcgattacagcctgtctgaggtcctttgggtgtgcgcgaatttgttttccgacgtacagtttaaaatgagccataaacggatcatgctgtttaccaatgaggacaaccctcacgggaatgatagcgcgaaagcctcccgcgctcggaccaaggcaggtgatctcagagacactggtatcttcctggacctgatgcacttgaaaaaacctggtggattcgatatctccttgttctaccgggatatcatttctatagcagaagacgaagaccttagggtgcatttcgaagagagcagcaagctggaggacctcttgcgtaaagtgcgggccaaggaaacacggaagcgggccctgagcagactgaaacttaaattgaataaggacattgtgatctctgtagggatctacaatttagtccagaaggccttgaagccacctcctataaaactgtatagagaaacaaatgagccagttaagacaaagacgcgcactttcaacacatctaccggtggcttgttgctcccttctgatacaaagaggagccaaatttacggcagtcggcagatcattctggagaaggaagagactgaggaactcaaaagatttgacgaccctggactgatgctaatgggttttaagcctctggttctgttgaagaagcaccactacctgaggcctagcctattcgtttacccagaagagtctcttgtgatcggaagttcaacattgttctcagccctcctaattaagtgtctggaaaaagaagtcgccgccctctgccgatataccccgcggagaaacatacctccatacttcgtggctttagtaccacaggaagaggagcttgacgatcaaaagatacaggttactccgcccgggtttcagctggtcttcctcccatttgctgatgataaacgtaagatgccgttcaccgaaaaaatcatggctacacctgaacaggttggaaaaatgaaggccatcgtcgagaagctgagattcacatacagatcagacagcttcgagaatcctgttctgcagcagcacttccgaaatctcgaagccctggccctcgaccttatggaacctgagcaggctgtagatctgaccctgcctaaggtggaggctatgaacaaacgattgggctcgttggtcgacgagtttaaagaactagtatatcctcctgattacaatcccgagggaaaggtcacaaaacggaaacacgacaatgagggaagcggctcaaaaaggccaaaggtggagtatagtgaggaggaactcaagacccatatctccaagggaactttaggaaagttcacagttcccatgctcaaagaagcctgccgggcctacgggctcaagagtgggcttaagaaacaggaactcctcgaagctttgaccaaacacttccaagactag

SEQ ID NO: 27103 - DNA, 1431 bp, synthetic construct
  misc_feature 1..1431: note = Description of Artificial Sequence: Synthetic coding sequence
  source 1..1431: mol_type = other DNA
atgatgggccacggcagcgactacagcctgagcgaggtgctgtgggtgtgtgccaatctgttctcagatgtccagtttaagatgtctcacaaacgcattatgttgtttacgaacgaggacaacccacacggaaatgattctgctaaagcatcccgcgcgcgtactaaggctggagatctgagggacaccggaatattccttgacctgatgcacctgaaaaagcctggtggattcgatatcagcctgttctacagggatatcatttcgatcgctgaagacgaggatctgcgggtccacttcgaagagtcctctaaactcgaggacctgctgcgaaaagtacgggcaaaggagactcgcaaacgggctctaagtcggttgaaactgaagcttaataaagacattgtgatttctgtgggcatatacaatctggtgcagaaggctctcaaaccaccaccaattaagctttaccgagagaccaacgagcccgtcaagacgaagactaggactttcaacacctctactggtggcctccttctcccaagtgatacaaagcggtcgcagatttatggcagccgccaaatcatcctggaaaaggaagagaccgaagaattgaaaaggttcgatgatcctggcctgatgcttatgggtttcaagcccttggtactccttaaaaaacaccactatctgcggcctagtttatttgtgtacccggaggagagcttagtcataggcagtagtactttattctcggcactgttgattaagtgcctggaaaaagaggttgccgccttatgccggtatactcccaggcgcaacattccaccatatttcgttgccttagtccctcaggaggaagaactggatgatcagaaaatccaggtaacaccccccggcttccagcttgtctttctcccatttgctgatgacaagcggaagatgcctttcaccgagaaaattatggcgacaccagagcaggtcggaaagatgaaggccatagtggagaaactacgttttacttaccggtccgactcctttgagaaccctgttctccagcagcatttcaggaatctggaggcactcgctctcgatttaatggaaccggaacaggcggtcgacctgactctgccaaaggtcgaggccatgaacaaacgtctcggtagcctcgtagacgaatttaaggagttggtctacccgcccgactataacccagaggggaaggtgacaaaacggaagcatgataacgaggggtctggatctaaacggccaaaggttgagtacagcgaggaagaacttaaaacccacatttcaaaagggacactgggaaagttcaccgtgcctatgctgaaggaagcgtgtcgagcctatgggttgaagtccggtttgaagaagcaggagttgcttgaagctctgacgaagcacttccaggactag

SEQ ID NO: 27104 - DNA, 741 bp, synthetic construct
  misc_feature 1..741: note = Description of Artificial Sequence: Synthetic coding sequence
  source 1..741: mol_type = other DNA
atggccggcgcccccgacgagcggcggcggggccccgccgccggcgaacagctccagcagcaacatgtgagttgtcaggttttcccggaacgcctggcccaaggaaatcctcaacaaggcttcttctcctctttttttacctctaaccagaagtgtcagcttaggctgctcaaaaccttagagactaatccatacgtgaaactgctattggatgccatgaagcattcagggtgcgcagttaataaggataggcatttcagttgtgaggattgtaacgggaatgtctccggcgggtttgacgcctcaacaagccagatcgtgttgtgccagaacaacatccataaccaggctcatatgaatcgcgtcgtgactcatgagctgattcatgcattcgaccattgcagggcacacgtcgactggtttacgaacattagacacctggcttgcagcgaagtgcgggctgccaacctgtctggagactgctccttggttaatgaaatcttcaggctccactttgggttgaaacaacaccaccagacttgtgtccgcgacagggccacgctctcaatcctggcagttaggaatatctcgaaggaggtagccaagaaggctgttgacgaggttttcgagagctgtttcaacgaccacgaaccatttggccggatcccccacaacaagacctatgctaggtatgcccaccgggacttcgaaaacagggacaggtactatagtaacatctag

SEQ ID NO: 27105 - DNA, 1515 bp, synthetic construct
  misc_feature 1..1515: note = Description of Artificial Sequence: Synthetic coding sequence
  source 1..1515: mol_type = other DNA
atggaccccggccagcagccccccccccagcccgccccccagggccaggggcagcctcctagccaaccaccccagggtcaggggccgccatccggcccggggcagcccgccccggccgccactcaagccgcacctcaggcccctcccgccgggcatcagattgttcatgtccgaggcgatagcgagacagatctggaggccctgttcaatgccgtcatgaaccccaagacagcgaatgtccctcagactgtccctatgaggttacgcaaattgcctgactcattctttaagcccccagagccaaagtctcacagtagacaagcctccaccgacgctggcactgccggcgcacttaccccccaacatgttagggcccacagttcacccgctagtctccagctcggagcggtgagccctggtactctcacacccacaggagtggttagcggccccgcagctacacctaccgcccagcacctccggcaaagcagcttcgaaattcccgatgatgtccccctgccagcgggctgggagatggccaagacaagttctggccaacgctacttcctgaatcatatcgatcagactactacttggcaggatcctagaaaagccatgctgagtcagatgaatgtgaccgctcccacctcacccccagtccaacaaaatatgatgaactctgcttcgggccctttgcccgatggctgggaacaggccatgacccaagatggcgagatttactacattaatcataagaataaaacgacttcttggttggacccaaggctggacccaagattcgccatgaatcaacggatttctcagtcagctcctgttaaacagcccccccccttagcccctcagagtcctcagggaggtgtgatgggaggcagtaattccaaccaacagcagcagatgcgactgcaacagctccaaatggagaaggaacgactgcggctcaagcaacaagaactgctcagacaggctatgagaaacatcaacccttccaccgccaactcacccaaatgccaggaactcgctttgcggtcccagctgcctacacttgaacaagatgggggcactcagaaccctgtttcatctcctggcatgagccaagagttgcgaaccatgacaacaaattcttctgacccctttctgaactctggaacgtatcattcaagggatgagtcaaccgattccgggctctcaatgtctagctatagcgtcccccggacacctgatgatttcctgaactctgtggacgagatggacacgggggacaccatcaaccaaagcacactcccttcacagcaaaacagatttcctgattacctggaagcgatccccggcactaacgtcgacctggggacactggagggggacggcatgaacatcgaaggtgaagaactaatgccttctctgcaagaggctctgagtagcgatattttaaacgatatggagtcagtgctggctgctacaaaactcgacaaggagtcttttctgacctggttatag

SEQ ID NO: 27106 - DNA, 1365 bp, synthetic construct
  misc_feature 1..1365: note = Description of Artificial Sequence: Synthetic coding sequence
  source 1..1365: mol_type = other DNA
atggaccccggccagcagccccccccccagcccgccccccagggccagggccagccaccctcccagcctccccagggccaggggccaccttcgggcccaggccaacccgcacctgcagcgacgcaagcggcacctcaggccccccccgccgggcaccaaattgtgcatgtgcggggagatagcgagacagacctggaggctttgttcaacgctgttatgaacccaaagaccgcgaatgtgccccagaccgtcccgatgcgcctcaggaagctgccagacagctttttcaaaccacccgagccgaaaagtcattcccgccaggctagcacagacgctggaactgctggggccttgaccccgcagcacgttagggctcactcaagcccggcctcacttcagctgggggccgtgtcccctggaacgctgacacctacaggtgtcgtctccgggccagcggctacacccaccgcccagcatctacgtcaatctagttttgagatccccgatgatgtcccactgcctgcaggctgggaaatggcaaagacaagctccggtcaacgatatttcctcaatcacattgaccaaacaactacttggcaggacccacgcaaagcaatgctatcccagatgaatgtcaccgctcccacctccccacctgtccagcagaacatgatgaattctgcgagcgctatgaaccagaggatcagtcaatccgccccagtgaagcagccacccccactggctccgcaatcacctcagggaggggttatgggcggctccaacagtaaccagcaacagcagatgcgcctccaacagcttcagatggaaaaggaaaggctgcgtctgaaacagcaagagttgctgcgacaggtgaggcctcaggagctggctctcagaagccaactgcctactcttgagcaagacggaggcacgcaaaaccccgtcagttctcccgggatgagtcaggagttgcgcaccatgacaactaattcgtccgatccattccttaattcaggaacatatcactctagagacgagtctactgatagcggactcagcatgagtagctactcagttcctcgcactcctgatgattttctgaattctgtggacgagatggacactggcgacacaataaatcagtctacactccccagccagcagaacaggttccccgactacctggaagcgattcccggtaccaacgtcgacctcggtacgcttgagggggacggcatgaacatcgaaggagaggagttgatgccctcactgcaagaggctctgtcctccgacatcttgaatgatatggaaagcgttcttgctgcaaccaagctggacaaagaatctttcctgacctggctgtag

SEQ ID NO: 27107 - DNA, 1266 bp, synthetic construct
  misc_feature 1..1266: note = Description of Artificial Sequence: Synthetic coding sequence
  source 1..1266: mol_type = other DNA
atgcggctgcggaagctgcccgacagcttcttcaagccccccgagccaaagtcccattcccgccaggcatcaacagatgcggggaccgctggggcacttactccccagcatgtccgcgcacatagttctccagcttctttgcagcttggtgccgtgtcacccggaaccctgacgcctacaggggtggtaagtggtccggcagcgacccccactgcccaacatctgaggcaatcttcatttgagatccccgacgatgtccctctcccggcagggtgggaaatggcaaagacctcaagcgggcagcgatacttcttaaaccacatagatcagaccaccacgtggcaagatccgcggaaagcgatgctctcccaaatgaacgtcaccgccccgactagtccccctgtgcagcagaacatgatgaattccgcaagcgggcctctacctgatggatgggagcaagccatgacacaggatggtgagatttattatatcaatcataagaataagactacgtcctggctggaccccaggctggatccaagattcgggaaggcaatgaaccagaggatcagccaaagcgctcctgtgaagcagccacctcctctggccccacagtctccccaaggcggggtaatggggggctcgaactcaaaccagcagcagcagatgcgcctacagcagcttcagatggagaaagaacgtttgaggctcaagcagcaagaactgctgcggcaggcgatgcgtaatattaatccaagcaccgccaattctccaaaatgtcaggagctggctctgcgcagtcagctcccaaccctcgagcaggatgggggcacacagaaccccgtgtcatcgcccggtatgagccaggaactgaggactatgactaccaactcctcggaccctttcctcaacagcggaacctaccattcaagagatgagtccactgatagcgggttgtccatgagcagctactcagtgcctagaacaccggacgatttcctgaacagcgtggacgagatggataccggtgacacaatcaatcagtccacactcccatcccaacagaaccggttcccagattatctggaggccatcccaggcaccaatgtagatctgggcaccttagaaggggatggtatgaatattgaaggtgaggaactgatgcccagcttacaggaggccctgagttcagacattcttaacgatatggaaagcgtcctggctgcaaccaagctcgataaagagagtttcctcacttggctgtag

SEQ ID NO: 27108 - DNA, 981 bp, synthetic construct
  misc_feature 1..981: note = Description of Artificial Sequence: Synthetic coding sequence
  source 1..981: mol_type = other DNA
atggccaagaccagcagcggccagcggtacttcctgaaccacatcgatcagacgacaacatggcaggacccccggaaagccatgctgagccaaatgaatgtgacggcaccgacatccccgcccgttcagcagaacatgatgaactccgcctcaggccctttgcccgatggctgggagcaggccatgacacaggacggagagatctactatataaatcacaagaataaaactaccagctggctcgatcccagactcgatcctcggtttgccatgaatcagagaatttcacaatccgcacccgttaagcagcctcctccccttgccccccagagtcctcaggggggcgtcatgggcggatccaactccaatcagcagcagcagatgcggctccagcaattgcaaatggaaaaggagcgcctcagactgaagcaacaagaactcctcaggcaagcgatgaggaacatcaatccctccaccgcaaatagccccaagtgccaggaactcgctctccgctcccagctgccaaccctggaacaagacggcgggacgcagaatcccgttagcagcccaggcatgtcacaggaattaagaaccatgacaaccaactcttctgatccctttctgaacagcggaacctaccacagccgggacgagagcaccgattctggcttatctatgagctcatactctgtccctaggactcctgacgacttcctgaatagcgtggacgagatggatacgggagatacgattaatcagagtactctcccctcacagcagaacagattcccggactacctggaggcgatcccagggactaatgttgacctgggaaccctggaaggcgatggtatgaacattgaaggcgaggagctgatgccaagcctccaggaggcattgtcctccgacattctgaacgacatggagagcgtcctcgctgcaaccaaactggataaggaatcctttttgacttggttgtag

SEQ ID NO: 27109 - DNA, 1467 bp, synthetic construct
  misc_feature 1..1467: note = Description of Artificial Sequence: Synthetic coding sequence
  source 1..1467: mol_type = other DNA
atggaccccggccagcagccccccccccagcccgccccccagggccagggacagccccccagccagcccccacaaggccaggggcccccctctggtccgggccagcctgcccccgctgccacccaagccgctccccaagccccccccgcaggccaccagatcgttcacgtgcgtggggattcagagacagaccttgaggccctttttaacgccgtgatgaacccaaagactgccaacgtaccacagacagtccctatgaggctgcggaagctacccgacagcttcttcaaacctcccgaaccaaagtcccactctcggcaggcaagcaccgatgctggaactgctggggcccttaccccccagcatgtacgcgctcactcttcccctgctagtttgcagctgggtgccgtatcccccgggactctgaccccaacaggcgtggtgtccggaccagcagcaacgccaacagcccagcatttgcggcagtctagcttcgagatacctgatgacgtgccccttcctgccggttgggaaatggccaagacaagttccgggcaacgctatttcctgaaccacattgaccagaccacaacatggcaagatccaaggaaagcaatgctgtcacaaatgaacgtaacagcaccgacaagtccgcctgtgcaacagaacatgatgaatagcgccagcggacccttacccgacggctgggaacaggcaatgactcaagatggcgaaatatattacattaatcataagaacaagacaacaagttggttagaccctcgcctagatccaagatttgcaatgaatcagcgcattagccagtcagctcccgtcaaacagccacctccgctggcccctcagagcccccaagggggcgtcatgggaggaagtaacagcaatcagcagcaacagatgcgccttcagcagctgcagatggaaaaagaacgccttagacttaagcagcaggaactgctcagacaggaactggctttaaggtctcagcttcctacactcgagcaagacggagggactcaaaaccctgttagttctccgggcatgtctcaagaacttaggactatgacaaccaactcctccgacccattcctcaacagcggcacttaccattctagggatgagtcaaccgacagcggcctgagtatgtccagttactccgtccccagaactcccgacgattttctcaattcagtggatgagatggataccggcgataccataaatcagtctacccttccttcccaacaaaacagattccctgattacctcgaggccatccccggaaccaacgtggacctcgggacactcgagggggacggtatgaacattgaaggcgaagaactcatgccgtctctacaggaagcactgagtagcgacatcctcaatgatatggagtctgtgctagccgccactaaactggataaagagagcttcctgacctggctgtag

SEQ ID NO: 27110 - DNA, 1479 bp, synthetic construct
  misc_feature 1..1479: note = Description of Artificial Sequence: Synthetic coding sequence
  source 1..1479: mol_type = other DNA
atggaccccggccagcagccccccccccagcccgccccccagggccagggccaacccccctctcaacctccacagggtcaaggccccccaagcggacccggacagcccgctccagctgccacccaagcagccccccaggctcctccagcgggtcatcagattgtgcacgttcgcggtgactctgaaacagatttggaggcactgttcaacgcagtgatgaatccaaagacagcaaatgtgccccagactgtgcctatgcgcctccggaagttaccagacagttttttcaaaccgcctgagcccaaatcacactcccgccaggcttcgacagacgctggaaccgcgggtgcgctgacccctcaacatgtacgagcccactccagccccgcctccctacagttgggcgctgtgtccccgggcactctgaccccgaccggggtggtgtccggtcccgccgccacacccacagcacagcacctgagacagagctccttcgaaattcccgacgatgtgccactgccagcggggtgggagatggcaaaaacaagtagtggacagagatacttcttgaatcatatcgatcagaccacaacttggcaggaccctcgcaaggccatgctctctcaaatgaacgtgaccgcccctacgagtccaccagtccaacaaaacatgatgaactctgcttccggcccacttcccgatggatgggagcaggccatgactcaagacggagaaatttactatatcaaccataagaacaaaaccactagctggcttgaccccagacttgatccgaggttcgctatgaaccagaggatttcccagtctgcccctgtaaagcaacctcccccactggcaccccagtccccccagggtggcgtgatgggcggctcaaatagcaaccagcaacagcagatgagactccagcaattgcaaatggagaaggaacgccttaggttaaaacagcaggagttgctccggcaggttcggccccaggaactcgcgctgaggagtcaacttcctaccctggagcaagacggtggtacccaaaatcccgttagctcgccaggaatgtctcaggagcttaggacaatgactactaatagtagcgatccattcttaaatagcggcacataccacagcagagacgagtctaccgatagcggactgagcatgagctcatattcagtgccacggactcctgacgatttcttaaactctgtggatgaaatggatacgggagacacaatcaatcagtctactctgccgtcacagcagaacaggttccctgactatctggaggccattccaggcacaaatgtcgatttaggaaccttagagggagatggcatgaatattgagggcgaagagcttatgccctctctgcaggaggcactttcgtctgacatactgaacgacatggagtccgtgctagccgcaactaaactggacaaggagtcgttccttacatggctctag

SEQ ID NO: 27111 - DNA, 1353 bp, synthetic construct
  misc_feature 1..1353: note = Description of Artificial Sequence: Synthetic coding sequence
  source 1..1353: mol_type = other DNA
atggaccccggccagcagccccccccccagcccgccccccagggccagggacagcctcctagccagcctccccaggggcagggtcctcccagtggccctgggcagccggcgcctgcggccacacaggctgcgccgcaagctccccctgctggccaccagattgtgcacgttaggggggactcagagaccgatctagaggccctattcaacgcagtgatgaaccccaaaacggctaatgtgcctcagacagttcccatgcgcctgcgcaaactcccagacagcttctttaaaccgcccgagcctaaatctcattcaaggcaggctagcaccgacgccgggacagcaggcgctctgactccacagcatgtgagagcccacagcagtccagcgtccctgcaacttggggccgtttctcctggcaccttgacgcctactggggttgtttccgggcctgccgccacccctacggcacaacacttgaggcaatccagtttcgaaattcctgatgacgtgcctctgcccgcagggtgggaaatggccaagacgtccagcggtcagagatactttttgaaccatatcgaccagactacaacatggcaggatcctagaaaagccatgctcagccaaatgaacgtcacagctcctacctcacctcccgtccagcagaatatgatgaactcggcttccgctatgaaccaacgcatctcccaatcagcccccgttaaacagccccctcctctggccccgcagtcaccgcaggggggagttatgggagggtccaacagcaatcagcagcaacagatgaggcttcagcagctgcagatggagaaggagaggttgcgtcttaaacaacaggagctcctgcggcaagagctcgccctgagatcccagttgcctaccctggagcaagacggtggaacgcagaacccggtctcctctcccggaatgtcccaagaactgcgaactatgacgactaattcaagtgatccgttcttgaattcaggaacatatcactcccgagacgaatccacagattccggcctgagcatgagctcttattccgtgccacgcactcctgacgattttttgaatagcgtggacgaaatggatacgggagacaccattaaccagagtacgctgccttcccagcagaataggttcccagattatctcgaggcgatccccggtacaaatgttgaccttggcactctcgaaggagatggcatgaacatcgagggagaagagcttatgccgagtctccaagaggccttaagtagtgatatccttaatgatatggaaagcgtgctggccgcaacaaagcttgacaaggaaagcttccttacctggctgtag

SEQ ID NO: 27112 - DNA, 1860 bp, synthetic construct
  misc_feature 1..1860: note = Description of Artificial Sequence: Synthetic coding sequence
  source 1..1860: mol_type = other DNA
atggccaacgacatcgacgagctgatcggcatccccttccccaaccattctagcgaagtgctgtgcagcctgaacgaacaacggcacgatggcctcttgtgcgatgtgctgcttgtcgtgcaggagcaggaataccgaacccacagatccgtgctggcagcctgctccaaatacttcaaaaagctatttacagccgggacactggcatctcaaccctacgtgtacgagatagacttcgtacagccagaagcacttgcggccatcctagagttcgcctatacatcgactctcactatcactgcaggtaacgtgaagcacattctaaacgcggcccgtatgttggagattcaatgcattgttaatgtctgcttggagatcatggagccaggcggggatggaggcgaggaggacgataaagaggacgatgatgatgacgaggacgatgacgatgaagaggacgaggaggaagaggaggaagaagaagaagatgacgatgatgacactgaagacttcgccgaccaggagaatctgccagacccccaggatattagctgtcaccagtccccatccaaaaccgatcaccttactgagaaggcatacagtgatacccctagagactttccagactcctttcaagcagggagccctgggcacctgggtgttatacgtgatttttcaatcgaaagtctgctgagagagaatctgtacccaaaagccaatattccggaccgcaggcctagcctgtcaccatttgctcctgatttctttccccatctgtggccaggcgatttcggagcatttgcccagctacctgagcagcctatggattcaggccccctggacctggtgataaaaaacagaaagattaaagaggaagagaaagaagaactccctcccccacctcctcctccctttcctaatgatttcttcaaggacatgttccctgatctgcccggggggcctttaggcccaattaaagcagaaaacgactacggtgcctacctaaacttcctgtctgcaactcacctgggggggctgtttcctccctggccactggttgaggagcggaaattaaagcctaaggccagccagcaatgccccatttgccacaaagttatcatgggtgcgggaaaactcccaaggcatatgaggacccacactggagagaagccctacatgtgcactatatgtgaggtgcgattcaccagacaggacaaactgaagattcacatgagaaaacataccggggagcgtccttatttgtgcattcactgcaatgcgaagtttgtacacaattacgacttgaagaatcacatgaggatccacaccggagtcaggccctatcaatgtgagttttgttataaatcgttcacccgttccgatcacctccatcgacatataaaacgacagtcttgcagaatggctcggccacgtaggggccggaagcccgccgcctggagggctgctagcctcctttttgggccagggggccctgcccctgacaaagctgcgtttgtaatgccccccgctctgggggaggtgggcggtcatttggggggagctgccgtatgcttgcccggccccagcccagcaaagcactttctggccgcccccaaaggcgccttgtctctccaggagctggaaaggcagttcgaagaaactcagatgaagcttttcggccgggcccagctggaagccgagagaaacgctgggggtctcctggcgtttgcactcgccgagaatgttgccgcagcacgaccctactttcctctaccagatccatgggcagcgggactcgccgggcttcccggcctggcaggcctgaaccacgtggcttcaatgtccgaagcaaacaactag

SEQ ID NO: 27113 - DNA, 1860 bp, synthetic construct
  misc_feature 1..1860: note = Description of Artificial Sequence: Synthetic coding sequence
  source 1..1860: mol_type = other DNA
atggccaacgacatcgacgagctgatcggcatccccttccccaaccactcgagcgaggtgttgtgctccctgaatgaacagcgccacgatggtctcctgtgtgatgtactgctcgtcgtgcaggagcaggagtatcggacacacagatccgtattagccgcttgttctaaatacttcaaaaaactgttcacggccggtacccttgctagtcagccttacgtgtatgagattgacttcgttcagccagaggccctggctgctattctcgagttcgcctacacttccactctcacaatcaccgccggtaatgtgaagcatattctgaatgcagcacgtatgctggagatccagtgcattgttaacgtgtgcctggagattatggaacccggcggagatgggggggaagaggacgacaaggaagatgacgatgacgatgaggacgacgacgatgaagaagatgaggaggaggaagaggaagaggaggaggatgacgatgacgacaccgaggatttcgccgatcaagagaatcttccagacccccaggacatctcatgccatcagtcccccagcaagaccgaccacctgaccgaaaaggcctattctgataccccccgagacttccctgatagctttcaagcaggatctcccggccacttgggcgttattagggacttctctattgaatccctgctgcgagagaacctttatcctaaagccaatattcctgatcggcgcccttcgttatccccattcgcaccggactttttcccccacctatggccaggagattttggtgccttcgcccagctgccggaacagcctatggacagcgggccactcgacctcgtcattaaaaatcgcaaaataaaggaggaagaaaaagaggagctgccacccccaccaccccccccgttcccaaacgattttttcaaggacatgttccccgacctgccagggggacctctgggtcctattaaggcagaaaacgactacggggcgtatctcaactttctttcagccacccatctggggggattgttccctccatggccgctggtagaggagaggaagcttaaacctaaagcttctcaacagtgtccgatttgtcataaggtgatcatgggtgctggcaagttaccgcgccacatgcgtactcataccggcgaaaaaccatatatgtgcacgatctgtgaggttaggttcacgagacaggacaagttgaaaattcacatgaggaaacatactggagaacgaccatatctgtgtatccattgtaatgccaaattcgtgcataattacgacttaaagaatcatatgagaatacatacaggcgtccgaccttaccagtgtgaattctgttataagtcctttacacgatctgatcaccttcataggcacatcaaacgccagtcctgcagaatggcacgcccaaggagggggcgtaaacctgctgcatggcgtgccgcttccctgctattcggccctggagggccggcgccggacaaagcagcattcgtcatgcccccggccctgggggaagtgggcggccatttgggcggcgccgcagtgtgtttgcccgggccctcacccgccaagcactttttggcagcacctaaaggcgcgctttcgcttcaggaactggaacggcaatttgaggagacacagatgaaactcttcggccgggcacagctcgaggctgaacgcaacgcgggtggactgctggccttcgccctggccgagaacgtagccgccgctaggccatacttccccctacccgacccctgggctgctggcttggcaggtttacctggactggccggcctcaatcacgtggcgtctatgagcgaggcaaacaactag

SEQ ID NO: 27114 - DNA, 78 bp, synthetic construct
  misc_feature 1..78: note = Description of Artificial Sequence: Synthetic coding sequence
  source 1..78: mol_type = other DNA
atggccaacgacatcgacgagctgatcggcatccccttccccaaccacagtagtgaagtcctgtgttccctgaactag

SEQ ID NO: 27115 - DNA, 57 bp, synthetic construct
  misc_feature 1..57: note = Description of Artificial Sequence: Synthetic coding sequence
  source 1..57: mol_type = other DNA
atggccaacgacatcgacgagctgatcggcatccccttccccaaccactcatcctag

SEQ ID NO: 27116 - DNA, 3375 bp, synthetic construct
  misc_feature 1..3375: note = Description of Artificial Sequence: Synthetic coding sequence
  source 1..3375: mol_type = other DNA
atggccgacggcccccggtgcaagcggcggaagcaggccaaccccaggaggaacaacgtaactaactataataccgtggttgagaccaacagcgactcagacgatgaagataagctgcacatagtggaagaggagtctgtgactgatgccgccgactgcgagggagtgcccgaggacgatctacctacagatcagactgtgttacccgggcggagcagcgagcgcgagggtaacgccaagaactgctgggaagatgaccgtaaggagggccaagagatcctgggtcccgaagctcaggctgatgaagctggctgtacggtcaaggacgatgagtgcgagtccgatgcggagaacgagcagaaccacgacccgaacgtcgaggaattcctgcaacagcaggacactgctgtgatcttccctgaggcccctgaggaagatcagaggcagggtacacccgaggcatctggtcatgacgaaaatgggacccccgatgctttctcccagctccttacatgcccatactgtgacagggggtacaaaaggttcacatcactgaaagagcacatcaagtatcgtcacgagaaaaatgaggacaacttctcctgcagcctgtgcagctacacctttgcttaccgcacacaactggagcgccatatgaccagtcacaaatcagggcgggaccaacggcacgtaactcagtcggggtgcaacaggaagttcaaatgcactgaatgcgggaaagcttttaaatataagcaccacctaaaggaacacctgaggatccacagtggcgagaaaccttacgaatgccctaattgtaaaaagcgattcagtcacagcggatcctactcctcacacatcagctccaaaaaatgtatctcactcatcccggtaaatgggcggccaaggactggcttaaagacaagtcagtgttcctctccttcgctgtccgcttcacctggctcgccaacccgaccgcagattcgtcagaagattgaaaacaaacccctccaggagcaactcagcgttaatcagatcaaaacagaacctgttgactacgaattcaagcccatagtcgtggcctcaggcatcaactgtagtacaccactgcaaaatggagtgtttactggcggcgggccactgcaggctacatcatctcctcagggaatggttcaggccgtggtgttgccaaccgtgggattggtgtctcccatttctattaatttaagtgacattcagaacgtcctgaaagtagccgtggatggcaacgtcataagacaagtgctggaaaacaaccaagccaacctggcttcaaaggaacaagaaacaatcaatgctagtcccatacagcaagggggccactccgtgattagtgctatttcactgcctctggttgatcaggatggcacgacaaaaattattatcaactatagcctcgagcagccctctcagctgcaagtggtgccacaaaacctcaagaaagaaaatccagtggcaaccaatagctgcaaaagtgaaaagctgccggaagacctgaccgtaaaaagcgaaaaagacaagagtttcgagggtggagtcaacgactccacctgcttactgtgtgatgactgcccaggagatatcaatgcactgcccgaactgaaacactacgatctcaagcaaccaacacagccccccccgctccctgcagctgaggcagagaagcctgagtcctctgtctctagtgccactggagacggcaacttgtcgccttcccagcccccactaaaaaaccttttatcactgctgaaggcctactacgcactcaacgcccagccttctgccgaggagttatccaagatcgcagacagcgtcaacctgcccctggatgtagtgaaaaagtggttcgagaagatgcaggccggccaaattagcgtccaatcttccgaaccttccagtccagaacctggaaaggtaaacataccagctaagaacaacgatcaaccccagtctgctaatgcgaatgagccgcaggactctaccgtcaacctgcagtcgcctttaaaaatgacgaattcccccgtcctcccggtagggagtaccactaacgggagcaggtccagcacacccagtccctcacccctcaacttatcatcaagccgcaatacgcagggatacctttataccgctgagggggctcaggaggagccacaggttgaacctctagacctgagcctccccaaacagcagggcgagctgttagaacggagtacaatcactagtgtgtaccaaaatagtgtatacagtgtgcaggaggaaccactcaatttgagctgcgccaagaaggaacctcagaaggacagctgcgttactgatagtgaacccgtcgtaaacgtcatcccaccatcggcaaaccccataaatatagcgatcccaaccgttaccgcacagctgcctactatcgtggcaatcgctgatcaaaattccgtcccttgcctccgcgccctagccgcgaacaagcagacaatactgatccctcaggtggcatacacctatagcaccacagtgagcccagctgtgcaggagcctccactaaaggtgattcagcctaacggcaaccaggatgaaagacaggatacaagctctgagggagttagcaatgtggaggaccagaatgattctgacagtactcctcctaaaaagaagatgcggaaaaccgaaaatggaatgtacgcttgcgacttgtgtgataagatctttcagaaaagcagttcactacttaggcataaatacgagcatactggcaagcggccccatgaatgtggaatttgcaagaaggcattcaaacacaagcatcatctgattgagcacatgcgactgcactctggcgagaagccgtatcagtgcgataagtgcggtaagagatttagccattccgggtcatactcgcagcatatgaaccacagatatagttattgcaaacgggaagccgaagaaagagatagtacggagcaggaagaagccggcccggagattctgagcaacgaacatgtcggggcgcgcgctagccccagtcagggcgatagcgatgaaagggagtcactgacgagggaggaagatgaagatagcgaaaaggaggaagaagaggaggataaagaaatggaagaactacaggaagagaaagagtgtgagaagcctcagggagacgaagaggaggaggaagaggaggaggaggttgaagaggaggaagttgaagaggccgagaacgagggagaagaggctaagacagaagggctgatgaaggacgatcgtgcagagagtcaagcgagctcccttgggcagaaggttggtgaatcttcagagcaggtgagtgaggaaaagacaaacgaagcatag

SEQ ID NO: 27117 - DNA, 3378 bp, synthetic construct
  misc_feature 1..3378: note = Description of Artificial Sequence: Synthetic coding sequence
  source 1..3378: mol_type = other DNA
atggccgacggcccccggtgcaagcggcggaagcaggccaacccccggagaaacaacgtgacgaattacaacaccgtggtggagacaaactcggacagtgacgacgaagacaaactacatatagtggaggaagagagtgtgacggatgcagccgactgcgagggcgtccctgaagacgatctgcctacagatcagacagtgcttcccggaagatcctcggaacgcgagggaaatgcgaagaactgttgggaggatgacacaggcaaggagggccaggagattcttgggccagaagcccaggcagacgaggccggatgcactgtgaaagacgacgagtgtgagtcagatgcggaaaatgagcagaaccacgatccgaacgttgaagaattccttcaacagcaagatacagcagtcatttttccagaggcaccggaagaagaccagagacaaggaacccctgaggcctcgggacacgacgaaaacggaacaccagatgctttctcccagcttctcacctgcccgtactgtgaccggggctataagcgattcacctctctgaaggagcatatcaaatataggcatgagaaaaacgaagacaattttagctgcagcttatgctcctacaccttcgcctaccggactcagctagagcgtcatatgacctcccataagagcgggcgggaccaaagacatgtaactcaaagcgggtgtaataggaagttcaaatgtacagaatgtgggaaagcttttaaatataagcatcatctgaaggagcacttgagaattcatagtggggagaagccttacgaatgccccaattgcaaaaagcgtttctcccactctggaagttacagctctcatatatcaagcaaaaagtgcatttctttgatcccagtgaacgggcgcccgcgaactggcctgaaaacaagccagtgttcttcaccaagtctatcggccagtcctggctcccccaccaggccgcagatccgtcagaaaattgaaaacaaacctttgcaagagcagctgtcagtgaatcagattaagaccgaacctgttgattatgaatttaagcctattgtggtcgcgagcggtatcaactgctcaacccctttgcagaacggcgtgttcacgggcggtggtccactccaggcgaccagttccccacaaggaatggtacaagccgtggtgctgcctactgtgggactagtgagccccatatctattaacctctcggatattcagaatgtgctgaaggtcgccgtggacggtaacgtgattagacaggtactggaaaacaaccaggctaatctcgcatctaaagaacaggaaactataaacgccagtcccatccagcagggtgggcattcagtcatctcagccatttctctccctctggtggatcaagatggtactaccaaaatcattattaattacagcctcgaacagcccagtcagctgcaggtggtaccgcagaaccttaaaaaggaaaaccccgtggccacaaatagttgtaaatccgagaaactccccgaggacttgacggtcaagagcgagaaagataagagtttcgaagggggggttaatgactcaacatgcttgctgtgtgacgattgccccggggatattaacgccctgccggagcttaagcactacgaccttaagcagccgactcagccccctccgctgcctgcagccgaagcggaaaagcccgaaagcagtgtaagcagcgccacaggggacggaaacctgagtccgtctcagcccccactcaagaacttacttagtctcctaaaggcctattatgctctcaatgctcagccctcagccgaggagttatcaaaaattgcggattcagtgaatctgcccctcgatgtcgtaaaaaagtggttcgagaagatgcaagcaggacagatctcagtgcagagcagcgagcctagcagtccagagccaggaaaggttaatattccagctaagaacaatgatcagccccagtccgcgaacgcaaacgaaccacaggacagtacagtaaacttgcagtctccccttaaaatgacgaactcccctgtcctccccgtcggctccacaacaaacgggtctcggtcttccacaccaagcccctcgcctctgaatctttcgagcagtagaaacacccaaggctacttgtataccgctgagggagcccaggaggagccgcaggtagagcccctggacctgtctctgccaaaacagcagggggaacttttggagaggagcacgattacctcagtctatcaaaacagcgtctactccgtacaggaggagcctctcaacctgtcctgcgccaaaaaggagccacaaaaggattcatgtgtaactgattctgagccagtggtcaacgtcatacccccttcagccaatccgatcaacatcgcgatacccacagtgaccgctcagctgcctactatagttgccattgctgatcagaactccgttccatgtttacgggcactcgctgcaaacaagcagaccatactaatcccgcaggtggcttacacatattcaactaccgtgtcaccagccgttcaggagccacccttgaaggtgatccagcctaatggcaaccaagacgagagacaggacacaagttccgagggtgtttctaacgttgaggatcagaacgatagcgactcgacgccccccaagaagaagatgcggaagaccgaaaatggtatgtacgcctgtgatctctgcgacaagatctttcagaaaagctcgagcctccttagacacaagtatgaacacaccggcaagaggccccacgaatgtggaatctgtaagaaggctttcaagcataaacaccatcttattgaacacatgcggctgcacagcggcgagaagccctatcagtgcgacaagtgtggcaagaggtttagtcacagtggatcttactcgcagcatatgaatcacagatactcatattgcaaaagagaggcagaggagcgagactctacagagcaggaggaagccggaccagaaattcttagcaatgaacatgtgggcgcaagggcaagccctagccagggcgatagtgacgaaagagagagcctgaccagagaggaagatgaagattctgaaaaagaggaggaggaggaggacaaggagatggaggaattgcaggaagagaaggaatgcgaaaagccgcagggcgatgaggaggaagaagaagaagaagaagaggtggaagaggaagaagtcgaggaagcagaaaacgagggtgaagaggcaaagacagagggcctaatgaaggatgaccgcgcagaatcacaggcatcttccctgggtcagaaggttggggagagttctgagcaggtgagcgaggaaaagacaaatgaggcctag

SEQ ID NO: 27118 - DNA, 870 bp, synthetic construct
  misc_feature 1..870: note = Description of Artificial Sequence: Synthetic coding sequence
  source 1..870: mol_type = other DNA
atggccgacggcccccggtgcaagcggcggaagcaggccaacccccgcaggaacaacgtcacgaattataataccgttgtggaaacaaacagcgatagcgacgacgaagacaaactccacattgtggaggaagaaagtgtcaccgatgccgctgattgcgagggcgtacccgaggatgatctccccactgaccagaccgtactcccagggcggagctccgagcgggagggtaatgctaaaaactgctgggaagacgacacaggtaaagagggacaggaaatcctgggtccagaagcacaggccgatgaagccggttgtactgtgaaggatgacgaatgcgagtccgatgccgagaacgagcaaaaccacgaccccaacgtcgaagaattcctccagcagcaggacaccgctgtcatatttcctgaggctcccgaggaggaccagcgccaaggtaccccagaggccagtggtcatgatgagaacggtacgcccgacgcgttcagccagctgctgacgtgcccatattgtgacaggggctataagcgctttacctcccttaaggaacacataaaatacaggcatgaaaagaatgaggacaactttagctgttctctgtgttcatacacatttgcatacagaacccagctagagagacatatgaccagccacaagtccggacgcgatcagcgccacgtgactcagagtggctgtaataggaagttcaaatgcaccgaatgtggcaaggcattcaagtacaaacatcacctgaaggaacatctgcgcatccattccggggagaagccatacgagtgccccaattgtaagaaaagattttctcattccggttcatactcctctcatatcagttag

SEQ ID NO: 27119 - DNA, 2721 bp, synthetic construct
  misc_feature 1..2721: note = Description of Artificial Sequence: Synthetic coding sequence
  source 1..2721: mol_type = other DNA
atgaccagccacaagagcggccgggaccagcggcacgtgacccagagtgggtgcaatcgcaagttcaaatgcacggagtgcggtaaagcctttaagtacaaacaccatctgaaagaacacttacgcatacactcaggggagaagccatacgagtgccctaattgtaagaaacgttttagtcacagcggtagctactcttctcacatctcaagcaaaaaatgcatctctctgatccctgtcaacggtcgcccccggacgggcctcaagactagccagtgtagtagccctagcctgagcgctagtcctgggagcccaacccgaccgcagatccgccagaagatagagaacaagccgttgcaagaacagctttccgtcaatcagattaagacggagcctgttgactacgagttcaagcctattgttgttgcctcgggaataaattgcagcacacccctgcaaaatggagtcttcacaggaggcggtcccctccaggcgaccagtagcccacagggaatggttcaggcggttgtactgccaacagtcggcttagtgagccctatcagcatcaaccttagcgacatccaaaacgtgctaaaagtggcagtcgatgggaacgttataagacaggtcctagaaaacaaccaggcaaacttggctagcaaggaacaggaaaccatcaacgccagtcccatccagcaaggtgggcatagcgtaattagtgcgatcagcctgccgctggtcgatcaggacgggaccactaaaattatcatcaattactctctggaacagccctctcagctgcaggtggtgccccagaacctaaagaaggagaaccccgtcgcaaccaattcatgcaaatctgaaaaactgccagaagatctgactgtgaagtcagagaaggataaatccttcgagggaggggtgaacgatagtacgtgcctgctttgtgacgactgccccggcgatatcaatgctctgccagagctgaaacattacgatctgaagcagccaacccaaccacctcctttgcccgcagccgaggctgaaaaacctgaatcctctgtgtcatctgctacgggagatggcaacctgagtccaagtcagcctcctcttaaaaacttactcagcctactaaaagcatattatgcccttaatgcacaacctagtgcagaggaactgtctaaaattgccgactccgtcaatcttccactggatgtggtcaagaagtggtttgaaaagatgcaggccggacaaattagcgtgcaatcatccgagccttctagccccgagccaggtaaagttaacataccagccaagaacaatgatcagccacagtccgccaatgccaatgagccacaggatagcacagtgaatctccaatctccgcttaagatgacaaacagcccagtcttgccagtggggtccacgacaaatggctctagatcatcaactcccagcccttccccactgaatctgagttccagcaggaacacccagggctatctgtacactgccgagggcgctcaagaagaacctcaggtcgagcccctcgacttatccctgccaaagcagcaaggggagctgctggagaggagcaccatcacttctgtgtaccaaaacagcgtgtacagcgttcaagaagagccactgaacttgtcctgcgccaagaaggagcctcagaaagattcctgcgtgaccgacagcgagcccgtggtcaacgtgatcccaccaagcgcaaacccaattaatattgccattccaactgttactgcacagcttccgaccatagtcgccatcgccgatcagaacagcgtgccctgtctgcgagcactagcagcaaacaaacagactatactcatcccccaggttgcttacacttattcgacaactgtgtcgcctgccgtccaagagcctccactgaaagtaatccagccgaatggcaatcaggacgagaggcaggataccagtagcgagggagtcagtaatgttgaagaccaaaatgacagcgacagcacaccacccaagaaaaagatgagaaaaactgaaaatggcatgtacgcatgtgatctttgcgataaaatattccaaaagagttcatctcttctgcgacacaagtatgagcatactggaaaacggccacatgagtgtggaatttgtaagaaagcctttaagcataaacatcacttaattgagcacatgaggttacatagcggtgagaagccataccaatgtgacaagtgcggcaagaggttcagtcattctggaagttatagccagcacatgaatcatcggtacagctactgcaagagagaggcggaggaaagggacagtaccgaacaggaagaagccggtcctgaaatcctatctaatgagcatgtcggggcaagagcctccccctctcagggagattctgacgagagagaaagtctgacacgcgaagaggacgaagattcggaaaaagaggaagaagaagaagacaaagagatggaggaattacaggaggagaaggagtgtgaaaaaccccagggagatgaagaggaagaagaggaagaagaggaggtagaggaggaggaggtggaggaagccgaaaacgaaggagaggaagctaagaccgaggggctgatgaaggatgaccgcgcagaatctcaagcaagctctctgggacagaaggtgggagagtcgtctgagcaagtgagtgaagagaaaacaaatgaggcttag

SEQ ID NO: 27120 - DNA, 3327 bp, synthetic construct
  misc_feature 1..3327: note = Description of Artificial Sequence: Synthetic coding sequence
  source 1..3327: mol_type = other DNA
atgaaggtgaccaactacaacaccgtggtggagaccaacagcgacagcgacgacgaagataagcttcatatcgtggaggaggaaagcgtgaccgacgccgcagactgtgaaggtgtgcctgaggatgaccttcctacagaccagaccgttctcccaggtaggtcctccgaaagggagggaaatgccaagaactgttgggaggatgatactggcaaggagggccaggagattttggggcctgaggctcaggccgacgaagccggttgtaccgtgaaggacgacgagtgtgagagcgatgctgagaatgaacaaaatcacgaccccaacgttgaggagttcctccaacaacaggacacagccgtgatatttcccgaggccccggaggaagaccagagacaagggacaccggaagcaagcggccatgacgaaaacgggacaccggacgcatttagtcagttacttacgtgtccatactgcgatcgcggatacaagcgatttacttctctgaaagagcacattaaatataggcacgaaaaaaacgaggataacttctcctgcagcctttgctcatatacattcgcttataggacccagctggaacgacatatgacatcccataagtccgggagggaccagcgtcacgtcacccaaagcggatgtaataggaagttcaagtgcactgagtgcggcaaagcgtttaagtataaacaccatctcaaggagcatctccgcatccatagtggtgagaagccctatgagtgccccaactgtaaaaagaggttctctcatagcggctcctatagttcccatatctcttccaaaaagtgcattagtttaatccccgtcaatggtagaccgcggacaggcctgaagacaagtcaatgcagttcaccttcccttagcgcgtctcccggcagccccacgagaccccagatccgccagaaaatcgagaacaagccactccaggaacagctatccgtgaatcaaataaaaacagaacctgtcgattacgagtttaaacctattgtggttgcctccggaataaattgtagcactcctctgcagaatggagtgtttaccgggggcggccctctccaagctacatcgagcccacagggaatggtgcaggctgtggttctcccaacagttggtctggtctcgccaatatccattaatttgagcgatattcagaatgtgctcaaggtggctgtggatggcaacgtgatacgccaggtactcgaaaacaatcaggctaacctggcctctaaggagcaagagactattaatgctagcccgattcaacagggcgggcactccgttatttccgctatcagcctgcccctggttgatcaggacggcacgacgaagattattatcaattacagtcttgagcaaccaagtcagctgcaggtggtgcctcagaatttgaagaaggagaatccggtagccacaaattcgtgtaaatccgagaaattaccggaggacttgacagttaagagtgaaaaggacaaatctttcgaggggggtgtgaacgacagtacctgcctgctctgtgacgactgccctggtgacataaatgctcttccagagctgaagcactatgacttgaaacaacccactcagcctccaccactcccggcagcggaagcagagaagccggaatcctccgtttcctcagccaccggggatggcaacctgagtccatcccagcccccattgaagaacttactttcgctgctgaaagcatattacgcactaaatgcacaaccatcagccgaagagctgtcaaagatcgctgacagcgtgaatctgcctttggatgtagtgaaaaaatggtttgagaagatgcaggcagggcaaatttcggtccagtctagtgaaccatcttcccccgagcctggtaaagttaatattccagctaaaaacaacgaccagccccagtctgccaatgccaacgagccacaggactcgacagttaacctccaatcccccctgaagatgacgaatagcccggttctgccggtaggaagtacaacaaacggctccaggtcttctacaccctccccttctccgcttaatctttcatcctccagaaacacccaggggtacctgtataccgccgaaggagctcaggaagagccgcaagtggaacctctcgatttaagcctcccaaagcagcagggcgagctcttagagcgcagcaccataaccagcgtttatcaaaactctgtctactccgtccaggaggagccactcaatctgagctgcgctaaaaaagagccacaaaaagacagttgtgtgacggattctgagcccgtggtgaatgtgataccgccttcagccaaccccatcaatatcgccattcctaccgttacggctcagctccccacaattgtcgcaattgccgatcagaactccgtaccctgcttacgcgctctcgcagctaacaaacagaccatcctaatcccccaggtggcgtacacttactccaccaccgtctctccagctgtccaggaaccccccctgaaggtgatccaacccaacgggaaccaggatgaacggcaagacacttctagtgagggggtaagcaatgtggaggaccagaacgatagcgacagcaccccccctaaaaaaaaaatgcgcaagaccgaaaacgggatgtatgcttgcgacctctgcgacaagattttccagaaatcatcttccctgctgaggcacaaatatgagcacaccgggaaaaggccccacgagtgcggcatttgcaaaaaggccttcaaacacaagcaccacctgatagagcacatgcggctgcactccggcgagaagccctaccaatgcgacaagtgcgggaaacgcttctcccattccgggagttatagtcagcatatgaaccatagatacagctactgcaagcgggaggcggaggaacgggacagtactgaacaggaggaggcaggccctgaaatactcagcaatgaacacgttggcgctagagcatctccaagccagggcgactctgacgaacgggaaagcctgactagggaagaggatgaagattcggaaaaagaggaggaggaggaggacaaagagatggaggaattgcaggaggaaaaagagtgcgaaaagccacagggcgatgaggaagaggaggaggaggaagaggaagtggaagaggaagaagtggaggaagcggagaatgagggtgaagaagctaagacagagggtctgatgaaggacgacagggccgaaagccaggcttcatctctcggtcagaaggtcggggagtcctcagagcaggttagtgaggaaaaaacaaacgaggcttag

SEQ ID NO: 27121 - DNA, 3180 bp, synthetic construct
  misc_feature 1..3180: note = Description of Artificial Sequence: Synthetic coding sequence
  source 1..3180: mol_type = other DNA
atggccgacggcccccggtgcaagcggcggaagcaggccaacccccgcaggaacaacgtaacgaattacaatactgttgtggagactaactcagactctgatgacgaggacaagttacatatcgtagaggaagagtccgtgacagatgcagccgattgtgagggtgtgcccgaagatgacctcccgaccgaccagactgtgctgcctggcaggagtagcgaaagggaaggcaacgctaagaactgctgggaagatgatcgcaaagaaggtcaggaaatcctcggacccgaggcacaggccgatgaggctggttgcacagtcaaagacgacgaatgcgagtcagacgcagaaaacgagcagaaccacgatcccaacgttgaggagtttcttcagcaacaggacacagccgtcatttttcctgaggctccagaagaagatcagcgacaggggacccctgaggcctcaggacacgacgaaaatggcactcccgatgccttctctcagcttttgacctgtccttattgtgatagggggtataagaggttcactagcctcaaggagcacattaaataccgacacgaaaaaaatgaggataacttttcgtgtagcctatgctcgtatacctttgcataccgcacacaactcgaaagacacatgacctcacataagagcggtcgagatcagaggcacgtcacccagagtggttgcaatagaaagtttaagtgcaccgaatgcggcaaagcgttcaagtacaagcaccacttaaaggagcacctcaggattcactcgggcgagaagccatacgaatgcccgaactgcaagaaacgtttttctcattcagggtcctattccagccacatttccagtaaaaagtgcatcagtctgattcccgtcaatggtcgaccgaggactggactcaaaacaagccagtgttcatcgcccagtttgagtgcctctcctgggagccctaccagaccacagatcagacagaagatagagaacaagccgctacaggaacaacttagtgtaaaccaaattaagacagagccagtagactacgaattcaagcccattgttgtagccagcggcattaattgcagtacgccgttgcaaaacggggttttcacagggggaggtccgctccaggcgacctccagccctcaaggcatggttcaagctgtggtcctgcctactgtggggctagtttcacccatctccataaacctttcagatatccaaaatgtcttgaaagttgccgtggacggaaacgtgatccgccaggtgctggagaataaccaggccaatctcgcctccaaggagcaggagaccatcaatgccagccccattcagcagggtggacactcagtcatttcagccattagcttgcccctggtcgaccaggacggtactacaaaaatcatcatcaattattctttggagcagccctcccagctgcaggtggttccccagaacctgaaaaaagaaaatccagtagccaccaactcctgtaagtctgaaaagcttcctgaagatttgacagtgaaatccgagaaagacaagtcgtttgagggcggggttaatgatagtacatgcttactctgtgacgattgcccgggagacataaatgctctgcccgaattaaaacactacgacctgaagcaacctacccagcctccccctctgcctgctgccgaagcagaaaagccagagagcagcgtgtctagcgccactggcgacggcaatttatccccatctcagccccctctcaagaatctcctttccctgctgaaggcttattatgccctgaatgcccagccaagcgccgaggaattgtccaagattgccgactccgtgaatctcccgctcgacgtggttaaaaaatggtttgagaagatgcaagccggccagatatcagttcagagttcggagccatcttctccagaaccggggaaggtgaatatcccggccaaaaataacgatcaaccacagtctgccaacgcaaacgagcctcaggattctaccgttaacctgcaatcccctctgaaaatgactaattccccagttctgcctgtgggatccactaccaatggaagccgatcttccacgccatcgccatcgccccttaatctttcatcctccaggaatacccagggatacctctatactgctgagggagcccaagaagaaccgcaagtggaaccactggatctgagcttacctaagcaacagggtgagctgctagaacggtcaactatcacttcagtctaccagaacagcgtgtacagcgtgcaagaggaacctttaaacctgtcctgcgccaaaaaggagccccagaaggacagctgtgtgacagattcagagccagtggttaacgtcatacccccatctgcaaatcccattaatattgcaatccctaccgtgaccgcacagctccccacgatagtcgcaatagccgatcaaaactccgtcccctgccttagggctctggccgccaacaagcagacaattctcatccctcaagtggcctacacttacagtactacagtttcccccgccgtccaggaacctccactaaaagtgatacaacccaacggaaaccaggatgagagacaggacacatcgtctgagggagtgtccaacgtggaggatcagaacgacagcgatagcaccccccctaagaaaaagatgagaaagacagaaaacggcatgtacgcttgcgatctgtgtgataaaatttttcaaaagtctagctccctgttgagacataagtacgaacacaccgggaaacgcccacatgaatgcggaatctgtaaaaaggcttttaagcacaagcaccacctgatcgagcatatgcgactgcacagcggggagaaaccttatcagtgtgataagtgcggaaaacgttttagccattctggttcctactcacagcatatgaatcaccgatacagttactgtaagagggaagctgaggagcgggactccacagagcaggaggaagctggaccagaaatcctgagcaatgaacacgtcggagcacgggcgtcccctagtcaaggcgactccgatgagcgcgagtcactgacacgagaggaggatgaggattccgagaaagaggaggaagaggaggacaaggagatggaagaattacaggaggagaagcacaaaaagaaaaagtag

SEQ ID NO: 27122 - DNA, 1932 bp, synthetic construct
  misc_feature 1..1932: note = Description of Artificial Sequence: Synthetic coding sequence
  source 1..1932: mol_type = other DNA
atggccgacggcccccggtgcaagcggcggaagcaggccaacccccggcgtaacaacggcactccggacgccttctcacaactgctgacctgcccgtactgcgacagaggctataagcggttcacttctctgaaagagcacattaaataccgccacgaaaagaacgaggataatttctcgtgtagtctctgttcatatacctttgcctaccgaacacagctagagagacacatgaccagtcacaagtccggtcgagaccaacgccatgtgacacagagtggctgcaaccgcaaatttaaatgcacggaatgcggcaaggccttcaaatacaagcatcaccttaaggagcacctacggatccattccggcgagaagccttatgagtgtcccaattgtaagaaacgtttctcccactctggctcctattcgtcccacattagttcaaaaaagtgcatctcactcattcctgtgaacggcaggccacggacagggctcaaaactagtcagtgtagttcccctagcttgtcagctagtcccggctcgccaacccgtccccagatccggcagaagatcgagaacaagccactacaggagcagttatcagtcaaccagattaaaacggagccagtggactacgagttcaagcctatcgtggtcgcctccgggatcaattgctctacaccccttcagaacggagtgtttacaggaggtggccccctgcaggcgacttcctcgccacagggcatggttcaggctgttgtcttgcctactgtgggactggtttctcctataagcatcaaccttagtgatatccagaacgtgctcaaagtggcagtcgacggtaacgttatcagacaggtgctcgagaataaccaggcaaacttggcgtccaaagagcaggagacaatcaatgctagtcccattcagcagggtggtcactctgtaatcagcgctatctctctgcccttagttgaccaagatggaacaaccaaaatcatcatcaattattcactcgagcagccttcacagctgcaggtcgtgcctcagaacttgaaaaaagagaacccagtagctactaactcgtgtaaatcggaaaagctacccgaggatctcacagttaaatcagagaaagataagtctttcgaagggggcgtaaatgattcgacctgcctcctatgcgacgactgtccaggcgacattaacgccctgcccgaattgaaacattatgatttaaagcaacccacccagcctcctccgctgcccgctgccgaggcggagaaacccgagtcttctgtaagttccgctactggggatgggaatttgagcccctcccagccacctctgaagaatctgctgagcctcctaaaggcgtactatgctctgaatgcacagccttccgccgaggagttgtccaaaatcgcagattccgtaaatcttccattggatgtagtgaagaagtggtttgaaaagatgcaggccgggcaaatatccgtgcagtccagcgagcctagcagccctgaaccagggaaagttaacatacctgcaaagaataacgaccagccacagtcagcaaacgccaacgaacctcaggactccacagtgaacctgcaaagtccgttgaagatgacaaactcccccgtattgcctgttggaagtactaccaacggctcccgtagcagcacgccaagtccgtcaccgttgaacctgagctccagtcgaaacacacagggttatctgtataccgccgaaggagctcaggaggaaccccaggttgagcccctggacctctccctgcccaaacagcagggcgaggaagcgaagaccgagggattgatgaaggacgacagagccgaatcccaggcctccagcctaggtcagaaagttggcgagagcagtgagcaggtgtccgaggagaaaaccaatgaggcctag

SEQ ID NO: 27123 - DNA, 3174 bp, synthetic construct
  misc_feature 1..3174: note = Description of Artificial Sequence: Synthetic coding sequence
  source 1..3174: mol_type = other DNA
atggccgacggcccccggtgcaagcggcggaagcaggccaacccccgtcgaaataacgggaaggagggacaggagattttaggcccagaggctcaagcagacgaagccggatgcactgtgaaagacgacgaatgcgagtctgatgctgagaatgagcaaaatcatgatcctaacgtcgaggagtttctccagcaacaggataccgctgtgatctttccagaggcccccgaggaggatcagagacaaggtacccctgaagctagcgggcacgatgagaacggaactccggacgctttctctcaattgctgacctgcccatattgtgaccggggatataagaggtttacatcactgaaggaacacatcaagtataggcatgaaaagaacgaagataacttcagctgctcactatgctcctatacatttgcctacagaacacaacttgaacggcatatgacatcccataagtcaggccgggaccagcgccatgtgactcagagtggctgcaaccgaaaatttaaatgcaccgagtgcggcaaggccttcaaatacaaacaccacctgaaagaacatctccggattcactcaggcgaaaagccctacgagtgtcccaattgcaaaaagagatttagccacagcggctcatattccagtcacattagctctaagaagtgcatcagcttgatcccagtgaacggccgcccacgtactggtctgaagacctctcagtgtagttctcccagcctatcagcctcacctgggagtccaacacggccacagatacgacagaaaattgagaacaagcctctccaagaacagctctccgtcaaccaaatcaagacagagcccgtggattacgagtttaaacctatcgtggtggcgagtggcatcaactgctccactcctctccagaacggcgtttttacaggagggggtccgctgcaggcaacaagtagtccccagggcatggtccaggcagtggtacttcccacagttggactggttagtcccatttccatcaatctgtctgatatccagaatgttctcaaggtcgccgtggacggcaatgttatacgtcaggtcttggagaataaccaggcaaacctagcaagtaaggagcaggagacaatcaacgcaagcccaatccagcagggcggccattcagtgatctctgcgatcagtctgccccttgtcgatcaggacgggacgactaagattatcataaactattcactcgagcagccaagccagttacaggtggttccgcagaaccttaagaaggagaaccctgtggctacgaacagttgtaagagcgagaagctgcccgaagatctgaccgtgaaaagtgagaaggacaagtctttcgaaggaggcgtgaacgattccacctgcttgttgtgtgatgattgcccgggagacatcaacgcgctaccagaactgaaacactacgacctgaagcagccaacacagcctcccccgctccccgcggctgaggctgaaaagcccgagagtagcgtatctagtgctactggagatggaaacttgagtccgtcacagccacctctcaaaaaccttctgtcgctgctaaaggcatactacgcccttaatgctcagccatcagccgaggagctctcaaaaatagccgacagcgtaaacctgcctctcgatgtcgtgaagaagtggtttgaaaagatgcaagctggccaaatttctgttcagtcctccgaaccctcttctcctgagccagggaaggtaaacatacccgcaaagaacaacgaccaaccacagagtgccaacgcaaatgagcctcaggactcgactgtgaatctccagtcccccctgaagatgacaaactcacctgttctgcctgtcggctccaccacaaacgggtcaagatccagcacccctagcccatctccgttaaacctgtccagtagccgaaatacacagggttacctttataccgcagaaggagcccaggaggagcctcaggtggagccactggaccttagtcttcccaaacaacaaggggaactcctcgaacggtcaacaatcacctcagtgtaccaaaactctgtgtacagcgttcaggaggaaccccttaacctgtcctgtgctaaaaaagagcctcaaaaagactcatgtgtgactgattctgagcctgtggtgaacgtcattccaccatcagccaatccaatcaatatcgccattccgaccgtgactgcgcaactgccaactatcgtagcaattgctgatcagaattccgttccctgtcttcgggctctcgcagccaataaacaaaccattcttatcccgcaggtggcgtatacatacagtaccacggtctcacctgctgtacaagagccacccctgaaggtgattcagcctaacggtaatcaggacgagcggcaggacacttcttctgaaggggtaagtaacgtcgaggaccaaaacgattctgacagtaccccccccaaaaaaaaaatgaggaaaaccgaaaatggaatgtacgcttgcgacctgtgtgacaagatcttccagaagtcaagctccctactgaggcataagtatgagcacactggcaaacgaccccacgagtgcgggatctgcaagaaggcctttaagcacaaacaccatctgattgaacatatgcgccttcactcaggcgagaagccttaccagtgtgataagtgcggaaagcggttctcccatagcggctcatactcacagcatatgaatcatagatattcctactgtaagagagaagcggaggagagggacagtacagaacaggaagaggctggtccggagattctgtcaaatgaacacgtcggcgcccgtgcatccccatcacagggcgacagcgacgaacgtgagtcactcacacgagaagaggacgaagattcagaaaaggaagaagaagaggaggataaagagatggaggaactccaggaggagaaggaatgcgagaagcctcagggtgatgaagaggaggaggaagaggaggaagaggtagaggaggaggaagtggaggaggccgaaaacgaaggcgaggaagcgaaaacagaaggcctcatgaaggatgacagagccgaaagtcaggcatcttctcttgggcagaaagtcggcgagtcttccgaacaggtctccgaggagaaaacaaacgaagcttag

SEQ ID NO: 27124 - DNA, 3048 bp, synthetic construct
  misc_feature 1..3048: note = Description of Artificial Sequence: Synthetic coding sequence
  source 1..3048: mol_type = other DNA
atgatgaacgccagccagatgcagaagatgagcaagaccatgatccttatgttgaagtctttttataacaataaaacccttctgagcttcttcctgcgccatttgaagagaacacgaggccgagcccatcagaaaccggtggttatgatgaaaatggaacatcagatgcactttcacaactacagtcccgttcatatagtgatcggctacaaaaggttcactagcctgaaggaacatatcaagtataggcacgaaaagaatgaagacaacttctcatgcagtctatgttcctacacatttgcctatcggactcagcttgagaggcatatgaccagccataaaagtggaagggatcagcggcacgtgacccagtccggatgcaatcggaaatttaagtgcaccgagtgcgggaaggcgttcaaatacaaacaccatctcaaagagcatctgaggattcattctggtgaaaagccatatgagtgccctaattgtaagaagcgcttcagccattctggctcctattcgtctcatatatcatctaaaaaatgtatctcactcattccagtgaacggacgacccaggaccggcctcaaaacgagccagtgttcttccccttccctttccgccagtcctggctctcccacccgccctcagatcaggcagaaaatcgagaataaacctctccaggagcagctcagcgttaatcagataaagaccgagcccgtggactatgaattcaagccaattgtggtcgcaagtgggatcaattgttctactccactgcaaaacggggtatttaccggaggcggtcccctacaggccactagtagccctcagggcatggtgcaagccgtggtgctgcccactgtagggctcgtgtccccaatcagtatcaatctgtcagatatacagaatgtcctcaaggtagcagtcgatggaaacgtgatacggcaagtgcttgagaacaaccaggctaatctggcgtccaaagagcaggaaactataaatgcctctccaattcagcagggcggacactccgtcatctccgctatttctctgccactggtcgaccaggacgggaccacaaagatcatcatcaactatagtcttgaacagccaagtcagctccaggttgtaccccagaaccttaagaaggagaaccctgtggcaactaattcatgcaagagcgaaaaactgcccgaagatttgactgtgaagtcagaaaaagacaagtctttcgagggaggcgtcaacgattccacctgcctgctgtgcgacgactgtcctggagatattaatgcccttcctgaattgaaacattacgatctaaaacaacccacccaacccccccccctgcccgccgcagaagcagagaagccagagtcctcggtgagcagcgccaccggcgatgggaatctctcaccaagccagccccctttaaaaaacctgctctcattgctaaaggcttattacgcccttaacgctcaaccgtctgcagaggaactgtcaaaaatcgccgacagtgtgaatctgcccttggacgtggtgaaaaaatggttcgaaaagatgcaagccggccagatcagtgttcagagcagcgagccaagcagtccagaacctgggaaagttaatattccagccaagaacaatgatcaaccgcaatccgccaacgccaatgagccacaagatagcacggtcaacctgcaatcccctttaaagatgaccaatagcccagtcctgcccgttgggagtactactaacggtagcaggtctagtacgccgagtccatccccgctgaacctatccagctcaagaaacacccaggggtatctgtataccgccgagggggcacaggaggaaccgcaggtagaaccgttagacttatcgcttccaaaacagcagggagagttgctggaaaggtccacaattaccagcgtttaccagaacagtgtgtactcagtccaggaagagcccttaaatctgagctgcgccaaaaaggagccccagaaagacagctgcgtcactgacagcgagcccgttgtgaatgtgatccctccctccgcaaaccccatcaacatcgccattcccaccgtgactgcacaattgccaaccatagtcgcaattgccgaccagaatagcgtcccttgtctaagagctttggccgctaataaacagacaattttgatccctcaagtggcctacacatactcaaccactgtgagtccagccgtgcaggaaccccctttaaaggtgatccagcccaacgggaatcaagacgagagacaagacacgtcttccgagggcgtgagtaacgttgaagaccagaacgacagtgattcgacaccacccaaaaaaaagatgagaaagaccgaaaatggcatgtatgcctgtgacctttgtgacaaaatctttcaaaagagctcctccctactcaggcataaatacgagcatacaggaaagcgcccccatgaatgtggtatttgtaagaaagcctttaaacacaagcaccacctcatcgaacacatgagactgcacagtggcgaaaagccatatcagtgtgataagtgcggaaagaggtttagccattccggctcatattcccagcacatgaaccatcgctattcttattgcaagagggaagcagaggaacgtgactctacagagcaggaggaggcaggcccggaaatattatcaaacgagcatgtgggggctcgcgccagcccttctcaaggagacagtgatgaacgggagtccctcacccgcgaggaggacgaggacagcgaaaaagaggaagaggaggaggacaaagagatggaagagctgcaagaggagaaagaatgtgaaaagccccagggagatgaagaggaggaagaggaggaagaagaagtcgaagaggaggaggtggaggaggctgagaatgaaggtgaggaagctaagactgagggtctgatgaaagatgacagagctgaatcgcaggctagtagcttgggccaaaaagtgggtgagtctagtgagcaggtcagtgaggagaaaaccaatgaggcctag

SEQ ID NO: 27125 - DNA, 3360 bp, synthetic construct
  misc_feature 1..3360: note = Description of Artificial Sequence: Synthetic coding sequence
  source 1..3360: mol_type = other DNA
atggccgacggcccccggtgcaagcggcggaagcaggccaacccccgacgcaacaatgtcacaaactacaatactgttgtggaaactaatagcgattcagacgacgaagacaaactgcatatcgttgaggaggagtctgtgacagatgctgcagactgtgagggggtccccgaagacgacttaccaaccgaccagacagtcctgcctggaaggagctccgagagggaaggtaacgcaaaaaactgctgggaagacgatagaaaagagggccaagaaatactggggcccgaagcccaggctgatgaagccgggtgtactgttaaagacgacgagtgtgagtccgacgctgagaacgagcagaatcacgatcctaatgtggaagagttcttgcagcagcaggacactgcagtgatctttccggaagccccagaggaggatcagcggcaggggacccccgaggctagcggtcacgacgagaatgggacccccgacgccttttcccagctcttaacctgcccatactgtgaccgagggtacaagcggtttactagcctcaaggaacacatcaagtataggcacgagaagaacgaggataatttttcctgctcattatgctcttacacctttgcatataggacccagcttgagaggcatatgactagccataaaagtgggcgggaccagaggcatgtgacacaatcaggatgcaatcgcaaattcaaatgtaccgaatgcgggaaggcctttaagtacaagcaccacctgaaggagcacctgagaatccacagcggcgaaaagccatacgagtgcccgaactgcaaaaagcggttttctcattctggctcctactcctctcatatatcatccaagaagtgtatcagtctcatacccgtgaatgggagaccgcggacaggcttaaagacaagccaatgcagctctccctctctgagcgcatcacccggaagcccgaccagacctcagattagacagaaaatagaaaataagcctttacaagaacagctgagtgtgaatcagattaagaccgaaccagtggactacgagttcaaaccgatcgtcgtggccagcgggataaactgctcgactccactgcaaaacggagtgtttacaggcggtggcccgctgcaagctacgtcctctccccaggggatggtgcaagccgtcgtcctccctactgtggggctcgttagcccgatatccattaacctgagcgacattcagaatgtgctgaaggtggctgtggacggcaacgtaatcagacaagtactggagaacaatcaggccaacctggccagtaaggaacaggaaactattaacgcatccccgatacagcagggagggcacagcgtcataagtgcaatctccttaccccttgtcgatcaggatggaacgaccaagatcattataaactatagcctggagcagccttcacagcttcaggttgtaccccaaaatctcaaaaaagaaaacccggtggctaccaacagttgtaaaagcgaaaagcttccagaggacctgacagttaaaagcgaaaaggataagtccttcgagggcggagtcaatgacagcacatgtctcctgtgtgacgattgtcctggagacatcaatgccctacctgaactgaaacactatgacttaaaacagccaacccagcctccacccttaccggcggcggaggccgagaaacccgaaagcagtgtgagtagtgccacgggcgacggcaatttgagcccctcccagcctccattgaagaatctgctgagccttctgaaagcatattatgctttgaatgctcagccgagtgctgaggagctgtcaaagatcgccgacagcgttaatctgccattagacgtcgtaaagaagtggtttgaaaagatgcaggccggacaaatcagcgtgcagtcatcggagccgtcatcaccggagcccggtaaggtgaatataccggccaagaacaacgaccagccccagtctgcaaacgcaaatgagccgcaggacagcacggtcaatctgcagtcgccgctgaaaatgaccaatagcccagttctgccggtggggtcaacaacgaatggcagccggtcctctactcccagcccatcccccctgaatctcagttcttctcggaacacacaaggttatctctacacagccgaaggtgcccaggaggaaccgcaggtcgagccgctggatctctcactacctaaacaacagggggagctgctggaaagatcctcgctcccggagcagtgtctcttctgcccagggcggaccctcgagttagtgctcaagaaagagcctcagaaggatagttgcgtcacagactcagagccagtggtgaacgtgataccacctagtgcgaatcccatcaacattgccataccgacagtgacagctcagctccctacgattgtagcgattgccgaccagaattctgtgccgtgcttgagggctttagctgcgaacaaacagacaatcctcattcctcaagtggcgtacacatacagcactactgtgagccctgctgtgcaagagccccccctcaaagtgatccagcccaacggaaaccaagacgagcgccaagataccagctctgagggcgtaagtaatgtagaagatcagaatgattcagactccacccctcctaaaaaaaagatgcgcaaaaccgaaaacggaatgtatgcctgcgacctttgcgataaaatcttccagaaatcatctagcctgctgagacacaagtatgagcacaccggaaaacgtcctcatgagtgcggaatatgcaagaaagcttttaaacacaaacatcacctaattgagcatatgcgtctgcattccggtgaaaagccatatcagtgtgataaatgtgggaagcggttcagccattccggctcgtattcacagcacatgaaccaccgctattcctattgtaagcgcgaggcagaggagcgggatagtacagaacaggaagaggccggcccagagatcctcagtaacgaacacgttggcgctcgcgcgagcccttctcaaggtgatagcgatgagcgcgagtcattaaccagggaggaggatgaggattccgagaaggaagaagaagaagaagataaggaaatggaggaactccaggaggagaaggaatgtgagaaacctcaaggcgatgaggaggaagaagaagaggaggaagaggtagaggaggaagaagtagaggaggcagagaacgaaggcgaggaggctaagactgagggactgatgaaggatgatcgggcagaatctcaggccagttctctgggtcagaaggtgggggaaagttcagagcaggtctccgaggagaaaactaatgaagcatag

SEQ ID NO: 27126 - DNA, 834 bp, synthetic construct
  misc_feature 1..834: note = Description of Artificial Sequence: Synthetic coding sequence
  source 1..834: mol_type = other DNA
atgaaggtgaccaactacaacaccgtggtggagaccaacagcgacagtgatgatgaagacaaacttcacattgtggaagaggaatctgttacagacgcggccgattgtgagggtgtccctgaggatgacctgcctaccgaccagacagtccttcctgggcgatcttccgagagagaggggaatgctaaaaactgctgggaggatgacaccgggaaagaaggccaggagattttgggccccgaagcccaggccgacgaagcgggatgcacagttaaggacgatgagtgtgagtctgacgctgaaaacgaacaaaatcatgaccctaacgtggaagaattcctgcagcagcaggacacagctgttatttttcccgaggccccagaagaggaccagaggcagggcacacccgaagcttctgggcacgatgagaatgggacgcctgatgccttttcgcagctcctcacatgcccatactgtgatagggggtataaacgattcacctcacttaaggaacacatcaaatatcggcacgagaagaatgaagataacttttcatgctctctctgttcctataccttcgcctaccgcacacagctagaaaggcatatgacgtctcacaaatcagggcgcgaccaacgccatgtgacacaatctggttgtaaccgcaaatttaagtgcaccgaatgcgggaaagcgttcaagtataaacaccacctgaaggagcatttaagaatccactcgggtgagaaaccttatgagtgccctaactgtaaaaagagattctcgcattctggcagttactcctcccacatcagttctaagaagtgtatctag

SEQ ID NO: 27127 - DNA, 3315 bp, synthetic construct
  misc_feature 1..3315: note = Description of Artificial Sequence: Synthetic coding sequence
  source 1..3315: mol_type = other DNA
atggccgacggcccccggtgcaagcggcggaagcaggccaacccccgccgaaacaacgttaccaactataacactgtggttgagactaattccgactcagacgatgaggacaagttacatatcgtggaggaagagtcagtgaccgatgccgctgactgcgagggtgtccccgaagatgacctgcctacggaccagaccgtgctgcctgggcggagttccgagcgtgaaggcaatgctaaaaattgctgggaggacgacattaaggacgacgagtgtgaaagcgatgctgagaacgagcagaaccatgaccccaacgttgaggaatttctgcaacagcaagataccgccgtgatctttcctgaagctccagaagaggatcaaaggcagggcacacccgaggcgtccggacacgacgagaacggtacgcccgacgccttctcccagttgcttacctgtccgtactgcgatagaggatacaaacgatttacttcactgaaagaacatattaagtaccgccacgagaagaacgaggacaactttagctgtagtctttgcagttacacttttgcgtacaggactcagctggagaggcacatgacgagccataagtcagggcgggatcagcggcacgtgacccaaagcggctgtaatcggaagttcaagtgcactgagtgcggcaaggcattcaaatacaagcatcacctgaaagaacacctgcggatccattccggagaaaaaccctacgaatgtccaaactgtaagaaaaggttttcacacagcggttcctactcctctcacatctcatccaagaaatgtatatcattgatacctgtaaacggccggccgaggactggcctcaaaactagccagtgctcgtcaccatccctgtccgcatctcccggcagccccacgcggccacagatcagacagaaaattgagaacaagcctctgcaggagcagctctcagtcaaccagattaaaacagagccagtggactacgagttcaaaccaatcgtggtagcatctggcatcaactgctctacaccactccagaacggggtgtttactggagggggacctctgcaggcaacttcctctcctcagggaatggtacaggccgttgtactgcctacggtgggcctggtctctcccatttccataaatctctctgacatacaaaatgtgttaaaggtggcagtggatggaaatgtgattcgccaggtgctggaaaataatcaagccaatctggccagtaaggagcaggagacaatcaatgcctcccctatacagcaagggggtcatagcgtgatatccgccatcagcctccccctcgtggatcaggatggaactactaaaatcataatcaactacagcctcgagcagccctcccagctgcaagtcgtccctcagaacctgaaaaaagagaacccagtcgctaccaactcatgcaaatcagaaaaattgcctgaggacctgaccgtaaaaagtgaaaaagacaagtccttcgagggcggcgtgaacgattcgacatgccttctttgcgatgactgtccaggcgatatcaacgctctgcccgagctgaagcattatgatttgaagcaaccaacgcagcccccacctctcccagctgctgaagctgaaaaacccgagtcgagtgtgtcctccgccaccggcgacggaaacttaagcccttcccaaccccccctcaagaatcttttgagcctcttgaaggcatattatgcccttaatgcccagccgtccgctgaggaattatccaaaattgctgatagtgtgaatctacccctagacgttgtgaagaaatggtttgaaaagatgcaggcagggcaaatctcggtccagtctagtgaaccctcaagtccggagcctggcaaggtgaacatacccgcgaaaaacaacgaccagccacagtccgccaatgcaaatgaaccccaggatagtacagtgaatctgcaatctccattgaagatgactaacagtccagtgctgcctgtcggatccactaccaacggatcacgatccagcacaccatctcctagccccctgaaccttagtagctcccggaatactcagggctacctttacactgcggagggcgcacaggaggagccacaagtcgagcctctggatttgtccttgcccaagcaacaaggcgagctactggagcggagcacaattaccagtgtgtaccagaacagcgtttacagtgtgcaggaggaaccattaaacctgagctgcgccaagaaagagccacagaaggattcctgcgtgaccgatagtgaacctgtggtgaacgtgattccgccaagcgcgaatccaatcaacatcgctattcccacagtcactgcccagctccccactatcgtcgccatagctgatcagaactccgtgccctgcctacgtgcgctggcagcaaacaaacaaactattctgattccccaggtagcctacacttactctacgactgtgtccccagcagtgcaagaacctcctcttaaagtgatacaacccaatggaaaccaggacgagcgccaggacacctcttccgagggcgtgtctaacgtcgaggatcagaatgatagcgatagcacacctcctaagaaaaagatgaggaagactgagaatggaatgtatgcctgcgatttgtgtgataaaattttccaaaagtcttcttcacttttacgccacaagtacgaacataccgggaagcgaccacatgaatgcggtatttgcaagaaggcgttcaaacataaacaccaccttattgaacacatgagactgcattccggagagaagccttaccagtgcgacaaatgtggtaaaaggtttagccatagtggaagctacagccagcacatgaatcacaggtattcatactgtaaacgtgaagcggaagaacgagacagtacagagcaagaggaagcaggcccagaaattctgtccaacgagcatgtgggtgcgagggcatcaccatctcagggagactctgatgagagagaaagcttaactagagaggaggacgaagattccgaaaaggaagaggaggaagaggacaaggaaatggaggaacttcaggaggaaaaagagtgtgagaagccacaaggcgacgaggaggaggaagaagaagaggaagaggtagaagaagaggaggtcgaagaagcagagaacgaaggcgaggaagccaaaacggagggtcttatgaaggatgatcgggcggagtcgcaagccagttcactgggccagaaggtgggggaaagtagtgaacaggtgtccgaggaaaaaaccaatgaagcctag

SEQ ID NO: 27128 - DNA, 3645 bp, synthetic construct
  misc_feature 1..3645: note = Description of Artificial Sequence: Synthetic coding sequence
  source 1..3645: mol_type = other DNA
atgaagcagcccatcatggccgacggcccccggtgcaagcggcggaaacaggcgaacccaaggcgtaaaaacgtcgttaattacgacaatgtagtggacaccggatctgaaacagacgaagaagacaaattgcatatcgccgaagatgacggcatcgccaatccactcgatcaggagacgtctcctgctagcgtgcctaatcacgagtcatccccacacgtgtcacaggctctgctgccacgagaagaagaagaggacgagattagagaaggcggagtggagcacccttggcacaataacgagatcctacaggcttctgtcgacgggcctgaagagatgaaagaggactatgacaccatgggtcccgaggccaccattcagaccgcaattaataatggaacagtcaagaatgccaactgtacaagcgatttcgaggagtactttgccaagcgcaagctcgaggaacgagatggacatgctgtcagtatagaagagtatttgcaaaggtctgataccgctatcatctacccagaagcacctgaagagcttagcaggcttgggacccctgaagcaaacggccaagaagagaatgaccttccgcctggcaccccggatgcgtttgcacagctgctcacctgtccctactgcgatcggggttataaaagactaacctccctgaaggagcacatcaagtacagacatgagaagaatgaggagaatttctcgtgccccctctgtagctacacttttgcctaccgcacccagttagagagacatatggtgactcacaaaccaggtaccgaccaacaccaaatgctcacgcagggcgcagggaaccggaagttcaaatgcacagaatgcggaaaggcctttaagtataaacatcaccttaaggagcacttgcgcatacacagcggagagaaaccctacgaatgtcccaactgtaaaaagagattctcccatagcggctcgtacagttctcatatcagtagcaaaaaatgcattggtctcatttctgtgaacgggcgaatgcgcaataatatcaaaacggggtcctctccgaactcagtctcctcgagtccaaccaactccgccattacccagctgcgcaataagctggaaaacgggaaaccactctctatgtctgagcagacaggactccttaagatcaaaaccgagcctctagactttaacgattataaggtgctgatggccacacacggattttcaggaacctctccttttatgaatggcggcttgggagccacatctcccctaggggtccatccgagcgcccagtcccccatgcagcacttgggcgtcggcatggaggcacccctgttgggattccctacaatgaattctaatctgtctgaagtgcagaaagtgcttcagatcgtggacaacaccgtgtcccgccagaaaatggactgcaaagccgaggagatttccaaattgaagggttaccacatgaaggatccgtgctcccagcccgaggagcagggtgtgacatctcccaatattcctccagtaggccttcccgttgttagtcacaacggtgcaacaaagagcataatcgattatactcttgaaaaggtgaacgaggcaaaggcctgtttgcagagcctgacaaccgatagcagaaggcagatcagcaacatcaaaaaagagaagctaaggactttgatagatttagtgacagatgacaagatgatcgaaaaccataatatatccacccccttctcgtgtcagttttgtaaagaatctttccccgggccaatacctctgcatcagcacgagaggtacctgtgtaagatgaacgaagaaataaaagcagttctccagccacacgagaatatcgtgcctaataaggccggggtctttgtggataataaggcccttctgctctccagtgtgttaagtgagaagggaatgaccagcccaattaacccctataaggaccacatgtccgtgctcaaggcgtactacgctatgaatatggagccaaatagtgatgaattgctcaagatttctatcgctgtcgggttgccccaggaattcgtgaaggagtggttcgagcagcgaaaagtctaccaatactctaattctcgaagtccatcactggaacgaagttccaagcctttggctccaaattctaatccccccactaaggatagcctgctcccaaggtccccagtcaaaccgatggatagcattactagcccctccatcgccgaacttcacaattctgtgaccaattgcgacccaccacttcgcttaaccaagcctagtcattttacaaacattaaaccagtggaaaaattggatcattcccgatccaataccccctcacctttgaacttgtcatccacatcctctaaaaatagccattcgagctcttatacccctaactctttcagctcggaagaactccaggccgagcccttagacctctccttgcccaaacagatgaaggaacctaaatccataatcgcaacgaagaataagactaaggctagtagcattagtctggatcataacagcgtctcaagctcgagcgaaaattcagatgaaccccttaacctcaccttcatcaagaaagaattttcaaattccaacaatttagataacaagtcaacaaacccagtttttagcatgaatccttttagcgctaagccactctacacagctttgcctccacagtccgcatttccacctgccacattcatgccacccgtgcagacatcaattccaggactgcgcccgtatccgggcttggaccagatgagcttcctgccccacatggcatacacttaccccaccggcgctgctacttttgccgatatgcagcagcggcggaagtaccagcgcaaacaagggttccagggagagttgctggatggcgcccaggattatatgagcgggctggatgatatgactgactctgactcctgcctaagtagaaagaaaattaagaagactgaaagcggtatgtacgcctgcgacctctgcgacaaaacattccagaaatcgtcttccctcctacgtcataagtacgagcatacaggcaaacgccctcatcagtgccagatctgtaagaaagcgttcaaacataaacatcacttaatagagcatagccgcttgcatagcggagagaaaccctaccagtgtgacaagtgcggcaaacggttttcccacagtggctcatacagccaacatatgaatcaccgctactcctattgtaaacgcgaggctgaagaaagggaagccgccgagagggaagccagggaaaaaggtcacttagagcccactgaactcctcatgaaccgcgcttacctgcaatccatcacccctcagggatactcagactctgaggagagagaatccatgccacgcgacggagaaagtgagaaggagcacgagaaggaaggtgaagacggctacgggaagctcgggagacaagatggggatgaagaatttgaggaagaggaagaggagagcgaaaataaatctatggacaccgacccggagacaattcgtgacgaagaggagacgggggaccattcaatggatgatagctctgaggatggtaaaatggagacgaaaagcgaccacgaggaggataacatggaagacgggatgtag

SEQ ID NO: 27129 - DNA, 1275 bp, synthetic construct
  misc_feature 1..1275: note = Description of Artificial Sequence: Synthetic coding sequence
  source 1..1275: mol_type = other DNA
atggccgacggcccccggtgcaagcggcggaagcaggccaacccccggcggaaaaatgtggttaattacgataatgtcgtggatacgggatcagaaaccgacgaggaggataaactccacattgcagaagacgatggcatcgcaaacccgctggatcaagagacctcccccgctagtgttccaaaccatgagagctccccccatgtctctcaggcacttttgccgagagaggaagaggaagatgagattagagagggcggggtggaacacccatggcataacaacgagatcttgcaggcttctgttgacgggcctgaggaaatgaaagaggattacgacacgatgggccccgaggcaactattcagactgccatcaacaacggaacagttaagaatgcgaactgcacaagcgacttcgaagagtactttgccaagcggaaactagaggaacgagacgggcatgcggtgtctatcgaagagtacctgcagcggagtgataccgcgatcatataccctgaggcccccgaagagctgtcaaggctagggacccctgaggcaaacggtcaggaggaaaacgacttgccccccggaacacctgacgcgttcgctcagctactcacgtgtccctactgtgatagaggctacaagagattaaccagcctcaaggagcacatcaaataccgccatgagaagaacgaagaaaacttcagttgccctctgtgttcgtacacctttgcataccggacccaactcgaaaggcacatggtgacacataagccgggtaccgaccagcaccagatgctgactcagggggccgggaatcgtaaattcaagtgcaccgagtgcggaaaggcattcaagtataaacaccacctgaaggaacacctgcggatacatagcggtgagaagccctatgagtgtcccaattgtaaaaaacggttcagccattcaggcagttactcatcccacatctcatctaagaagtgcataggactcatcagcgtcaatggccgaatgcggaacaatatcaagacagggtccagtccaaacagcgtttcctccagtcctactaactcagccatcacacagctgcggaacaaattggagaacggaaaaccgctgtctatgtctgagcagacagggctgctgaagtcgggtagagcccagtggcttaccccactcattccagctttactggaggctgaggtcgggcggagtcggggacagaagatcgagacgctcctggctaacatggttgaacctagactttattag

SEQ ID NO: 27130 - DNA, 1320 bp, synthetic construct
  misc_feature 1..1320: note = Description of Artificial Sequence: Synthetic coding sequence
  source 1..1320: mol_type = other DNA
atgaagcagcccatcatggccgacggcccccggtgcaagcggcggaagcaggcaaatccacgacgcaagaatgtagtgaactacgacaatgttgtggacacaggaagcgaaacagatgaggaagataagctgcacattgccgaggacgatggaattgctaaccccctcgaccaggagacatctcctgcttccgtgccgaaccatgagtcctccccgcacgtgagccaggctcttttgccccgtgaagaagaggaagatgaaatacgagaaggaggagtggagcacccctggcataacaatgagattctgcaggcttccgtggatggacccgaggagatgaaagaagattacgacacgatgggacccgaagcgacaattcaaacagcgataaacaatgggaccgttaaaaatgctaattgcacgtcggactttgaggaatattttgcaaagaggaagctggaggaaagggacggtcacgcagttagcattgaggagtacctgcagaggagcgacaccgctatcatttaccctgaggccccagaggagctcagtcgtctaggcacccccgaggcaaatggtcaggaagagaatgaccttccacctgggaccccagacgcttttgcccaattactgacttgtccttactgtgacaggggttacaaacgtctgacttcccttaaggaacacatcaagtatcgccatgagaagaacgaggaaaattttagttgtcctctctgtagttatacttttgcttatcggactcagctggaaaggcatatggttactcataagccaggcaccgatcagcatcagatgctcacacaaggagccggaaaccggaaatttaagtgtaccgaatgcggcaaagcttttaagtataaacaccacctgaaggagcacctgcggatacactccggtgagaaaccatatgaatgtccaaactgtaagaaacgtttcagtcactctggtagctacagctcccatatctccagcaaaaagtgcatcggcttaatttcagtgaatggccgaatgaggaacaacataaagactggctcgtccccaaatagcgtctccagttctcctactaactctgccattacccagctacggaacaaactggagaatggaaaacctctctccatgtccgaacagacaggcctcttaaagatcaagacggagcctttggattttaatgactacaaagtcctgatggcaactcacggcttttctggcacgtctcccttcatgaacggaggcctcggggctacatcgcccctgggtgtgcacccatccgctcagagtccgatgcagcatctttag

SEQ ID NO: 27131 - DNA, 408 bp, synthetic construct
  misc_feature 1..408: note = Description of Artificial Sequence: Synthetic coding sequence
  source 1..408: mol_type = other DNA
atgaagcagcccatcatggccgacggcccccggtgcaagcggcggaaacaggccaatccacggaggaagaacgtcgttaactacgataacgtggtggacaccgggtctgaaacagatgaagaagataagctacatattgcagaggacgatggcatcgctaacccactggatcaagagacgagccccgccagcgttccgaatcacgagtcatcccctcacgtatcacaggctctgcttcctagagaagaggaggaagatgaaattagagaaggcggagttgaacatccatggcacaacaacgaaattctgcaagctagtgtggacggacccgaggagatgaaagaggattatgataccatgggaccagaggctaccatccaaaccgcaattaataacggaaccgggtag

SEQ ID NO: 27132 - DNA, 3645 bp, synthetic construct
  misc_feature 1..3645: note = Description of Artificial Sequence: Synthetic coding sequence
  source 1..3645: mol_type = other DNA
atgaagcagcccatcatggccgacggcccccggtgcaagcggcggaagcaggcaaatccaaggaggaaaaatgtcgtgaattatgataacgtcgtggacaccggttccgagaccgacgaggaggacaaattgcacattgcagaagacgatggaattgctaaccccctcgaccaagagacctccccggcaagcgttcctaaccacgagagttcaccccacgttagccaggcactcttgcctagggaagaagaggaggatgagatcagggagggcggcgtcgagcacccatggcataacaacgagattttacaagcctccgtcgacggcccagaggagatgaaggaagactacgacacaatgggccccgaagccactatccagacggccatcaataatggcactgtcaagaacgccaactgtacatctgactttgaagagtattttgccaaacgcaagctcgaggaaagagacggacacgctgtgtccatcgaggagtatctgcagcgcagcgatactgctatcatataccccgaagcacccgaggagttgtctaggttggggacccctgaggccaacggtcaagaagaaaacgatttgccacccggaacgcccgatgcctttgcccagttgctcacctgtccatattgcgatagagggtataaacgtctgacgagcctcaaggagcacatcaaataccggcacgagaagaatgaagagaacttctcttgtcctctgtgctcgtatacgttcgcctatcgtacccaactggaacgtcacatggtgacccacaaacctggtacggaccagcaccagatgctgacacagggagccggaaataggaaatttaaatgcaccgaatgtggcaaggccttcaagtataagcatcacctcaaggagcatctgcgcatccattcaggagaaaaaccttatgagtgtccaaactgcaaaaagcgattctcacattcgggatcctacagcagccatatctcgagtaagaaatgcataggccttattagtgtgaatgggaggatgaggaacaacataaaaaccggaagctcccctaactcggtgtcctcttctcctaccaactctgccattacacaattacgtaataagctcgagaatggcaagcctttgtctatgtcagaacagactgggctcctgaaaatcaagactgagcctctggatttcaacgattataaggtgctcatggccacgcatggatttagcgggacctctccgtttatgaatggcggattaggtgcaacgtctccattaggggtacatcccagtgcacagagcccgatgcaacatttgggagtcgggatggaagcgccgctcctgggctttccaacaatgaatagtaatttaagcgaagtgcagaaagtcctgcagatcgttgataacaccgtcagtcgacagaaaatggattgtaaagcagaggaaatctctaaactgaaaggctatcacatgaaagatccttgctcccaacccgaggagcagggagtcacctctcctaacatccctccagttggcctgcctgtcgtcagccataacggggcaaccaaatccatcattgactacaccttggagaaggttaacgaggcaaaggcctgcctgcaaagtttgacaaccgatagccgcaggcaaatatccaacatcaaaaaggaaaagctgaggacgctgattgatttggtgaccgatgataaaatgattgagaaccataatatcagcacccctttctcttgccaattctgcaaggagtcctttcccggcccaatccctttgcaccagcatgagcgatacctctgcaagatgaatgaggagatcaaggcggtgctccagccacatgagaatattgttcccaataaagccggggtcttcgttgataataaagccctactcctgtcctctgtccttagcgagaaaggaatgacaagtcccattaatccatacaaagaccatatgagtgtgctgaaagcctactacgctatgaacatggagcctaatagcgatgagctgctaaagatcagcatagccgtgggactacctcaggagttcgtaaaggagtggtttgaacagagaaaggtttaccagtatagtaatagccggtctccttctctcgaaagatccagcaaaccactcgctcccaactctaatccccctacaaaggatagcttacttcctagatccccagtgaaacctatggactccatcacctctccatccatagcggagctgcacaactcagtgaccaattgcgacccacccctcaggctcacaaagccgtctcatttcactaacataaagccggtagagaagcttgatcattcccgctcaaatacgccctcccccctgaatctgtcatcaacgtcaagtaagaatagccattcctcctcttacacacctaactccttttccagcgaggaactccaagccgagcctttagaccttagccttcccaagcagatgaaggagcctaaatcaatcatagcgactaagaataagaccaaggcctcttcaatcagccttgaccataacagcgtgtcctcttcaagcgagaacagcgatgaaccgctgaatttgacattcattaaaaaagaattttcaaattcaaacaatctggataataaatcgaccaatcctgtgttctccatgaaccccttctccgccaaacctttgtataccgccctccctcctcaatctgcatttccacccgctacttttatgcctcctgtccaaacatctatccctgggcttagaccataccccggcctggaccagatgtctttcttaccccatatggcctatacttacccgactggcgccgccacatttgctgacatgcaacagagaagaaaataccagcgaaagcagggttttcagggagaactgctggacggcgcgcaagactacatgtctggattggatgatatgaccgactccgacagctgtctcagccggaagaaaatcaaaaagaccgaaagtggaatgtacgcctgcgatctgtgtgacaagactttccagaagtcgtctagcctgttgcggcacaaatacgagcacacgggaaagcgacctcatcagtgccaaatctgtaagaaagcttttaagcacaagcaccacttaattgagcactccagactacacagcggagaaaaaccataccagtgcgacaaatgcggcaaaagattcagccattcggggtcctattcccaacacatgaaccatcggtatagctactgtaagcgcgaggccgaagagcgtgaagccgctgaaagagaagccagagaaaagggccacctggagcctaccgaactacttatgaatcgagcttacctgcagtctattacacctcagggctattcagacagtgaggagagagagtccatgccacgcgacggcgagtcagagaaagagcatgaaaaagagggagaggatggttacggtaaattgggcaggcaggatggcgatgaagaattcgaggaggaagaagaggagtccgaaaacaagtctatggatacagaccctgagaccatccgggacgaggaagaaaccggcgaccactccatggacgacagtagtgaagatggaaaaatggaaaccaaaagtgatcacgaagaagataacatggaggacggtatgtag

SEQ ID NO: 27133 - DNA, 2109 bp, synthetic construct
  misc_feature 1..2109: note = Description of Artificial Sequence: Synthetic coding sequence
  source 1..2109: mol_type = other DNA
atgaagcagcccatcatggccgacggcccccggtgcaagcggcggaagcaggctaatcctaggaggaagaacgtggtcaattatgataatgtagtggacaccggatcagaaacagacgaggaagacaagctgcatatcgctgaagatgacgggatcgctaatccattggaccaggagactagccctgcctcagttccgaaccatgaatccagtccacacgtctcacaagccttgctacccagggaagaagaggaggacgagattcgagaggggggcgtagagcacccctggcataataacgagatactgcaggctagcgttgatggacccgaagaaatgaaggaagattacgacaccatgggtcctgaggccaccattcagacagcaattaataatggcactgtaaaaaatgccaattgtacgagcgatttcgaggaatatttcgccaagaggaaactggaagagcgcgacgggcatgccgtgtctatagaagaatatctgcagagaagcgatacagcaattatataccccgaggcccccgaggagctatctcgactggggacccccgaagcgaatggtcaggaagaaaacgacttgccaccaggaacgcctgatgctttcgctcagcttctcacctgcccttactgcgatagaggctataagagactgacatcgctaaaggaacacataaagtatcgacacgagaagaacgaggagaacttcagttgtcccttgtgctcatacacgtttgcctatcggacgcaattggaacgtcacatggtgacccacaagccaggaacggatcagcatcaaatgctgacccagggggcagggaataggaaattcaaatgtacagaatgcggtaaggcatttaagtacaagcaccacctcaaggaacacttaaggattcattcaggggaaaagccctatgagtgcccaaactgcaagaagcgcttctcacacagtgggtcatatagcagtcatatctccagcaagaaatgcatcggcctcattagcgtgaacggacgaatgcgaaataatattaaaaccggcagcagtcccaactcggtgtcatcctccccaaccaactccgccattacacagctaagaaataaattagagaatggaaagccgttgagtatgtcagaacagactgggctgctgaagataaaaactgagccactggacttcaatgattacaaggtgttaatggctacgcacggttttagcggcacctcaccttttatgaacgggggattgggagcaacctctccgttaggtgttcatcccagcgcccagtctccaatgcaacatctgggcgtggggatggaggctccccttctgggctttccaacgatgaattcaaacttatccgaagtccagaaggtgttacagatcgtggataacaccgtgtcccggcagaagatggattgtaaggcagaagagatatccaagctcaaaggttaccatatgaaagatccgtgttctcagccagaagagcagggcgtgacttcccccaacatcccccccgttggcctccctgtggtctctcacaatggagccaccaaaagtatcatcgactacacgcttgaaaaggtgaacgaagctaaggcttgcctccagtctctaacaactgatagccggagacagatctcgaacatcaagaaggagaagttaaggactttaattgatctcgtcaccgacgacaaaatgatcgagaatcacaatataagcactcctttctcctgtcagttctgtaaagagagctttcccggtccgatcccgctacatcaacatgaaagatacctgtgcaagatgaacgaagagatcaaagccgtattgcagccgcatgaaaacatagtccctaataaagctggcgtattcgtcgacaacaaggcactgctgctatcttctgtgttaagtgagaagggaatgacctctcctataaacccctacaaggaccatatgtctgtcctgaaagcctattacgccatgaatatggagccaaattccgacgaattgttgaaaatttcaatcgcggtgggcctaccccaagaattcgtaaaggagtggttcgagcagaggaaagtttaccagtactccaactag

SEQ ID NO: 27134 - DNA, 276 bp, synthetic construct
  misc_feature 1..276: note = Description of Artificial Sequence: Synthetic coding sequence
  source 1..276: mol_type = other DNA
atgaagcagcccatcatggccgacggcccccggtgcaagcggcggaaacaggccaatccacgtaggaagaacgtggtgaattacgataatgttgtggataccggaagcgaaaccgatgaagaggacaagctacatattgccgaggatgacggcatcgctaatccactggatcaagaaacaagcccagcatcagtgcccaaccacgagagcagcccacacgtcagccaggccctcctcccccgggaggaagaagaggacgagataagggaggggtag

SEQ ID NO: 27135 - DNA, 192 bp, synthetic construct
  misc_feature 1..192: note = Description of Artificial Sequence: Synthetic coding sequence
  source 1..192: mol_type = other DNA
atgaagcagcccatcatggccgacggcccccggtgcaagcggcggaaacaggctaaccccagacgaaagaacgttgtgaattatgacaacgtcgtcgacaccggatctgaaaccgacgaggaagacaagctacacatagccgaagacgacggcatcgcgaatccccttgatcaggaaaccagcccagcttag

SEQ ID NO: 27136 - DNA, 3573 bp, synthetic construct
  misc_feature 1..3573: note = Description of Artificial Sequence: Synthetic coding sequence
  source 1..3573: mol_type = other DNA
atgaagcagcccatcatggccgacggcccccggtgcaagcggcggaaacaggcgaatcctcgacggaagaacgtagtcaattacgacaatgtggttgataccggttccgaaacagatgaggaggacaaactacacatcgccgaggacgacggaatcgctaatcctcttgatcaggaaaccagtcctgctagcgtcccaaaccatgaatcctctccacatgtttcgcaggccttgctgccccgagaggaggaggaggacgagatcagggaggggggagtagagcacccatggcacaataatgagatcctccaagcttccgtggatggccctgtgaagaacgccaactgtaccagcgattttgaagagtattttgccaaacggaagttggaggaaagggatggccacgccgtctcaattgaggagtatctgcagcgctctgacacagcgatcatatacccagaggcaccggaagaactctcacgtctcggcactcccgaggcaaacggccaagaggagaatgacctgcctcctgggacaccagatgcattcgctcaactccttacatgtccatattgcgaccgcggctataagcgcttgacttcgttgaaagaacatattaaatatagacatgagaagaacgaggaaaacttttcctgcccactttgctcttatactttcgcatatcgaacccagctggagcgccacatggtcacccataagccagggacagatcagcaccaaatgctgacacaaggagcgggaaaccgaaagttcaagtgtacggaatgcggtaaggcctttaaatacaagcatcatttaaaggaacacctgcgaatacattcaggagagaaaccttatgaatgcccgaactgtaagaagcgatttagtcacagcgggtcttattcaagccacatatccagcaaaaaatgtataggactgatctccgtgaacggcagaatgcggaataatatcaaaaccggctcatccccaaactccgtgagttcctcaccaaccaattcagcaataacacagttgagaaataaactggagaatggtaagccactgtctatgagcgagcaaaccggcctgcttaaaattaaaacagagcctctcgactttaatgattataaagtgcttatggctacacatggatttagcggaacaagcccctttatgaatggaggactcggggcaacctctcctctgggtgtacacccctctgcgcagtctccaatgcagcatctgggggtcggaatggaggcgcccctgctcggctttcctaccatgaatagcaatctctctgaggtacagaaagtgcttcagatcgtcgacaataccgtctctcggcagaaaatggactgcaaggctgaagagatctccaagctgaaggggtaccacatgaaagacccttgctctcagcctgaggagcagggagtgacctcccccaatatcccacccgtagggcttcccgtcgtgtcccataacggagccaccaagagcattattgactataccctggagaaagttaatgaggccaaagcctgcctgcaatcactcactactgacagtaggcgtcaaatttcaaatatcaagaaggaaaagctgcggacccttattgacctggtaacagatgataagatgattgagaaccataacattagcacgcccttttcttgccagttctgcaaggagtcctttcccggtcctatccctctgcaccagcacgagaggtacttatgtaagatgaatgaagagattaaggccgtcctgcaacctcatgaaaacatagtacccaataaagcgggcgtgttcgtggataacaaggcactgttactttctagtgtcctgagcgaaaaaggaatgactagtcctatcaacccatataaagatcatatgagcgtcctgaaagcctactacgcaatgaatatggagccaaatagcgacgagctgttaaaaatatccatcgcggtcggcctgccccaagagttcgtaaaagagtggtttgaacagcgtaaagtgtatcagtactccaattcaagatcaccttccttggagaggtcctcaaaaccactagcccctaacagcaatcccccgacaaaggattccctgctgccacgcagtccagttaaaccaatggattctatcacgagtccctcaattgccgaattgcacaactcagtgactaactgtgatccccctctgcgcctcactaagccgagtcatttcactaatatcaagccggtggaaaagctggatcacagcagaagtaacacgccatcaccactgaacctgagctctacatcgagtaaaaatagccacagcagttcatacaccccaaattccttcagtagcgaggaactccaagctgaacctttagatttgtctttgcccaagcagatgaaggagcccaaatcaataatcgcgactaagaataagacaaaggcctcctccatatctttagatcacaattctgtctctagtagcagcgaaaactccgacgaaccactcaacctgacctttatcaaaaaagaattctcaaactcaaataacctggataacaagagcaccaacccagtattctcaatgaatcctttctctgcgaagccactctataccgctctgcctccccagtctgccttcccgcccgccactttcatgcctcccgtgcagacaagtatcccaggcctgcggccatacccaggcttggaccagatgagttttctgccacatatggcatacacctacccaacaggggccgctacatttgctgatatgcagcagagaagaaaataccagagaaaacagggcttccaaggggagctgttggacggcgcccaggactacatgagcggcctggatgacatgaccgattctgacagctgtcttagcagaaaaaaaataaagaaaacagagagcggcatgtatgcctgcgacctgtgcgacaaaactttccagaaatcatctagcttgcttcggcataaatacgagcacacaggtaaacggccacaccagtgccagatctgtaaaaaagcctttaaacacaaacaccacctgatcgagcattcccgactgcattctggcgaaaaaccgtaccagtgtgataagtgtgggaaaaggttcagtcacagcggctcttactcacagcatatgaaccacagatactcttactgtaagagggaggctgaggagcgcgaagccgctgaacgggaggcccgcgagaagggccacctggaacccaccgaattgctcatgaaccgggcttatttacaaagcatcacaccccagggctactccgactctgaggaacgcgagagcatgccacgcgacggggagagcgagaaggaacatgaaaaggagggggaggacggatacggcaagttgggaaggcaggatggcgacgaggagttcgaagaagaggaggaagagtcagagaacaaaagtatggataccgatcctgaaaccataagggatgaagaggagacaggcgaccattctatggatgatagtagcgaggatggcaagatggagactaagagcgaccatgaagaggacaatatggaagacggtatgtag

SEQ ID NO: 27137 - DNA, 3645 bp, synthetic construct
  misc_feature 1..3645: note = Description of Artificial Sequence: Synthetic coding sequence
  source 1..3645: mol_type = other DNA
atgaagcagcccatcatggccgacggcccccggtgcaagcggcggaaacaagccaatcctagacggaagaatgtagtgaattatgacaatgtggtcgatacaggttccgaaacagatgaggaagacaagttacatatagcagaagacgatggcattgccaacccccttgatcaggagacaagtccagctagtgtgcccaatcatgagtcaagcccgcatgtgtctcaggccctgctgcctcgggaggaggaagaggacgaaatacgggagggtggcgtggagcacccgtggcacaacaacgaaatcttgcaggcaagtgtagacgggcccgaagagatgaaagaagactatgatactatgggccctgaggctaccatccagacagcaatcaataacggcaccgtgaagaatgctaactgcacaagcgatttcgaggagtacttcgccaagcgcaagcttgaggagagagacggtcatgcggtgtctattgaggagtatttacagagatcagacaccgcaattatttaccctgaagctcccgaggaactgagccgcctcggtacacctgaggctaatggccaggaggagaatgacctccctcccgggacacccgacgcttttgctcagctgttaacatgcccctattgcgatcgaggatataaaagattgaccagcttgaaggagcacatcaagtaccggcacgagaagaacgaggaaaactttagctgccccctctgtagctacaccttcgcctatcgaactcaactagaacggcatatggtcactcacaagccaggcaccgaccagcaccagatgttaacacagggtgccggcaatagaaagttcaagtgcacggaatgcggtaaggcatttaaatataagcatcatctgaaggagcaccttagaatccactctggggaaaaaccatacgagtgccctaactgtaagaagaggtttagccatagcggctcatacagtagccacattagctccaagaagtgcatcggactgattagcgtgaatggtcgaatgaggaacaacattaagacaggctccagccccaactctgtttcctctagccccacaaatagcgccatcacccagttaaggaataagctcgagaatggcaaaccattaagtatgtccgagcaaacaggcttgctgaaaataaagactgaacctctcgattttaacgactacaaggtgcttatggccacccatgggtttagcggtacaagcccgttcatgaatggcggcctgggggccactagccctctgggagtgcacccaagcgcccagtcaccaatgcagcatttgggcgtgggcatggaagcccctctcctgggttttcctacaatgaactctaacctaagcgaggttcagaaggtgctgcagattgtcgataataccgtgtcccggcagaagatggactgcaaggccgaggagatcagcaaactaaaaggctatcacatgaaggatccttgctcccagcctgaggagcagggcgtgacatctccaaacatcccaccggttggactgcctgtcgtgtctcataatggtgcaacgaagagcattatagattacactttagaaaaggtgaatgaagctaaagcttgcctgcagtcattgacgaccgactcaaggagacagattagcaatattaagaaagagaaactccggactctcatcgacctcgtcaccgatgataagatgatcgaaaaccataatatctccacccccttttcctgtcaattctgcaaggaatcttttccaggtccaatcccccttcatcaacacgaaagatatttatgtaagatgaacgaggagatcaaggcagtgctgcaaccgcacgaaaacatcgtgccaaacaaggcaggtgtgtttgtggacaacaaagcactgctgctctccagtgtcctgagcgagaagggaatgactagcccgattaacccttacaaggatcacatgtcagtattaaaggcctactacgccatgaatatggaaccaaactcagatgaactcctcaagatctctattgccgtggggctgccgcaggagttcgtcaaagagtggtttgaacagcgcaaggtttaccaatactctaattccaggagcccctctttggagcgcagctctaagccacttgcacctaacagcaatccccccactaaagatagcttactcccccgtagtcccgtcaagcccatggacagcatcacaagccctagtatcgccgagctgcataatagcgtgaccaattgtgaccctcctcttagattaacaaagccctcgcattttactaatatcaagcctgtggagaaactcgaccatagcaggagcaatactcctagtcccctcaacctgtcttcaacctccagcaaaaactcacattcgtcaagctatacccccaactcgttctctagcgaggagctccaggctgaaccactagacctgtcgctgccaaagcagatgaaggaaccaaaatcaattatcgccactaaaaacaaaacgaaggcatcatccataagcttagaccacaactccgtcagctcctcctccgagaatagtgacgagccactgaatctgaccttcattaagaaggagttctcgaacagcaacaatctcgacaacaagtcaacaaatcctgtgttctcaatgaaccccttcagcgcgaagcctctctataccgccctgcccccacagtcagcttttccacccgcgacttttatgccacccgttcaaacgtcaatccccgggttgaggccctaccccgggttagaccaaatgagctttctcccgcacatggcttacacatatccaacaggcgcagctacctttgccgatatgcagcaacgccgcaaatatcagcgaaaacagggcttccagggcgagctcctggatggagcacaggattacatgtcagggcttgacgacatgaccgatagcgacagctgcctgtcacggaagaagatcaaaaagactgaatccggaatgtacgcctgcgatctctgtgataaaaccttccaaaagtccagctcgctcctcaggcataaatacgaacataccgggaagaggccacatcagtgccagatttgtaagaaagcattcaagcataagcatcacctgattgagcacagtaggcttcactccggggagaaaccctatcagtgtgacaaatgcgggaaacgattttctcattccgggtcttactctcaacatatgaaccaccgctatagctattgtaagcgagaggccgaagagagggaggcagctgaacgagaggcacgagaaaaaggccacctcgaacctaccgaacttttgatgaatagagcctacctgcagtctatcacccctcagggctacagtgattctgaggaacgggaatcaatgccccgggacggtgaatctgaaaaagagcacgagaaggaaggcgaggacggatacggcaagctagggaggcaggacggcgatgaggaatttgaggaggaggaggaagaatctgaaaacaagagtatggacacagaccctgaaactatccgggacgaggaggagacaggagaccacagcatggatgactcatccgaggatgggaaaatggaaaccaagtccgatcatgaagaggataacatggaagacgggatgtag

SEQ ID NO: 27138 - DNA, 1893 bp, synthetic construct
  misc_feature 1..1893: note = Description of Artificial Sequence: Synthetic coding sequence
  source 1..1893: mol_type = other DNA
atgagcatcagcgccctgggcggccggaccaagggcaagcccctgcctcccggcgaggaggagagaaacaacgtgttaaaacaaatgaaggtgagaactacccttaaaggagacaagagctggatcaccaagcaggacgaaagtgaaggcaggaccattgaactcccctctggtaggtccagagctacttcttttagcagtgctggggaagttccaaagcctagacctccgtctacgcgcgcccccacagggtatattatccggggagtcttcaccaagcccatagatagctccagccaaccacagcagcaattccctaaggctaatggcactcctaagagcgcagccagtctggtgcgcacagcaaacgcaggtcccccccggccctcctcgagcggctacaaaatgaccaccgaagactataagaagcttgcaccctataatatccgcagaagtagtacttctggtgataccgaggaagaagaggaagaagaggtggtgcccttttcgtcagacgaacagaaaagacggtcagaggctgccagtggcgtgctccgcaggaccgcccccagggagcatagctacgttcttagcgctgcaaagaagagtaccggacccacccaagagacccaggctccttttatcgccaaacgggtggaagtggtggaagaagacggtccctcagagaagtcccaagatcccccagcattggccagaagtacgcctgggtccaaccgatcgtcaccaggcaataaagataaagaagcaccgtgcagccgggaactgcagcgcgatctagcgggggaggaggcattccgcgcgccgaacaccgacgccgcccgtagctcagctcagctgtccgacgggaacgtagggtccggcgctaccggatcacggccggaggggctagccgccgtagatattggatctgagcgtggtagctcctcagccacttccgtgtccgccgtccccgcagatcggaagagcaatagcacggccgctcaggaggatgctaaggcagatcccaaaggggcattagccgactatgaggggaaagacgtagcaacaagggtgggggaggcgtggcaggagcggcctggtgcccctagaggcgggcaaggcgaccccgcagttccagcccaacagcccgccgacccatccacacctgagcggcagagtagccccagtggatctgagcagctggttagaagagagtcatgtggaagttcagtgcttaccgattttgagggcaaagacgtcgccaccaaggtaggggaagcttggcaggaccgtccaggggcgccccgagggggtcagggcgaccccgctgtgcctacccaacagcctgccgatcccagcacccctgagcagcaaaacagcccatctgggtctgagcagttcgtaagacgcgagagctgcaccagtagggttcgaagtccatcctcctgcatggtgactgttactgtgactgccacctctgagcagccacacatctatataccagctcctgcatccgagttggatagctcaagcaccactaagggtatcctgtttgtgaaagagtacgtaaatgcctcagaggtgtcatccggcaagcctgtgtcagcccgctactctaacgtgagctccatcgaagactcttttgccatggagaagaagccaccatgtggttccaccccttatagtgagagaaccactggcgggatctgcacatactgcaacagggagatccgcgattgcccaaaaatcacactggagcatctgggtatttgctgtcacgagtactgctttaagtgtggaatttgttccaaaccaatgggagacctgctagatcagatattcatccatagagacactattcactgcgggaagtgctatgaaaagttattttag

SEQ ID NO: 27139 - DNA, 1407 bp, synthetic construct
  misc_feature 1..1407: note = Description of Artificial Sequence: Synthetic coding sequence
  source 1..1407: mol_type = other DNA
atgaccaccgaggactacaagaagctggccccctacaacatccggcggagcagcacaagtggcgataccgaggaagaggaagaagaagaggttgtgcccttttccagcgacgaacagaaacgaagcagtcccacccaagaaacccaggctcctttcattgccaaacgcgtcgaagtcgtggaagaggatggtccaagcgaaaaaagtcaagacccacccgctctggcccgcagcacacccggcagtaatagatcatcacctgggaacaaggataaggaggccccttgtagccgtgagttacagagggaccttgcgggcgaagaggcttttcgggcccccaacacagacgctgctaggtcatcagctcagttatccgacggcaacgtcggatccggggccacaggcagtcgaccagaaggactcgccgctgtcgatatcggaagcgaaagagggtccagctccgccacttcagtctcagcggtacctgctgaccggaagtctaacagcactgctgcccaggaggatgccaaggcagacccgaaaggagccctggccgattacgagggcaaagacgtggcaactagagttggtgaagcgtggcaagagaggccaggagccccccgcggcggtcagggggaccctgccgttcctgctcagcaacctgccgatccttcaacaccagaacgccagtcttcgccctctgggagtgagcagctggtgcggagggaatcttgtggtagctcggtccttaccgacttcgaagggaaggatgtcgctacaaaagtgggtgaggcctggcaggaccgacctggcgccccaagagggggccagggcgatccagcggtgcccacacagcagcctgccgatccgagtacaccagaacagcaaaactcccccagcgggtctgagcagtttgtcagaagagaaagttgtaccagcagagtgcgctcaccctcgtcctgtatggtaacggtcactgtgacagcgacctccgagcagccccatatctacattcctgcacctgccagcgagcttgattcctcgagcacaaccaaggggatcctgtttgtgaaagaatatgtcaacgcgagtgaagtaagcagtgggaagccagtgtctgccagatactcaaacgtctcctcgattgaagattcttttgccatggaaaagaaaccaccttgtggaagcactccctactctgagaggacaaccggcgggatttgcacttattgcaaccgcgaaatcagggattgtcctaaaattacacttgagcacttggggatttgttgccatgagtactgctttaaatgcggcatttgctcaaagcctatgggggatcttcttgatcagatctttatccatagagatactattcactgtggcaagtgctatgaaaaactgttctag

SEQ ID NO: 27140 - DNA, 1374 bp, synthetic construct
  misc_feature 1..1374: note = Description of Artificial Sequence: Synthetic coding sequence
  source 1..1374: mol_type = other DNA
atgaccaccgaggactacaagaagctggccccctacaacatccggcgcagcagtactagcggcgacaccgaagaagaagaagaggaggaagttgtgcctttcagtagtgacgagcagaaacggcgctccgaggccgcgagcggcgtgctacgtcgtacagctccacgggagcactcctatgtgctcagcgccgcgaagaaaagtaccgggagccctacccaggaaacgcaggcaccgtttatcgccaagcgcgtggaagtggtggaagaagacggtccctccgagaagtctcaggacccacctgccctagcgcggtctacaccgggtagcaatagctcacggggagaagagatcgtgagattacaaatattaactccacgcgccggacttagactcgtcgccccagacgttgaaggaatgtctagctcggcaacttctgtatctgcggtgcccgcagaccgcaagagtaatagcactgccgcccaggaagacgccaaagccgacccaaagggagccctggcagattacgaggggaaagatgttgcaaccagggtgggagaagcttggcaagagcgacccggtgcccccagagggggccagggcgacccagctgtcccagctcagcagccagccgacccctcaaccccggagcggcaatctagcccttccggcagcgagcagctggtacgccgtgaatcatgtggatcctccgtgctaactgactttgaagggaaagatgtggccacgaaagtgggagaagcctggcaggacagaccaggcgccccacgaggcgggcagggcgacccagccgttccaacccaacaacccgcggatccttccacaccagaacagcagaattctcctagcgggagcgagcagtttgtgcggcgcgagagctgcacaagccgggttcgtagcccatccagctgtatggtcactgttaccgtcaccgccacctccgagcagccccatatctacatccctgccccagcctctgagctggacagctcaagcacaaccaaaggcatcctgttcgtgaaggaatacgtcaacgcctcggaagtcagctcaggcaagcctgtgagtgcccggtacagtaacgtgagctcaattgaagattcctttgccatggagaagaaaccaccgtgcggatccaccccctacagtgaacgcacgaccggcggcatctgcacttactgcaacagggagatcagagattgcccgaagatcaccctcgaacatctgggaatctgttgtcatgagtattgctttaaatgtggtatttgttcaaaacctatgggagacctgttagatcaaatattcatacacagagatacaatccactgtggcaagtgttacgagaagttgttctag

SEQ ID NO: 27141 - DNA, 2070 bp, synthetic construct
  misc_feature 1..2070: note = Description of Artificial Sequence: Synthetic coding sequence
  source 1..2070: mol_type = other DNA
atgagcatcagcgccctgggcggccggaccaagggcaagcccctgcctccaggagaggaagaacggaacaatgtgctgaaacagatgaaggtccgcaccaccctgaaaggtgataagtcttggatcaccaagcaggatgagagcgagggcagaacaatcgagcttccttcggggcgatccagagccaccagtttctcatcagccggcgaagtgcccaagcccaggcctccttctaccagagctcccaccgggtacattatccggggggtcttcactaaacccatcgactcaagtagccaaccccaacagcagttccctaaggcaaatgggacgcctaagagcgccgcctcgctagtgcgcacagccaacgcaggacctcccagaccatcctcatccgggtacaagatgaccactgaagattataaaaagttggccccttacaatatccgacgaagttctacctccggtgacacagaggaagaagaggaggaagaagtagtgccattcagcagtgacgagcaaaagagacgttccgaagctgcttcaggggtactccggagaacagctcctagagagcactcttatgtgctgagcgcggccaagaagtctaccggccctactcaagaaacacaggcacccttcatcgctaaacgtgtggaggtcgtggaggaggatggaccgtcagaaaaatctcaggacccaccagcactggcacgaagtacccctgggtctaatagcgctgacggaggccgcactaaggcaagcagggcgatttggattgagtgcctccctagtatgccatctccagctggttctcaggagctttccagcaggggtgaagagatcgtgaggttacaaattctcaccccacgggccggactccgcctggtggctcctgacgtggaagggatgagatccagccccggcaataaggacaaggaggccccttgctcccgagagctccaaagggatctcgcaggcgaggaagcttttcgcgcacccaatactgatgcggctaggagctcagcacagctgtccgacggaaacgtgggaagtggcgcaactggcagccggcccgaagggctggctgcagtcgacatcggaagtgaaagaggctcctcatctgccactagcgtgagcgctgtccccgcagaccgcaaaagcaacagcacggcagcccaggaagatgccaaagcggatcccaaaggggcgctggctgattatgaaggaaaagacgtagccacaagagtgggggaagcttggcaggagcggccaggcgctccccggggaggacagggggatccagccgtgccagcccagcagcctgccgacccttctacccccgaacggcaatcttcccccagtggctctgaacagctggttcgccgggagtcttgtggaagcagtgtgttgacggattttgaaggaaaagacgttgcgacaaaggtaggagaggcttggcaggatcgacccggggctccacgaggcgggcagggggaccccgcagtccccactcagcaaccagcagacccttcaactcctgagcaacagaatagtccctcagggagcgaacagtttgtgcgcagagaaagttgcacttccagggttcgctccccaagcagttgtatggtgacagtcacagttaccgctacatccgagcaacctcatatctacattcccgctcctgctagtgaactggactcatcgagcacgacaaaaggcatcctgtttgtgaaggaatatgttaacgctagcgaagtcagtagcggcaagcccgtgtccgcccgctattcgaatgtgtcatcaatagaagactcgtttgccatggagaagaagccaccatgtggttcaaccccatactcagaacgcacaaccggcggcatttgcacctattgcaatcgggaaatcagggattgtcccaagattaccttagaacacctcggaatttgttgccacgagtattgcttcaaatgcggcatttgctctaaacccatgggcgatctactggatcagatatttatccatcgtgatacaattcactgtggcaaatgttatgagaaactgttctag

SEQ ID NO: 27142 - DNA, 1359 bp, synthetic construct
  misc_feature 1..1359: note = Description of Artificial Sequence: Synthetic coding sequence
  source 1..1359: mol_type = other DNA
atgcagcggcaggccccctacaacatccggcggagcagcaccagcggagacaccgaggaagaagaggaagaggaagttgtgccattttcatcagacgagcaaaaaagaaggtctgaagctgcgtcaggagtactacgccgcacagccccccgggagcactcttacgttttatctgccgctaagaaatcgacaggctcccctacccaggaaacccaggccccatttattgccaagagagtcgaagttgtcgaagaggacggaccatctgagaaatcccaagacccccctgccctagcgagatccacgccaggctccaatagctcccggggggaggagatcgtcagattgcagatcctgacccctcgggctgggcttcggctggtagctccagacgtggagggcatgagcagtagcgccacctccgtgagtgctgttcctgcggaccggaagtcaaacagcaccgctgcccaggaagacgctaaggccgacccaaaaggcgcgctcgccgactatgagggcaaggacgttgccaccagagtaggcgaggcgtggcaggagaggcccggcgctcctagggggggacagggcgatccagccgttcccgctcaacagccagcggacccttccacacctgagaggcaatcttcacccagcggtagcgagcagctcgtacggcgggagagttgtggctcttcggtactcactgactttgaaggtaaagatgtggctactaaagtcggtgaagcctggcaggataggcccggggcccctagaggtggtcagggcgatccagcggtccccacacagcagcccgctgatccctcaacaccagaacagcagaatagcccctccggctcggagcaatttgtgcgaagagagtcttgtactagtcgcgtgagaagcccctctagttgtatggtcactgtaacagtgaccgctacatccgaacagccccacatttatatccctgcaccggcatccgaactggacagctctagcactacaaaaggtatcctgttcgtcaaagagtacgtgaacgctagcgaggtcagctctggcaaacccgtatctgcacggtactccaacgtgtcatcaatcgaggacagttttgccatggaaaagaaaccaccctgcggaagcaccccttattccgaacgcactacaggcggtatttgtacatattgcaaccgggagatcagggactgccccaagatcaccctggagcacctcggcatttgctgccacgaatattgttttaagtgtggcatttgttccaaacctatgggtgatttgttggaccaaatttttatccatcgggatacaatacactgcggcaagtgctacgagaagctgttttag

SEQ ID NO: 27143 - DNA, 1428 bp, synthetic construct
  misc_feature 1..1428: note = Description of Artificial Sequence: Synthetic coding sequence
  source 1..1428: mol_type = other DNA
tgacggagcagcaccagcggcgacaccgaggaggaggaggaggaggaggtcgtgccattctcttctgacgaacagaagagatccttgcgcaggaccgcacccagggaacattcgtacgttctgtcggcagccaagaagagcaccggtagtcccacacaggaaacccaggcaccgtttatcgccaagagggtcgaggtcgtcgaggaggatggccccagcgaaaaatcccaggatccaccagcactcgctagatccacacctgggagcaatcgctcctctccaggcaacaaggataaggaagctccatgttccagggaacttcaaagagacctggccggtgaggaagcatttagagcacccaatactgacgcagccagaagcagcgcccaactgagcgacggcaatgtgggaagtggtgccaccggaagccgaccagaaggtctggccgctgtggatattggctctgagcgtggttcttcaagtgccacaagtgtgtctgccgtcccggccgaccgcaagtctaacagcaccgcagcacaggaggatgccaaggccgatcctaagggcgccttagccgactatgaggggaaggatgtggcaacaagggtcggagaggcctggcaggagcgtcctggcgcgccacgtgggggccagggcgatcctgccgtgcctgcgcaacagcccgcagatcctagcaccccagaaaggcagtcttcccccagtggatcagaacaactggtgagaagggaatcatgtggctccagcgtcttgaccgacttcgaaggaaaggatgtagccaccaaggtaggcgaagcatggcaagatcggcccggcgccccgaggggcggacagggcgatccggcggttcctactcaacaacccgccgatccctctactccagaacagcagaacagcccgtcgggcagtgagcagttcgtgcggagagagagctgcacctctcgagttcgctccccatctagctgcatggtgaccgttaccgtcaccgctacaagtgaacagccccacatttacattcccgctcccgccagtgaattagacagttccagcaccacaaagggcatattgttcgtgaaggagtacgtcaatgccagcgaggtatcctccggtaagcccgtgagtgcccgctacagcaatgtgtcctctattgaagattcctttgctatggagaaaaaacctccatgcgggtcaacaccatactccgagaggactactgggggaatttgtacatactgcaatcgggagatccgagattgcccaaaaatcaccctggagcaccttggcatctgctgccatgaatactgctttaagtgtggaatctgtagcaagcccatgggagacctgcttgaccagatattcattcatcgcgacacaattcactgcgggaagtgttatgagaagctgttttag

SEQ ID NO: 27144 - DNA, 1146 bp, synthetic construct
  misc_feature 1..1146: note = Description of Artificial Sequence: Synthetic coding sequence
  source 1..1146: mol_type = other DNA
atgaccaccgaggactacaagaagctggccccctacaacatccggcggtcatccacctcaggggacacggaggaggaagaagaagaagaagtcgtacctttcagctccgacgaacagaaacgacgttcagaagccgccagcggtgtccttagaaggacagccccccgcgagcattcttatgtactcagcgcggcaaaaaagagcacaggcagcccgacccaagaaacccaggccccttttatcgccaagcgcgtagaggttgtcgaagaggacggcccgtctgagaaatcgcaggatcctccggccttggcccgaagcactccagggtcaaatagcgcagatggggggaggacaaaggccagcagggcaatctggattgaatgtctgccctcaatgccttcccccgctggatcccaagaactgagtagccgtggcgaggagattgtccgtctccagatcctgacccccagagcaggcttacggttagttgcgccggacgtggagggtatgaggagttcacctggtaacaaagacaaagaagcgccatgcagccgggaactgcagcgagacctcgccggagaggaagcctttagggcacctaacactgacgccgccagatcctcagcccagctttctgacgggaacgtcggaagcggcgctacgggctctcgacccgagggactcgcggctgttgacatcggttccgagcgaggctcctcatccgctacatccgttagcgccgtgcccgccgatcgcaagtcaaattcaacggcggcacaggaagacgcgaaggctgacccgaagggggccctggcagactacgagggcaaggatgtggcgactagggttggcgaggcctggcaagaaaggcccggggccccaagagggggccagggcgaccccgccgtgcccgcccagcagccagctgatccctctacacctgaacggcagagctcgccaagtggaagtgagcagttggtgcggcgggaaagttgcggcagtagcgtcttaaccgacttcgagggaaaagacgtggccaccaaggtgggtgaggcttggcaggatcggcccggccctagctgcacacattctgcgacctgcagaagccagtacccccgcactgccgaacagccacaacggatctag

SEQ ID NO: 27145 - DNA, 636 bp, synthetic construct
  misc_feature 1..636: note = Description of Artificial Sequence: Synthetic coding sequence
  source 1..636: mol_type = other DNA
gaggaggccttccgggcccccaacaccgacgccgcccggagcagcgcacagctgagtgacggcaacgtgggttccggcgcgaccgggtctcgacctgaagggcttgctgcggtggacataggaagtgagaggggcagattatgtgcagctgcaagtttcgcctccttcctggaggaccaggacggccactcagctaattcccaatcatgcaaaccaagaccagcagcaatctccagctccgctacctcagtgagcgcagtccctgcggaccgcaaatccaattcaactgcggctcaggaagatgcgaaagcggaccctaagggagcccttgccgactacgagggcaaagacgtggctactcgagttggcgaagcctggcaggagagacccggggccccccggggaggccaaggcgacccagctgtgccagctcagcagccggctgatccctcaactccagagcggcagtcctccccctctggctctgagcagctggtacgcagagaaagttgtgggtcttctgtgttaacagatttcgagggaaaagacgtggcgaccaaggtcggggaggcctggcaagataggcccggagcaccaaggggcgggcaaggtgatccagctgtccccactcagtag

SEQ ID NO: 27146 - DNA, 666 bp, synthetic construct
  misc_feature 1..666: note = Description of Artificial Sequence: Synthetic coding sequence
  source 1..666: mol_type = other DNA
tgactgcggcggaccgccccccgggagcacagctacgtgctgagcgccgccaagaaatctaccggcagtcccacccaggaaacgcaggccccttttatcgccaagagagtggaggtcgtggaagaggacgggccctctgagaagtcacaggacccccccgcgttagccaggagcactccaggctccaactcagctgatggaggcaggacaaaggcttctcgggccatctggattgagtgcctcccctccatgccttcccctgccggatcccaagagctctcctctagaggtgaggaaatcgtgaggcttcaaatcctgaccccaagagctgggttgagactcgttgctccagatgtcgaaggaatgcggtcatcacctggcaacaaggacaaagaagcaccttgctccagagaactgcagagggatttagccggagaggaggcctttcgggcaccaaatacagatgcagcccggtctagtgcacagctctccgacggaaacgtaggctctggggctaccggttcccgccctgagggactggctgccgttgatattggaagcgagcgggggtcctcatcggccacctctgttagcgctgtgcccgcagacaggaagtcgaattccacagcagcgcaggaagatgccaaggctgatcccaagggctag

SEQ ID NO: 27147 - DNA, 414 bp, synthetic construct
  misc_feature 1..414: note = Description of Artificial Sequence: Synthetic coding sequence
  source 1..414: mol_type = other DNA
tgagtgctgccccggcggcaccggcaccggctgagccggcggggctggcggtggtggaagagaactggcctgcttcgccgggcaaggactcatcttctctggcaggatccactgttggcgcagactgtccggatggaggcgggccccaagcggcttggtcagttcggaagttcggcttgtcaggtctgcttggcaccgttaggggcccgctccagtggtttaccacaggctaccaagacacgcaggcccccggcacctgagagtagccggggcacatggcttgtgcgaagattaagcggtccccctacccagatgctgcaggcccccgtgcccctgcagagcttattatccctgttaatcgggagggccactgcgcagcaacctcgcaggatgcagcgccagactcagaggtag

SEQ ID NO: 27148 - DNA, 2073 bp, synthetic construct
  misc_feature 1..2073: note = Description of Artificial Sequence: Synthetic coding sequence
  source 1..2073: mol_type = other DNA
atgagcatcagcgccctgggcggccggaccaagggcaagcccctgccgcctggggaagaggagcggaacaacgtgctgaaacagatgaaagtaagaactactctgaaaggcgataaatcttggattacaaagcaggacgaaagtgaggggcggaccatcgaattgcccagcggtcgaagcagggcgacgtctttctctagcgctggagaggtgcctaaacctcggcctccctcaacgagagcacctacaggatacatcatccgaggggtatttactaagccaatcgactctagctcccagccccagcaacaattcccgaaggccaacggaaccccaaaatctgccgcctctctggtgcgtaccgcaaatgccgggccgccccgaccatcatcctctggatataagatgacaactgaggactacaagaaactcgcgccctataatatccggaggtcctcaacgagcggcgacacggaggaagaggaggaggaggaggttgtacccttttcatctgatgagcaaaagagacggagcgaagccgcgtctggcgtgctccgaaggactgcgcctcgagagcactcttacgtgctgagcgctgctaagaagagcacggggtcccccacacaggaaacgcaggctccgttcatcgccaagcgcgtggaggtggtggaggaggacggaccctcagagaagtcacaggatccgccagcccttgcgcggtctacacctggctctaatagtgccgacggaggcagaacaaaagcatcacgcgcaatctggattgaatgcctgccctcaatgccatctccggctgggagtcaggagctgtcctctaggggtgaggagatcgtacgtctacagatactgacccctcgcgcaggtctgcggctagtagcccctgacgtggaggggatgaggagttctccagggaataaggacaaagaagcaccctgttctagggagctacagagagatttagccggcgaggaggcttttcgagcccccaacaccgacgccgccaggagctctgcgcagctctctgatggcaacgtgggttctggagccaccggctccagaccagagggactggcagctgttgatatcgggtccgaaaggggatcatcctctgcaaccagcgtgagcgccgtccctgctgacagaaaatccaacagcacggccgctcaggaagacgccaaggctgatccgaaaggggcccttgctgactacgaagggaaagatgtggccacacgggtgggcgaggcatggcaggagaggcccggagcaccccgaggaggacagggggatcccgccgtgcccgcccagcagcctgctgaccctagcactcccgaacggcaaagctcaccctccggaagcgagcagctggtgcgccgagaaagttgcggctccagtgtgcttaccgactttgagggcaaagacgtcgcaaccaaggtgggcgaagcttggcaggatcggccaggcgcaccaagaggtggacagggggaccccgccgtgcccacccagcagccagctgatccttcaacccctgaacagcagaactcgccttccgggtccgagcagttcgtgcgccgagagagttgtacctctcgcgttagatccccttcctcctgtatggtcactgtgactgtcactgcaacaagtgagcagcctcatatctacatccccgcccctgcatccgagctggacagttcgtccacgacaaagggtatcttatttgtgaaagagtatgtcaacgcttcagaggtcagctccggcaagcccgtgagcgccagatatagcaacgtcagttccatagaagactccttcgccatggagaaaaagccaccctgcgggtcaacaccttacagcgagcgaaccacaggcggtatctgtacttactgcaaccgagaaattcgggactgcccaaagatcaccctggaacatttgggcatttgctgccatgagtattgcttcaagtgtgggatctgttctaagccgatgggagacctgttggaccaaatttttattcacagagacaccatccactgtggcaaatgttacgagaagctgttctag

SEQ ID NO: 27149 - DNA, 993 bp, synthetic construct
  misc_feature 1..993: note = Description of Artificial Sequence: Synthetic coding sequence
  source 1..993: mol_type = other DNA
tgaagcgagatggccgcccgggacgagctgggcctgggcggcgactctcttgaagctatgccggtccccgccgccagaggcaggcctcgcatcactaacggccccgaagaattagcagctccctccccggctgccctagcagattacgaagggaaggatgtcgctaccagggtaggagaggcttggcaagagaggccgggtgccccgagaggtggacaaggagatcctgcagttcccgcccaacaaccagccgatccctccacgccagagcgacagtcatcgccctccgggtcagagcagcttgttaggcgggaaagctgcggttcaagtgtactgactgatttcgagggtaaggacgtggccaccaaggtgggggaggcttggcaggatagacctggcgctcccagggggggccagggggatcccgctgtccctacacaacagccagcagatccctccaccccagagcaacagaactctcctagcggctctgagcagtttgtcagacgcgaatcttgtactagtagagtaaggtcccctagcagttgcatggtgacagttactgtgacggcgaccagtgagcagccacacatttacatccccgcccccgctagcgagctggacagctccagtaccaccaaaggcatcctgtttgtgaaagagtacgtgaacgcaagtgaagtatcgtccggaaaacctgttagtgctaggtactctaatgtcagctcaattgaggattcctttgcaatggaaaaaaagccgccgtgtggaagtaccccatatagtgagcgaacaacgggcgggatctgtacatactgcaaccgagagatcagagattgccccaagatcaccctcgagcatctcggcatctgttgccacgagtactgcttcaaatgcggcatttgttcaaagcctatgggcgacctcttagaccagatttttattcaccgcgacacgattcactgcgggaagtgttatgagaagctgttctag

SEQ ID NO: 27150 - DNA, 1575 bp, synthetic construct
  misc_feature 1..1575: note = Description of Artificial Sequence: Synthetic coding sequence
  source 1..1575: mol_type = other DNA
atgaccaccgaggactacaagaagctggccccctacaacatccggagatcttccactagcggagatactgaggaagaggaagaagaggaggttgtgccatttagctcagatgaacagaaaaggcggtccgaggccgcatctggagtcctcaggcgcactgcccctagggagcactcttatgtgcttagcgctgctaagaagtcaacaggccccacgcaagagacacaggccccctttatagctaaacgagtcgaagtcgtggaggaggacggcccatccgaaaagtcccaggacccacctgcactggcacgtagcacgcctggcagcaactcgtcacggggcgaagaaattgtgagactgcagatcctgactcccagagccggactgaggttagtggcccctgacgtcgaaggtatgaggtcttcccccggaaataaggacaaggaggcgccctgttctcgcgagctgcagcgcgacctcgcgggagaggaagctttcagggcaccgaataccgatgccgctcggtcttcagcccagctgagcgatggcaacgtgggctctggcgctacaggaagtcgcccagagggtctggcggcggtcgatatcgggtccgagcgaggctcgtctagcgccacttctgtatctgccgtgccagccgaccggaagtcaaatagcacagcggctcaggaagatgcaaaagcagatcccaaaggggccctggccgactacgaggggaaagacgtggccactagagtgggcgaagcatggcaggaacgcccaggcgctccaaggggaggccagggcgatcctgctgtccctgcacagcagccagcagacccaagcacacccgaacggcagagtagtccctctggcagtgagcagctggtacgccgtgagagttgtgggagcagcgttctgacagatttcgagggaaaggacgtggctaccaaggttggcgaagcttggcaggaccgacccggggcacccagaggcggccaaggggacccagctgtgcccacccaacagccagccgacccgtcaacccccgagcagcagaactccccttccggttcagaacagtttgtacgaagagagagttgcaccagtcgggtccgttcgccttccagctgcatggtcacagtcacagtgactgcaacatccgaacagccccatatttatataccggcccccgcaagcgaattagattccagcagtactactaaggggatcttgtttgtgaaggaatacgttaatgcatccgaggtgagctccggtaagcccgtgtctgccaggtatagtaacgtgagctcaatcgaagacagcttcgctatggagaaaaagcctccctgcggctctaccccatatagtgaacgaaccaccggcggaatctgtacttactgtaatagggagatacgtgactgccctaagatcacactcgagcacctgggcatctgctgtcatgagtattgcttcaaatgtggcatctgttctaaacccatgggtgaccttttggatcagattttcatccacagggacaccatccactgtggtaaatgttacgaaaagctcttctag

SEQ ID NO: 27151 - DNA, 2166 bp, synthetic construct
  misc_feature 1..2166: note = Description of Artificial Sequence: Synthetic coding sequence
  source 1..2166: mol_type = other DNA
atgagcatcagcgccctgggcggccggaccaagggcaagcccctgcctcctggcgaggaagagaggaacaatgtcttgaagcagatgaaagtccggaccaccctaaagggggacaaatcgtggatcacaaagcaggacgagtcagaaggacggacaattgagctgccctccgggagaagcagggcaacaagcttctcctccgctggcgaggtgccaaaaccaaggcctccctccactagagccccaactggctatatcattcggggagttttcaccaagcccattgatagcagctcccagcctcaacaacagttcccgaaagctaatggaacccccaagagtgctgctagtctggttcgaaccgccaacgcaggtcctccaagaccatccagttccggctacaagatgaccaccgaagactacaaaaaattagcaccctataatatccggcgcagcagtacgagtggtgacaccgaggaagaggaagaagaggaggtagtacctttttcctcagatgaacagaagcgacgtagtgaagcagcctcaggagtgttaaggcgcaccgctcccagggagcattcctacgtgctcagtgccgctaaaaagagtactgggcccacccaagagacgcaagcgccgttcatagcaaagagagttgaagtggtggaagaagacggtccaagtgaaaagagccaggacccgcccgccttggctcgttccacccctggatctaattcagcagacgggggtcgcaccaaagcgtcgcgagccatttggattgaatgcctcccatctatgcccagccccgcaggctcgcaggagctgagctcacgaggagaagaaattgtgaggctccaaatcttaacgccgcgtgccggcctgagactggtagcgcctgacgttgaggggatgagatcatcccctggaaataaagataaggaagctccctgttctcgggagctgcaacgggaccttgctggtgaggaggcattccgagcccctaatacggatgccgcccgctccagtgcccagctgtccgacggcaatgtcgggagcggagcgactggctcccgacctgagggtctcgcagcagtggacattggttccgagcggggacggctttgcgccgccgcgagttttgcatcctttcttgaggatcaggacggtcactcagccaatagtcagagttgtaaaccgcggccagccgccattagttcctccgcaacaagcgtctctgctgtccctgctgatcggaaatcaaacagcactgcggcacaggaggacgcaaaagccgaccctaagggggccctcgcggactacgaaggaaaggatgtggccaccagagtgggcgaggcctggcaagaacgtccaggcgccccccgcgggggtcaaggggatcccgccgtgcctgctcagcaacctgctgatccctctacccccgagcgccagagtagcccctccggatctgaacagctggtccgccgggaatcatgcgggagctccgtgttgacagacttcgaaggcaaagatgtggctacaaaagtgggagaagcctggcaggatcgccctggagcgcctcggggggggcagggggacccagcagtgcctactcagcagccagcggacccatcaacaccagagcagcagaacagcccttccggtagcgagcagttcgtccgccgggaatcatgcacatctcgtgttcgtagcccctccagttgcatggtgactgtcactgtaactgctacaagtgaacagcctcatatttacattcccgctccagcgagtgaactcgactcaagtagcaccactaagggcatcctgttcgtgaaggaatacgtgaatgcttcagaggtgtccagtgggaaaccagtgtcagctcggtactcgaacgtcagtagtatcgaagattcttttgccatggagaagaagcccccatgcggctccaccccttactcagagcggacaaccggtggcatctgcacatattgcaaccgtgagatacgggactgtcctaaaataactctggagcacctggggatttgctgtcatgaatactgctttaagtgcggcatctgctcaaagccgatgggcgacctcctcgaccagatattcatacatagagacaccatacattgcggtaagtgctatgaaaagctcttctag

SEQ ID NO: 27152 - DNA, 2079 bp, synthetic construct
  misc_feature 1..2079: note = Description of Artificial Sequence: Synthetic coding sequence
  source 1..2079: mol_type = other DNA
atgagcatcagcgccctgggcggccggaccaagggcaagcccctgccccctggggaagaagagagaaataatgtcctcaaacagatgaaggtccgcacaactctaaagggagacaagagctggatcaccaagcaggatgaaagcgagggaaggacaatagaactgcccagtgggcgcagccgtgctactagttttagctcagcaggcgaggtcccaaagccccggcccccatccacaagagcaccgactgggtacatcatacggggcgtgttcactaagccaatcgattcatctagccagccgcagcagcagttccccaaagctaacggaacgcccaaatcggccgccagcttggttaggaccgcaaacgcaggccccccgcggcctagctcaagcgggtacaagatgaccactgaggattataagaaattggccccctacaatattcgcaggtcgtctacaagtggggacaccgaggaagaggaggaggaggaggtagtaccttttagttctgacgaacagaaacggagatccgaggccgcttcaggggtactccgaagaaccgctccccgagaacatagttacgtgctctcagccgcaaagaagtccaccgggccaacacaggagactcaggcaccctttatagctaaaagggtcgaagtcgtggaggaggacgggccatccgagaagtctcaagatccgcccgcactggctagatctactcccgggtctaattccgctgacggtggacggacaaaggcctccagggccatttggatcgagtgcctgccctctatgccctcacccgcaggatctcaggaactgcgctctagcccgggcaataaagataaagaggctccttgttcaagagagctgcaaagggatctagcaggagaagaagcgtttagagccccaaataccgatgccgctcggtctagcgcccaactgtcggatggaaatgtgggtagtggcgcaactggatctagacctgaggggctagccgctgtggacataggcagcgagcggggcagactgtgtgctgctgcctcttttgctagtttccttgaagatcaagacggccacagtgcaaacagccaaagctgcaaaccacggccagccgccatttcatcctcggcaacctccgtttcagctgtgcccgccgaccggaaatcaaattctactgctgctcaagaggatgccaaggctgaccccaagggtgctctggcagactacgaaggcaaagacgtcgcgactagggtaggagaagcatggcaagaacggccaggagcaccaaggggcggccagggcgacccggccgtgcctgctcagcagcctgctgacccaagtacacccgaaagacagtcctctccctctggatccgagcaactggtgaggcgcgaatcctgtgggtcttccgtgcttactgattttgaaggaaaggacgtggccactaaggtgggagaggcttggcaggatcgcccaggcgcaccccgtggcgggcaaggagatccagccgtgcccacgcagcaaccagctgatcccagcacccctgaacagcagaattctccatcagggagtgagcagtttgttcgacgtgagagttgcacatcccgggtccgctccccttccagttgcatggtaacagtcacagttacggccacctccgagcaacctcacatctatatccctgcgcccgcatccgagctggattctagcagtactacgaagggcatactctttgtcaaggagtacgtcaatgcctccgaggtatcatcaggaaaacctgtttctgcgcgctattctaacgtatcttccatcgaggactcttttgccatggagaagaagccgccttgcggctccacgccgtacagtgagaggaccactggcggcatctgtacgtattgcaatcgggagatcagagattgtcctaagattactcttgaacatctcgggatttgctgccatgagtactgtttcaaatgtggcatttgtagcaagcctatgggcgatttattggatcaaatctttatacaccgagacaccatccattgtggcaagtgctacgaaaagctgttctag

SEQ ID NO: 27153 - DNA, 1899 bp, synthetic construct
  misc_feature 1..1899: note = Description of Artificial Sequence: Synthetic coding sequence
  source 1..1899: mol_type = other DNA
atgcagcgggaggagggcttcaacaccaagatggccgacggccccgacgagtacgataccgaggcggggtgcgtgccactgctccatcctgaggagattaaaccccagtcccactataaccacggatacggagagccactgggccgtaagacacacatcgacgactactccacctgggatatcgttaaagccacccaatacgggatctatgaacgatgccgtgaactcgtggaggccggctacgatgtccgccagccagataaagaaaatgtaacactgctgcattgggcagccatcaacaaccgcatagacctggtcaagtattacatttctaagggtgctatcgtggaccagctgggcggtgatctcaatagcacgcccttgcattgggccacaagacaaggccacctgagcatggtagtgcagcttatgaagtatggtgccgacccatcattgattgatggagagggatgttcttgtattcatctcgccgcacagttcggccatacttctattgtggcctacctcatagctaagggccaagacgtggacatgatggaccaaaatgggatgacacctctcatgtgggcagcttacagaactcactcagttgacccaacaagattactcctgacgttcaacgtgtctgtgaatcttggtgataaatatcataagaataccgcattgcactgggccgtacttgctggcaacaccacggtcatttcccttctgttagaggccggagcaaatgtcgatgcccagaatatcaagggtgagtcagccctggatctggctaaacagcgcaagaacgtatggatgattaaccatcttcaggaggcgagacaggctaaagggtatgataatccctctttcctacggaaactgaaggctgacaaagaatttcggcagaaggtaatgcttggcactccctttctcgtcatctggttagtgggttttatcgcagacctaaacatcgattcctggctgattaagggcctcatgtacgggggagtttgggcaactgtccagtttctgagcaaatcatttttcgaccattccatgcactccgcccttcctcttggtatctaccttgccacaaagttctggatgtacgtcacttggtttttttggttctggaacgacttgaatttcctattcatccatctcccattcctggccaatagcgtggccctgttctataattttgggaaatcgtggaagtccgacccaggaattatcaaggccaccgaggaacagaagaaaaagactattgtggaactagcagagactggctccttggacctgtccatcttctgttcgacttgtctgatccgaaagcctgtgaggagcaagcattgtggagtttgcaaccgatgtatcgccaagtttgatcaccactgcccttgggtaggcaattgtgtgggagccgggaatcataggtactttatgggttacctgttctttctgctttttatgatttgttggatgatctacggctgcattagctattgggggctccactgtgagacaacatacaccaaggacgggttttggacttatatcacacaaattgccacatgttcgccgtggatgttctggatgtttctgaattctgttttccatttcatgtgggtggccgttctattaatgtgtcagatgtaccagatctcgtgtctgggcatcacgacaaacgaacgcatgaacgcgcgacggtacaagcactttaaggttaccactacatcaattgaatctcccttcaaccatggctgcgtgcgcaacatcattgatttctttgaattcaggtgttgtggattgttccgacctgtgatcgtcgattggactcgtcagtacactattgaatatgaccagatctcaggatctggctaccaattagtctag

SEQ ID NO: 27154 - DNA, 651 bp, synthetic construct
  misc_feature 1..651: note = Description of Artificial Sequence: Synthetic coding sequence
  source 1..651: mol_type = other DNA
atgagcaccatccccaagcgggccgtgtgccccttcagcacccagagatacggaatttacgaaaggtgtcgagagttagtcgaagccggctatgatgtgcgccagccggataaggagaatgtaacattacttcattgggccgccattaataaccggatcgacttagtaaagtactatatttccaaaggtgccattgtagatcaactgggcggggatctcaattcaactcctctgcactgggcaactcggcaaggtcatctgagcatggttgttcagctgatgaagtatggcgccgaccccagcctgattgatggagagggatgctcctgcatacacttggccgctcagtttgggcacacctctatcgtcgcctacttgatcgccaagggtcaagacgtggacatgatggaccagaatggtatgacaccactgatgtgggccgcttaccgtacacattcagttgatcccacaagacttctgctgaccttcaacgttagtgtcaatctcggcgataagtaccataaaaacacggcactccactgggctgtcttggctgggaacaccacagtgatttccttacttctagaagctggagccaacgtggatgcccagaatatcaaggcaatcctgaggtgtcacatggctctgtag

SEQ ID NO: 27155 - DNA, 1899 bp, synthetic construct
  misc_feature 1..1899: note = Description of Artificial Sequence: Synthetic coding sequence
  source 1..1899: mol_type = other DNA
atgcagcgggaggagggcttcaacaccaagatggccgacggccccgatgaatatgacactgaagccgggtgtgtcccactgctgcaccccgaggaaatcaagcctcagtcccactataaccatgggtatggcgagcctctcggtcgcaagacccacatagacgactacagtacgtgggatatcgtaaaggctacccagtacgggatatatgaacggtgtcgagaacttgtcgaggctggatacgacgtgcggcaaccagacaaggaaaacgtaacactcctacactgggctgccattaacaacaggattgacctggtgaaatattatatatccaagggcgcgatcgttgaccagctggggggggacctgaacagcaccccactgcactgggcgaccagacaggggcatctgagtatggtagtgcaacttatgaagtacggggccgatccatccttgattgatggggaagggtgcagctgcattcacctcgccgcccagttcggccacaccagtatcgttgcgtacctgattgccaagggacaagacgtggatatgatggaccagaacggtatgacccccctgatgtgggccgcgtatcgcacacattccgtggaccctactaggctccttctaacctttaacgtgagcgtgaatctgggagacaaataccataaaaataccgcattacactgggctgtgctggccggaaatacaactgtgatctctctgctactggaagccggggcaaacgtggacgctcagaatatcaagggagagagcgccctggacctggcaaagcagaggaagaacgtgtggatgattaatcatcttcaggaggccaggcaagctaagggttacgataacccttcattcttgcgaaagctaaaggcagataaagagtttcggcagaaagtgatgctcggtacaccattcttagtgatatggctagtcgggttcatcgccgaccttaacattgatagctggttaataaagggactaatgtatgggggcgtttgggccacggtgcagtttttgtctaaatcattcttcgaccactccatgcactccgccctgccactgggaatctacctagcgacgaagttttggatgtacgtgacgtggtttttctggttctggaacgaccttaatttcctttttattcatctaccctttcttgccaattctgtggcactcttttataatttcgggaaaagttggaagtccgatcccgggatcatcaaagccacagaagagcagaaaaaaaaaactatcgtcgaactcgccgagaccggttccctcgacctttccatattctgttcaacctgtttgataagaaagcctgtgcgcagcaaacactgcggagtttgcaatcgatgcatagcaaaatttgaccaccattgtccctgggttggtaactgtgtgggtgctgggaaccaccgctacttcatgggctatctctttttcctcctattcatgatttgttggatgatttacggctgtatttcctactggggtctccattgcgaaactacatataccaaggatggcttttggacatatataacacagattgccacctgcagcccttggatgttctggatgttcctgaacagtgttttccacttcatgtgggtggccgtgctgctgatgtgtcagatgtatcagatttcctgccttggcatcacaacaaacgaaaggatgaacgctagacggtataagcactttaaagttaccactacctccatagaaagcccttttaatcacggatgtgtacgcaacatcatcgatttttttgagttccgctgttgcggactgttccgtccagtaattgtcgattggacacgccagtacaccatcgagtatgatcagatatccgggtccggctaccagctggtatag

SEQ ID NO: 27156 - DNA, 2667 bp, synthetic construct
  misc_feature 1..2667: note = Description of Artificial Sequence: Synthetic coding sequence
  source 1..2667: mol_type = other DNA
atgctgagtcggctgtttcggatgcatggactttttgtagccagtcatccttgggaagtcatcgtgggaaccgttacattgaccatttgtatgatgagcatgaacatgttcaccggaaacaacaaaatctgtggatggaactacgagtgcccaaaatttgaagaggatgttcttagctccgacatcattatcctgactatcacacgctgtatagccattctctacatctattttcaatttcagaacttaagacagcttggcagcaagtatattctggggattgctggcttgttcaccattttttcctcctttgtgtttagtaccgtcgtaatccatttcctggataaggagttaaccggtctaaacgaagccctgccattcttcctcctgctcattgatctcagtcgggcttccacactggctaagtttgccctgagctccaattcacaggatgaggttcgggaaaacattgccagggggatggccatcctgggcccaacttttactctggatgccctagtggagtgcctggttataggggtcgggactatgtcaggagtccgccagttggaaatcatgtgctgtttcggctgcatgtccgtgttggctaattacttcgtgttcatgacttttttccctgcctgcgtctccctggtgctggaattgtcaagagagtctagggagggaaggcccatatggcagttgtcacactttgcacgcgtcctggaggaagaggaaaacaagcccaatccagtgacccagcgagtgaagatgattatgagtttgggactcgtattagtgcacgcgcatagcagatggatcgccgacccaagcccacaaaactcgacagctgatacgtcaaaagtctctctgggtctcgacgaaaatgtgtctaagagaatcgagccctccgttagtctttggcagttctacctctccaagatgatatcaatggacattgagcaggtgatcacactctcactagccctactcctggcagtgaaatacattttttttgagcagaccgaaaccgaatcaacgttgtcacttaaaaacccaatcacctcccctgttgtcacccagaagaaggtgccagacaactgctgccgccgagagcccatgctggtgagaaacaaccagaaatgtgattcagtagaggaggagacggggatcaatagggagaggaaagtagaggtaataaagcccctagtcgcagagactgatactccaaatcgggcaacattcgtggtcggaaactcatccctccttgatacatcttctgtgcttgtcacgcaggagcccgaaatcgagctgccgcgagagcctagacctaatgaggaatgcctgcagattctgggtaatgctgagaaaggagctaaatttctaagtgatgccgaaattattcaactcgtcaatgccaaacacattccagcgtacaaactggagacactgatggaaacacatgagaggggcgtgagcattcgacgccaattgctctcaaaaaagctttctgagcctagctctctgcagtatttaccttatagggactacaattattcactcgtgatgggtgcttgttgtgaaaacgtgatagggtacatgcccatccccgtaggcgtcgctggaccactgtgcctggatgagaaggagttccaggtaccaatggccacaacggaggggtgccttgtagcatcaaccaatagaggttgtagagcaatcgggcttgggggtggggctagcagccgcgtattggcagatggtatgacaagggggccagtggtgagactcccacgggcttgtgactccgccgaggtgaaagcctggctggaaacctctgagggattcgctgtgatcaaggaagcctttgattccacgtctagatttgctaggctgcagaagctgcatacatccatcgcagggcgaaatctgtatattcggttccagtcacggagcggcgacgccatggggatgaacatgatttcaaagggaacggagaaggccctatcaaaattgcatgagtactttcctgaaatgcagattcttgccgtgagcggaaactactgtacggacaagaagcccgctgcaatcaactggatcgagggcaggggcaagagcgtcgtgtgcgaagctgtgattcccgctaaagtagtccgcgaggttctgaaaactaccaccgaggctatgattgaagtgaatatcaacaagaatctggtgggctctgccatggctggaagcatcggaggctacaatgcacatgcagcaaatatagtaactgccatatatattgcatgcggtcaagacgccgcacagaatgtgggtagctctaactgtatcacactaatggaggcgtcaggtcctacaaatgaggatctctacatttcatgcaccatgccatctattgagatcgggactgttgggggtggtacgaacctgcttccacagcaggcctgtctgcaaatgctgggggttcagggagcctgtaaagataaccccggtgagaacgcgagacagctcgcacgcatcgtttgtggcacagtaatggcaggagagctgagtctcatggcagcgttagctgcaggtcatctggtgaaaagtcacatgattcataatagatcaaagatcaacttgcaagatctacagggtgcctgcacgaagaaaacggcctag

SEQ ID NO: 27157 - DNA, 2508 bp, synthetic construct
  misc_feature 1..2508: note = Description of Artificial Sequence: Synthetic coding sequence
  source 1..2508: mol_type = other DNA
atgctgtctagactgttcagaatgcatggcctgtttgttgcctcccacccctgggaagtgattgtcggtacggttaccttaaccatctgcatgatgtccatgaacatgttcacaggcaacaataaaatctgtggctggaattatgagtgtccaaagtttgaggaagatgtcctgtccagcgatataatcattctgactattaccaggtgcatcgcaatcctgtatatttattttcagtttcagaatctgaggcagctggggtccaagtacattttagggattgccggtttgttcactatttttagcagctttgtgtttagtacagtcgtgatccacttcttggataaggagctcactggcctgaacgaggctctgcccttctttctcctcctgatcgacctgtcccgggcatccacattggccaaattcgcgcttagctccaattcccaggacgaggttcgcgaaaatattgccagaggaatggccatcctgggcccaacctttaccctggacgcccttgttgaatgcctggtgattggcgtcggcacaatgtcaggagttcggcagttagagatcatgtgttgcttcggctgcatgagtgtcctggcgaactacttcgttttcatgactttttttcccgcatgtgtcagtcttgtgctcgaactgtcccgggagagtcgcgagggcagacccatctggcagttaagtcacttcgccagagtcctcgaggaagaggaaaacaagcctaatcctgtcactcaaagggtcaagatgatcatgagtctgggactggtgctcgtgcacgcccactcaaggtggatcgcagatccctcacctcagaattctactgctgatacttctaaagtgtctcttggccttgatgaaaatgtgtccaaacgaatcgagccttccgtaagcctctggcagttctatctgtccaagatgatcagcatggacattgagcaggtcatcactctgagcctggcgctgttgctggccgttaaatacatctttttcgaacagacggagactgagagcacactgtcattaaaaaaccctatcacttccccagtggtgacacagaaaaaggtacctgataactgttgcagaagagagcccatgctggtccggaacaatcagaaatgtgattcggtggaggaggaaacaggcattaatcgcgagaggaaggtggaggttatcaagcctttggttgccgaaactgatactcctaatcgagcaactttcgtggtcggtaactcgtccctgctggacactagttcagtcctcgttacacaggagcccgaaattgagctcccacgagaacccaggcctaacgaagaatgtctccagatccttggaaacgccgagaagggcgctaaatttctgtcggacgctgaaatcattcagctggtaaacgccaagcatatccccgcatacaaactggagactcttatggaaacccacgagcgcggagtgagcattagaagacagttactgagtaaaaagttatccgaacccagctctctacagtacctcccctatagagactataattattcgctactcgggggtggggcatcttcacgcgttctggccgatggaatgactcggggacccgtggtgcggctgccacgcgcttgtgacagcgccgaagtgaaggcttggttggagacgtccgagggctttgcagttataaaagaggctttcgactccacctctaggtttgcccgattgcaaaaattgcacaccagcatagcaggacggaatctgtacatccgatttcagtcacgttcaggcgacgctatgggcatgaacatgatctccaagggaactgagaaggccctctccaagctccacgagtactttcccgagatgcaaatcctggctgtatccggcaattattgcaccgataagaaacccgctgcaatcaattggattgagggccgtggaaagtcagtggtctgcgaagcggtgattcccgcaaaggtagtgcgggaggttctcaaaaccacaaccgaggccatgattgaagtgaacatcaacaagaacctggttgggagcgccatggccggaagtattggaggctacaatgctcatgctgccaacatcgtgacagccatctacatcgcctgcgggcaagatgccgctcagaacgttgggagcagcaactgtattacgctgatggaagcctctggtccaaccaacgaggacctatacatatcatgcaccatgccctctatagagattggcacagtgggcggaggcaccaaccttttgccgcaacaggcctgcttgcaaatgctgggggtgcagggtgcctgcaaggacaatcccggtgagaacgcgcgacagctggctcgtattgtgtgtgggaccgtgatggcgggagaactgtctctaatggcagcactggccgcaggccacctagtgaaatcccatatgattcataatagatcgaagattaatcttcaggatctgcagggtgcatgtacgaagaagacagcttag

SEQ ID NO: 27158 - DNA, 798 bp, synthetic construct
  misc_feature 1..798: note = Description of Artificial Sequence: Synthetic coding sequence
  source 1..798: mol_type = other DNA
atgctcagtagactcttccggatgcacggcttgtttgtcgcctcacacccctgggaggtcatagttggcaccgttacattgaccatatgtatgatgagtatgaacatgttcacagagggaacagagaaagccttgagcaaattacatgagtatttccctgagatgcagatcctcgccgttagtggaaactactgcaccgataagaaacccgcagcaataaattggatcgagggcagaggtaagtctgttgtatgtgaagcagtcatccctgctaaagtggtgcgagaggtgctgaaaacaactaccgaagccatgattgaggtgaatatcaacaaaaacctcgttggttcagcaatggctggttctatcggcggatacaacgcacatgcagcaaacatcgtcacagccatatacattgcctgcggccaggacgccgcacaaaatgtaggaagtagcaactgcatcactctcatggaggcgtcggggcctaccaacgaggacctctatatttcctgcaccatgccgtcaattgagatcggaacagtcggcggtggaacaaatctgctcccccagcaggcctgcctacaaatgctaggcgtgcagggcgcatgcaaagataatccaggagaaaatgcacgtcagttggctaggatcgtgtgtggcacagtaatggcgggagagctgagtctgatggcagccttggcggcagggcacctcgttaagtctcacatgattcataaccgtagcaagataaacctccaggatcttcagggtgcctgtacaaagaagacagcctag

SEQ ID NO: 27159 - DNA, 57 bp, synthetic construct
  misc_feature 1..57: note = Description of Artificial Sequence: Synthetic coding sequence
  source 1..57: mol_type = other DNA
atgctgagcagactgtttcgtatgcacgggttattcgtggcctctcacccctggtag

SEQ ID NO: 27160 - DNA, 336 bp, synthetic construct
  misc_feature 1..336: note = Description of Artificial Sequence: Synthetic coding sequence
  source 1..336: mol_type = other DNA
atgctgagtcggttgttcaggatgcatggactgtttgtcgcatctcacccgtgggaggttatcgtcgggacagttactctcacgatctgcatgatgagcatgaacatgttcaccgggaacaacaagatctgcggatggaactatgaatgcccaaaatttgaggaagatgtgctgagctccgacattatcatacttactataacgagatgcatcgcgattctttacatttattttcagttccagaatctccgtcaattgggctctaaatacatcctaggcattgcgggactgttcacgatcttttctagcttcgtatttagcacagtggtgatctag

SEQ ID NO: 27161 - DNA, 2667 bp, synthetic construct
  misc_feature 1..2667: note = Description of Artificial Sequence: Synthetic coding sequence
  source 1..2667: mol_type = other DNA
atgctgagcagactcttccgtatgcacggcctattcgtagcgtcgcatccgtgggaggtgatcgtggggaccgttacgctgacaatctgcatgatgtctatgaacatgttcactgggaataacaagatctgcggatggaactatgaatgtccgaagttcgaagaagatgtgcttagttcagatataattatcctcactataacgagatgcatcgcgattctgtatatttattttcagttccagaatcttagacaactaggcagtaagtatatccttggaatcgcaggattatttactatcttttcctctttcgttttctctacagtggttattcacttcttggacaaggaattaacggggttgaatgaggccctcccattcttcctcttgctgattgacctaagtagagctagcaccctcgcgaagtttgccctcagttctaactcccaggacgaggtgagggaaaacatagcccgaggtatggctatcctgggacctacatttaccctggatgctctggtcgaatgtttggtgatcggagtcgggacgatgtccggagtcagacagttggaaatcatgtgctgtttcggctgcatgtctgtgcttgctaattactttgtgtttatgacattttttccagcctgcgtgtcgctagtgctggaactgtctagggagagcagggagggaagacccatttggcagctgtcccactttgcccgtgtgttggaagaggaggagaacaagcccaatcccgtaacgcagcgagttaagatgatcatgtcattagggctagtgctggtccacgcccatagcaggtggatcgcagatccctcaccccagaacagtactgctgacactagcaaggtcagtcttggactggacgagaacgtttctaagaggatcgagcccagcgtttcattgtggcaattttatctgagtaagatgatcagcatggatattgagcaagtcattaccctgagcctggctctactattggctgtcaagtacattttctttgaacaaaccgaaactgagagcacgttaagcctcaagaatccaattacaagtccggtagtgactcagaaaaaagtgcccgataactgttgccgcagagaaccaatgttagtacgtaataatcagaaatgcgacagcgttgaggaagaaacgggaatcaacagggaacgaaaagtggaagtcatcaaacccctggtagcagagacagacacacctaacagagcgacgttcgtcgtggggaacagttccctcttggacacctcatcggtactggttacccaagaacccgagatagaactaccaagagagcccaggccgaatgaagaatgcttgcagatcctggggaatgccgagaagggcgcaaaattcttgtccgacgccgaaatcatccagctcgtgaatgccaaacatattccggcatataagcttgagacccttatggaaacgcacgagagaggcgtaagcataagaaggcagctactgagcaagaagctgtccgaaccaagttccctacagtacctgccttatcgggattataattattcactggtaatgggcgcatgctgtgaaaacgtgatcggatatatgccaatcccggtgggggtggcgggtcctctgtgcttggacgagaaggaatttcaggtgccgatggccactactgagggatgcctggttgccagtaccaataggggatgtcgtgcaattggtctgggaggtggggcttcaagtagggtactggcggatgggatgacacgcggtcctgtggtgagactacccagagcatgtgattccgcggaagtgaaggcctggttggagacctctgagggctttgctgtgatcaaggaggctttcgatagtacctcccgcttcgccaggctccaaaaactgcacaccagtatagccggtcgcaatctgtacatcagattccaatccaggagcggcgacgccatggggatgaacatgattagcaagggtactgagaaggccctcagtaagctgcatgaatattttcccgagatgcagattctagcggttagcgggaattattgtaccgataagaaacccgctgctattaattggattgagggccgaggaaagagcgtggtatgtgaagccgtgataccagcaaaggtggtgcgggaggtcctgaaaacgactaccgaggccatgatcgaggttaacattaacaaaaatctggtgggctcggccatggcaggcagcatcggcggatacaacgctcatgccgcaaacatcgtgacagctatttatattgcctgtggccaagacgccgctcagaatgtggggagctccaattgcattacactgatggaggcctccggccctaccaatgaggacctgtatatctcttgtactatgcctagcatcgagatcggcacagtcggaggcggaacaaacctcctgccgcagcaggcgtgcttacagatgttgggcgttcaaggagcatgcaaggacaatcctggagagaacgccaggcaactggccaggatagtttgcggaactgtcatggccggagaattgtcactcatggccgcactggccgcaggtcacttggtaaagtcacacatgattcataacaggtcaaaaattaacctccaggacctacagggcgcatgcacaaagaaaacagcctag

SEQ ID NO: 27162 - DNA, 2460 bp, synthetic construct
  misc_feature 1..2460: note = Description of Artificial Sequence: Synthetic coding sequence
  source 1..2460: mol_type = other DNA
atgcattcccaccctgtgtatttgcttcccgtgccagagtttaccagcacgtggattaaaatttacttcggctactgctggccatttcacaatttcctgaagttctgtatccagtattcctgtcattccctgctcaggcagcgcatagataggctggaagaggcactcccctttttcttacttctcatagaccttagtagggcatccactctcgctaaatttgcattgagttctaattcgcaggatgaggtccgagagaacattgcgaggggaatggcgattctgggaccaacttttactctcgacgccctcgtagaatgcctggtgatcggcgtaggcaccatgagcggtgttcgccagttggagataatgtgttgctttggatgcatgtccgtcctcgctaattattttgtgttcatgacattttttccggcttgcgtttcactggtgttagagctcagcagggagagcagagaggggcgacctatatggcaactctcccacttcgccagggtgctcgaggaagaagagaataaacccaatcctgtcacccaacgcgtcaagatgatcatgtctcttggcctggtcctcgtgcacgcccactcaaggtggatagccgacccatcgccacaaaattcaacagccgataccagtaaggtatctttgggacttgatgagaatgtgagcaagcgcatcgaaccctctgtgtctctttggcagttctacttaagcaagatgatctccatggatatcgagcaggttattacactctcactcgcattgctgttagcagtgaagtacattttctttgagcagactgaaactgagtctactttgagcctgaagaaccccattactagcccagtggtcacccaaaaaaaggtgcccgataactgttgccgtcgggagccaatgttagtccgtaataaccagaagtgcgacagtgtggaagaagagactggcattaacagagagcgaaaagtggaagttatcaaacctctcgttgccgagaccgatacacccaatagagctacatttgttgtgggaaacagctcccttttagatactagctcagtgttagtgacacaggagccagagatcgagctccctagagagcctaggccaaacgaagagtgcctccaaatactgggtaacgcggagaaaggcgctaagtttttatcagatgcagaaataatccagctcgtgaatgccaagcatatcccagcttataagctggagacacttatggagacccacgaacgaggcgtgtccatcagacgtcaacttctgagcaagaagttgagcgagccttcctccctccagtatctgccctaccgagactataattatagccttgtgatgggcgcttgttgcgagaacgtgatcgggtacatgcctattcctgttggtgttgccggaccgctttgcctggacgagaaggagtttcaggtaccaatggcaacaaccgaagggtgcctggtggcttcaacaaatagaggttgcagagccatcggactcggtggaggtgcctcctcaagggtgctggcagatgggatgactaggggtccagtggtcagactccctcgagcatgcgatagcgccgaggtgaaagcatggttggagacatctgaaggcttcgcagtcatcaaagaagccttcgattctacttccaggtttgcaagactgcaaaagctccacacgtccatcgcagggaggaatttgtacattcgctttcagtcccgaagtggcgacgccatgggaatgaacatgatttctaaaggtacagaaaaagctttgagcaaactgcacgagtatttcccggagatgcaaatactagccgtcagtggcaactactgcacagataagaagcctgcggctattaactggatcgaagggagggggaaatctgtcgtctgtgaggctgtgatccccgcaaaggtggtgagagaagtgctgaaaacaactaccgaggctatgatcgaggtgaatattaataaaaacttagtgggctcagcaatggccggtagcatagggggttacaatgcacatgctgcaaatatcgtcactgcaatttatatcgcctgtggccaagatgcagcccaaaatgtgggtagctctaactgtatcacactgatggaggcatcaggcccaacaaacgaggacctatatatttcctgcactatgccctctatcgaaatcggcacagttggtggtggcacgaatctactaccacagcaggcttgtttgcaaatgttaggtgtgcagggcgcatgcaaagacaacccgggagagaacgcccgacagctggccaggattgtatgcggcaccgtgatggccggtgaactgtccctgatggccgcactggctgccggacacctagttaagtctcacatgattcacaacaggtcaaaaattaatcttcaggatctgcagggagcctgcaccaagaaaacagcttag

SEQ ID NO: 27163 - DNA, 1671 bp, synthetic construct
  misc_feature 1..1671: note = Description of Artificial Sequence: Synthetic coding sequence
  source 1..1671: mol_type = other DNA
atggccaggaccacttcacagctttacgacgccgtgccaattcagtcgtccgtggtcctatgcagctgtccctcgccatctatggtgcgaactcagactgagtcctcaactccaccaggcatcccgggaggttcacgacaggggccagccatggatgggacggccgctgagcccaggcccggtgcaggcagcttacagcatgcacaaccaccacctcagccacgaaaaaagagacctgaagatttcaagttcggtaaaatcctgggagagggttcattctcgacagtggttctcgcgagagaactggcaacctccagagaatatgcgatcaagatactcgaaaagcggcacattattaaggaaaataaagtgccctacgtcacgagagagcgagacgtgatgtctcggttggatcatccgttcttcgtgaagttgtacttcacctttcaggacgatgaaaagctctacttcggcttgtcctacgccaagaatggcgagctgctgaaatacatccggaagataggcagcttcgatgaaacatgcactaggttctacacggctgaaattgtcagcgcgttggaatatctccacggcaagggaatcatccaccgcgacctcaagccagaaaatatcctgcttaatgaggacatgcatatacaaatcacggattttggcacggctaaggtattaagccccgagtctaagcaggcgagggcaaattcattcgtcggcacggcccagtatgtatcccctgagttgcttacggagaaaagtgcttgtaagtcttcagatttgtgggctttaggctgcatcatctaccaactagttgctggactgccaccattcagagccggaaacgaatacttgatttttcaaaaaatcatcaagctggagtacgacttccccgaaaaattcttccctaaagcaagggatctggtggaaaaacttcttgtgttggatgcaacgaagagactgggttgtgaagaaatggaggggtatgggccactcaaagctcaccctttctttgagtcggtgacgtgggagaatctgcatcagcagacaccgccaaagctaactgcatacctacctgctatgtccgaggatgacgaggattgctatggaaattacgacaacttgctctcccagttcggatgtatgcaggtgagtagcagcagctcttcccactcactctccgcttctgatactgggctgccacaacgctctgggagcaatattgaacaatacattcatgacctggactcaaatagtttcgagctggatctgcaattttcggaggacgagaagcgtttgcttctggagaaacaggccggtggcaacccttggcatcagtttgtggagaataatctgattttaaagatggggccagtggacaaacgaaagggactatttgcaagacgaagacagctcctgctaaccgaggggcctcacctgtactacgtcgaccctgtgaacaaggtcctgaagggggaaattccatggtcccaagagctgcggccagaagctaaaaatttcaaaacattcttcgtgcatacacctaatcgcacttattatttgatggacccttccgggaacgcccacaaatggtgccgaaaaatccaagaagtgtggcgacagcggtatcaatcgcaccccgacgcggctgtgcagtag

SEQ ID NO: 27164 - DNA, 1599 bp, synthetic construct
  misc_feature 1..1599: note = Description of Artificial Sequence: Synthetic coding sequence
  source 1..1599: mol_type = other DNA
atggcacggaccacgtcccagctatacgacgccgtccctattcagtcaagcgtggtgctgtgttcttgcccgtcccccagtatggttagaactcagacagaatcctcaacccctccaggtataccaggcggttcacgccagggtccggcaatggacggcacggcggcagaaccacggcctggagctggaagcttgcaacacgcgcaacctcccccacagccgcgaaagaaacgtccggaggactttaagttcggcaaaatattaggcgagggcagcttttctaccgttgttctcgcgagggaactcgccacaagcagagaatacgccatcaaaattttagagaagcgtcacataattaaggagaacaaagtgccttatgtaaccagagaaagggacgttatgtcaagactggatcatcccttcttcgtgaaactttactttacttttcaagacgacgaaaagctgtacttcgggctgagctacgcaaagaatggagaactgctcaaatatattcggaagattgggtctttcgatgaaacttgtacaaggttctataccgcagagatcgtctcggctctcgaatacctccatggcaaggggattatccaccgcgatctgaagcccgaaaatatcctcctcaacgaagacatgcatatccagatcaccgacttcggcacggctaaggtcttatcacccgaaagcaagcagggggtctctgacctctgggccttgggttgtatcatttatcagctcgtcgctggcctccccccatttcgtgcgggtaacgagtatctcatcttccagaaaatcattaagctcgagtatgacttccccgaaaagttttttcccaaagccagggacctcgtcgaaaagctgttggtcctagatgctactaagaggctgggatgtgaagagatggaggggtacggcccactaaaagcccacccattcttcgaaagtgtaacctgggaaaatctgcaccagcagacaccacctaagttaaccgcgtacctaccagccatgtccgaggacgacgaggactgctatggcaattacgacaacctcctgtcccaatttgggtgcatgcaggtaagtagctccagctcttcgcacagcctgtccgccagcgacactggtttgccgcaaagaagcgggagtaacatcgagcagtatatccatgacctggacagcaactcttttgaattagatctgcagttcagcgaagatgaaaaacggctgctgttagagaagcaggcagggggtaacccatggcatcaatttgtggagaacaacctcattcttaaaatgggccctgtggataagcgaaagggcctgttcgcacggagacgccagcttctgctgactgagggaccacatctttactacgtggaccctgtgaacaaggtgttaaagggtgaaataccctggtctcaggagctacggcctgaggctaagaactttaaaacattttttgtgcacacaccaaatagaacctactacttaatggatcctagcgggaatgcccataaatggtgtaggaaaatacaggaagtttggaggcagaggtaccagagccacccagatgcagcagtgcagtag

SEQ ID NO: 27165 - DNA, 1479 bp, synthetic construct
  misc_feature 1..1479: note = Description of Artificial Sequence: Synthetic coding sequence
  source 1..1479: mol_type = other DNA
cgcgctcaggacgagggtgggcactgttggggctccgcctccggacggaggacattacggaggcgaagggcagctcagagatgtggtggcggtgcacgagccgatgctggaccaatggctcggacaactagccagttgtatgatgcggtccccatacagtcctcagtcgtgctgtgcagttgtccctccccaagcatggtgagaacccagactgaatcatctactcctcctggcattccaggaggtagtcgacaggggccagcaatggacggtacagctgccgagcccagacccggagccggttccttacagcacgctcagcctcctcctcagcctcgcaagaaaagacccgaggatttcaaattcggaaagatccttggggaggggtcctttagcaccgtcgtgctagccagagaacttgccacatctagagaatatgcaatcaaaattctagagaaacgccatatcataaaggagaataaggtaccctacgtcacaagggagagggatgtaatgtcgcggttggatcaccccttttttgtcaaactttacttcacttttcaggatgatgagaagttatactttggcctgagttacgcgaagaatggggagctgcttaagtacatccggaagattgggagcttcgacgagacgtgcacgcgtttttacacagccgagattgtcagcgcattggagtatctgcacgggaagggaatcatccatcgcgatttgaaaccagagaatatcttgcttaacgaggacatgcacatccagatcactgattttggcacggcgaaagtgctgagtcccgaatccaagcaggcacgggctaattcattcgtggggactgctcaatatgtgtctcctgaactcctcacagagaagagcgcttgtaaaagttctgatctgtgggcactgggctgcatcatctaccaattggtggctggcttacctccttttcgagctggtaatgaataccttatctttcagaaaatcatcaagttggaatatgatttccccgaaaagtttttccctaaagccagagacctggtcgaaaagttactggtgctggacgctactaaacggcttggctgcgaagagatggaagggtatggtcctttgaaagcacatccctttttcgaatctgtgacttgggaaaacctccaccaacagactcccccaaaacttacggcttacctgcctgccatgagcgaggatgacgaagattgttacggaaactatgacaacctcctgtcacagttcggttgcatgcaggtgtcctcctcatccagctcccactccctgtccgcctccgacacaggacttcctcagcgaagtgggtccaatatcgaacagtacatccatgacctggatagtaattcatttgaattagacttacagttttctgaggacgagaaacgcttgctcctggaaaaacaggcaggaggaaacccttgcttgacgggtcggataatatag

SEQ ID NO: 27166 - DNA, 1290 bp, synthetic construct
  misc_feature 1..1290: note = Description of Artificial Sequence: Synthetic coding sequence
  source 1..1290: mol_type = other DNA
atggcacgaactaccagccagctctacgacgcagtccccatccagagcagcgttgtcctttgtagttgccccagcccgtcaatggtgcgtacgcagactgaaagttcaacccctcctggcattcccggaggctccagacaaggacctgccatggacggaactgccgcagaaccacgaccaggcgcaggctccctccagcatgcgcagcctccgcctcagcccagaaaaaaaaggcctgaagacttcaagtttgggaaaatcctcggggagggctcattctctacagttgtgctggcacgtgaactagctacgtccagggagtacgcaaccagggccaattccttcgtggggaccgcccagtacgtctctcctgagctgctcactgaaaagagtgcatgtaagagttccgatttgtgggccttagggtgtatcatctaccagctcgtcgcaggacttcccccatttcgtgccggtaacgaataccttatcttccagaagatcatcaaactggagtatgatttccctgaaaagtttttccccaaagctcgggatttagtagaaaagctgcttgtgctagacgcaaccaaaaggcttggctgcgaggagatggagggatatggcccactgaaagcacaccctttttttgagtctgtgacctgggagaatctgcaccagcaaacacctccaaagttaaccgcttacttaccagccatgagtgaggatgatgaagattgctacggaaattatgacaacctgctgtctcagttcggctgtatgcaggtttctagcagctcctcgtcacattctctgagtgcctccgacaccgggttgccccagcggagcgggagtaacatcgagcagtatatccacgaccttgatagcaactccttcgaattggacctgcagtttagtgaggacgaaaaacgattacttctcgagaagcaggcaggtggaaatccttggcaccagttcgtcgaaaacaacctgattctaaagatggggccagtggacaagcggaagggcttgttcgcgagaagaagacaactgctgctgactgagggccctcatctctactatgttgaccccgtgaataaggtgcttaagggggagataccctggtctcaggaactgcgacccgaagcgaagaactttaagacctttttcgttcatacacccaacaggacctactacctgatggaccccagcgggaacgcgcataagtggtgtagaaaaattcaagaggtctggcgccagcgttaccagtcacatccagacgccgctgtacagtag

SEQ ID NO: 27167 - DNA, 5121 bp, synthetic construct
  misc_feature 1..5121: note = Description of Artificial Sequence: Synthetic coding sequence
  source 1..5121: mol_type = other DNA
atgggagttcccaaattctacaggtggatttctgagcgatatccgtgcctgtcagaagttgtgaaagagcaccaaatccccgagtttgataatttgtatcttgacatgaatggaatcatacaccaatgttcgcatcccaatgacgatgacgtgcacttccggatctctgacgataagattttcactgacattttccattacctcgaagtcttgttcagaatcataaaaccacgcaaggtctttttcatggctgtggatggcgtggcgccaagagctaagatgaaccagcagcgcggacgaagatttcggtccgccaaggaagccgaggacaaaattaaaaaggccattgagaaaggggagacactgccaacagaagcaaggtttgattctaactgcataaccccgggaactgaattcatggctcggcttcacgagcatctcaaatacttcgtgaatatgaagatttccacagacaaatcctggcagggcgtgaccatctacttcagcggacatgaaacacctggggagggtgaacataaaataatggagttcatccgtagtgagaaggcgaagccggatcacgatcccaacacacggcattgtctctatggactcgacgcagatctgatcatgctgggcctgacatcccacgaggcgcacttctcactcctcagggaggaggttagatttggagggaaaaagacccagagggtctgcgcaccagaagagactacatttcatcttctgcatcttagtctaatgcgcgaatatatcgattatgaatttagcgtgctcaaggaaaagatcactttcaagtatgacatcgaacgcattatcgacgattggatccttatgggttttttagtcgggaacgattttattcctcacctgccacatctacatatcaaccacgacgcactaccactgctttacggtacctacgtaaccattctacccgagctgggagggtacatcaatgagtctggacacctcaaccttccaaggtttgaaaagtaccttgtaaaactttcagattttgaccgggaacatttctctgaagtgttcgtggatctaaagtggttcgagagcaaggtgggtaataaatatctcaacgaagcagcaggcgtggcagccgaagaggccagaaactataaggagaagaaaaaattgaaaggacaagaaaactccctttgctggaccgcccttgataagaacgagggggaaatgatcacaagtaaggacaatttggaggacgagacggaggatgacgatctgtttgaaaccgagttcagacagtataagcggacctattacatgactaaaatgggtgtagacgttgtttcagacgactttctggctgatcaggctgcttgttacgttcaggcaatccagtggatactgcattactactatcacggggtgcagagctggtcatggtattatccgtaccactacgcccctttcctctcagatatccacaatatcagcaccctgaagatccacttcgagctcggcaaacccttcaagccatttgaacaattgctggcggtgctccccgctgcttcaaaaaatctcttacccgcttgctaccaacatcttatgacaaacgaagacagtcctataatcgagtattaccccccagactttaagacggatctcaacggaaaacaacaagaatgggaagccgtggtgttgattcctttcatcgacgagaaacggttattagaggctatggagacatgtaatcattcactgaagaaagaggaacgcaagaggaatcagcacagcgagtgccttatgtgttggtacgatcgggacaccgaatttatttaccctagcccctggccggagaaattcccggcaatagaacgttgctgcaccaggtacaaaattatcagtctcgatgcttggcgagtcgacattaacaagaacaaaataaccaggattgaccagaaagccctctacttctgcggcttcccaactctgaaacatattcggcataaattcttcctgaaaaagagcggggtccaggtgtttcagcagagctcccggggagaaaacatgatgctggagatcctcgtggatgcagagtctgatgaattgacagttgagaatgtggcaagttcagtgcttggaaagtcagtctttgttaactggccgcacctggaagaagctcgcgtcgtagctgtgtccgacggcgagactaagttttatctggaggaacctcctggtacacaaaaactgtattcagggagaacagctccgccttcgaaagtggtgcatctcggtgacaaggaacagtccaattgggcaaaggaggttcagggcatcagtgaacattatcttcgccgaaaaggaataattattaacgaaaccagcgcggtcgtctatgcccagttactgaccggtcggaagtatcagataaatcagaatggagaagttcgactggagaaacagtggagtaaacaggttgtcccatttgtctaccaaaccatcgtgaaagatatccgagctttcgattcacgcttcagcaacataaaaaccttggacgacttattccccctcagatcaatggtcttcatgctcggaactccgtattacgggtgtactggggaggtacaggactctggcgacgtcataactgaaggacgtatcagggtcatttttagcatcccctgtgaaccgaacttagacgctcttattcagaatcagcacaagtatagcatcaagtataacccagggtatgtgctggcctctagactgggtgtgagcggttaccttgtcagcagatttaccgggtccatatttatcggacggggttcaaggcgcaatccgcacggagaccacaaagccaacgtgggattgaacctcaagtttaacaagaaaaatgaagaagtccccggttacaccaagaaggtcggtagtgagtggatgtactcctcagcagccgaacagctgctggcagaatatctggaaagagccccagagctatttagctacatcgccaagaatagccaggaagatgtcttttacgaagatgatatctggccgggagaaaatgaaaatggcgcagaaaaagtgcaggaaattattacgtggctgaaaggccacccggtgagcacactgtccaggagtagctgcgatctgcagattctagacgctgcaattgtggaaaaaatagaagaggaggttgaaaaatgcaaacagaggaagaataacaagaaagttcgtgtgacagtgaaaccccatttgctgtatagaccgctggaacagcagcacggtgttatcccagatcgcgatgcggagttctgtttatttgaccgagtggtcaatgtaagggagaacttctcagtgcctgttggactgagaggtacgataatcggcatcaaaggcgctaatcgcgaagctgatgtcctctttgaagtgctgtttgacgaggagtttcctggtggtctaaccataagatgttcccctggaaggggctatcgactcccgacgagtgccctggtcaatctgagccacggctcacgatccgagacagggaaccaaaagctgactgcaatcgtgaagccccagcctgccgtccaccagcattcttcctcctctagcgtgtcctctggccatctcggtgccctgaatcacagcccacagagcctcttcgttccaacacaggtcccgaccaaggatgacgacgaattctgcaatatttggcagagcctccagggttccgggaagatgcaatattttcaacccacaattcaggaaaagggggcagtactgccccaagaaatcagccaggttaaccagcaccataagagcggctttaacgataactctgtcaagtaccagcagcgtaagcacgacccccataggaagttcaaagaggagtgcaaatccccgaaggccgagtgctggtcacagaaaatgtctaacaaacagcctaacagcggaattgagaacttcctggcctcactgaatatctctaaagaaaatgaggttcagagctctcatcacggggagcccccatctgaagaacacctctcaccacaatctttcgctatgggaacgcgaatgcttaaggagatactgaaaattgatggtagcaacaccgtcgaccacaaaaacgagatcaaacaaattgccaatgagattccagtgtctagcaatcgcagggacgaatacggcttgccaagtcagcccaaacagaataagaagcttgcttcctatatgaataagccacacagcgccaacgaatatcacaatgtgcagtccatggacaatatgtgctggcctgcacccagtcagataccacctgttagtacaccggtgacagaactgtctcggatctgctccttagttgggatgccccagcccgacttttcttttttaagaatgccacagaccatgactgtgtgtcaggtgaaattgtccaacggactccttgtccatggacctcaatgtcactctgagaatgaagcaaaggaaaaggccgctttgttcgcactgcaacagctgggaagcttgggcatgaatttcccattaccttcccaggtctttgctaattatccatcagccgtaccacccggtacaatccccccagcctttcctccccctacagggtgggaccactatggtagtaactatgccttaggggcagccaacattatgccatcgagctcccacctcttcgggagcatgccgtggggtccttctgtgcctgtgcctggaaaacctttccaccacaccttgtacagtgggaccatgcctatggcaggcggaatccccggaggggtgcacaaccagtttataccactgcaggtgaccaaaaagcgggtggcaaacaaaaagaattttgaaaacaaagaagcacagagctctcaggctacgccagtgcagacaagccaacccgatagttccaatattgtgaaggtcagccctcgggaatcttcttctgcttctctcaaaagttccccaatcgctcagccagctagctcctttcaggtcgagactgcttcccaaggccacagcattagccatcacaagtccactcccatctctagctcaagacgcaaatctcgcaagctcgccgtcaattttggcgttagcaaaccgtctgagtac

SEQ ID NO: 27168 - DNA, 5085 bp, synthetic construct
  misc_feature 1..5085: note = Description of Artificial Sequence: Synthetic coding sequence
  source 1..5085: mol_type = other DNA
atgggggtccctaaattctacaggtggatctccgagcgctacccttgtctcagtgaagtcgtgaaggaacaccagattcctgagtttgacaacctctacctggacatgaacgggattattcaccagtgctcccaccccaatgatgacgacgtgcacttccgaatctcagacgataagatcttcacagacatcttccactacctagaggtgctgtttcggatcatcaagcccaggaaagttttctttatggctgttgacggggtggctcctcgggctaagatgaaccagcaaagaggcagacggttcagatccgccaaagaagcagaggataaaatcaaaaaggccatcgagaaaggagagacactgcccacggaggcgaggttcgactcaaactgtatcacacctgggaccgagttcatggcacgcctgcacgagcatctgaaatattttgtgaacatgaagatctctaccgataagtcatggcaaggggtaaccatctacttttccggtcacgagacccccggagagggcgagcacaagatcatggagttcataaggtccgaaaaagcaaagcctgaccacgaccccaacacaagacactgcctttatgggctggacgctgacttgatcatgctgggcctgacatcacacgaagcccacttttcccttttacgagaggaagttcgcttcgggggaaaaaaaacacagagggtgtgcgccccagaggaaaccacctttcatctgctgcacctctcactcatgcgagaatatatcgactatgagttcagcgtactgaaggaaaagataacatttaaatatgatattgaacgcatcattgatgattggatcctaatgggattccttgtcggtaatgattttatcccccaccttccacacctacacatcaaccatgatgccctccccctactgtacggaacctatgtaacaatcttgccagaattgggaggttacatcaacgaatcaggacacctgaatctccctcgcttcgagaagtatctcgttaaattaagtgactttgatagggagcacttcagtgaagtgttcgtggacctcaagtggttcgaatcgaaggtgggcaataaatacctgaatgaagcggcaggcgtagctgctgaggaggctcggaactataaggagaaaaaaaagcttaagggacaggagaattccctgtgctggactgcgctcgataagaacgagggggagatgatcaccagcaaagacaatctggaagacgaaacagaggacgacgacctgtttgagaccgaattcagacaatacaaacggacttattacatgacgaaaatgggcgtggacgtagtgtctgatgatttccttgcggaccaggccgcttgttacgtgcaggctattcaatggattttgcactattactatcatggtgtacagtcctggtcctggtactatccttaccactatgcacctttcttgtccgatattcataatatttcaacactgaaaatccattttgagttgggtaagccttttaaaccattcgagcagctgctcgccgtgcttcccgctgcatcgaaaaacctcctgccagcctgctatcagcatcttatgacaaacgaggattcacccataatcgagtattacccccctgatttcaaaaccgatcttaatgggaagcagcaggaatgggaggcagtggtgctgataccatttattgacgagaaacggcttctggaggctatggaaacctgtaatcactcactgaagaaagaggaacgcaaacgtaatcagcacagcgaatgtttaatgtgctggtatgaccgcgataccgaatttatttatccctcaccgtggcccgaaaagttcccagcaatcgaacgctgctgcacccgatacaaaataatttcactggatgcatggagggtggacatcaataaaaataaaatcactcgcattgatcagaaagccctgtacttttgcggattccccaccctgaagcatatccggcataaattctttctcaagaagagcggcgttcaggtgttccagcagagctcgcggggagaaaacatgatgctagaaattctagttgatgcggaaagcgatgagttgacagtagagaacgttgcctcttccgtgctgggaaaaagcgtattcgttaactggccacatcttgaggaggctcgcgtggtcgcagtgtctgacggcgaaaccaaattttatcttgaagaaccaccaggtacccaaaagctttattcgggacgaaccgccccaccatcaaaagtggttcatctgggcgacaaagagcagtcaaattgggctaaagaagtccagggaatcagcgagcactacctgcgaagaaagggtatcattattaacgaaacgtccgccgttgtctacgcccaacttcttactggaaggaagtaccagatcaatcagaacggtgaagtgagactggagaagcaatggtctaagcaagtggtgcccttcgtgtaccagactatcgtgaaggatattcgagctttcgacagtcgattttccaatatcaaaaccctggacgatctgttcccattaagatccatggtgtttatgctcggcactccttactacggctgtacgggcgaagtgcaagatagcggtgatgtgatcaccgaggggaggatcagggttatcttctcgattccttgcgagcctaacctggacgcgttaattcagaatcagcacaaatactctattaagtacaatccagggtacgtccttgctagtcgcctcggggtgtcaggctacctggtctcaaggttcactggctctattttcatcggtagagggagtcggaggaatccacatggggaccataaggccaacgtgggattaaatctcaagttcaacaagaaaaatgaggaagttcccggttacacgaagaaagtcggcagtgaatggatgtattcctctgccgctgagcaactactggcagaatacttagagcgggcacccgagcttttctcatacattgcaaagaatagtcaagaagatgtgttctatgaggacgatatttggccaggtgaaaacgagaatggcgctgagaaggtccaagagataatcacatggctgaaggggcaccccgtctctaccctaagtcgcagttcgtgcgatttgcagattttagacgcagccattgttgagaagattgaagaagaagtggaaaagtgcaaacaaagaaaaaataacaaaaaggttcgagttaccgtgaaacctcacctgctgtatcgcccactggagcagcagcacggcgttatacccgatagagatgccgaattttgtctgtttgatcgggtagttaacgttcgcgagaatttttcagtgcccgtggggttacgcggaacgattattggaattaaaggcgctaatagagaggctgacgtgttgttcgaggtgctgtttgacgaggaatttcctggcggtctaacaattagatgttcccctggcaggggttaccgcttgcctacatccgcacttgtgaatttatcacacggatctcggtccgaaaccggaaatcagaaactcacggcgattgtgaagcctcagcccgctgtacaccaacattcttcctcttcaagcgtgtcatctggccacctgggcgcactgaaccacagccctcagagcctttttgtgcccacccaagtccctacaaaagatgatgatgaattttgcaacatttggcagtctctccaagggtcagggaaaatgcaatacttccaaccaaccattcaggaaaagggcgcagtgctgcctcaggagatttcccaggtgaatcaacaccataaatccggttttaatgacaacagcgttaaataccagcaaagaaaacatgatccccaccggaaattcaaagaggagtgcaagtctccaaaggctgagtgctggtcccagaagatgagcaataagcagccaaacagtggcatagagaattttctggcatcgctgaatataagcaaagaaaacgaagttcagtcgtcacaccatggcgaaccgccaagcgaagagcatctgagcccgcagagtttcgccatgaaaggtactagaatgctgaaagaaattttgaaaatcgacgggtccaataccgttgaccataagaatgaaatcaagcagattgctaacgagatacctgtgagttccaataggagagacgaatacgggctgccttcccagccaaaacagaataaaaagctcgcgtcatatatgaataaaccccactctgccaacgagtaccataacgtccagtctatggataatatgtgttggcctgccccatcacaaatcccgccagtgtctactcccgttacggagctatcaaggatttgcagcttggtgggaatgccacagcccgattttagctttctgaggatgccccaaactatgacagtttgtcaagtgaagttgtcaaatgggttacttgtgcacggccctcagtgtcacagtgagaacgaggccaaggagaaggccgcactgttcgcgctccaacaactggggtccctgggaatgaatttcccgctaccatctcaggtatttgccaattacccttcagccgtgccccctggcactatcccgccagcctttccgccacctaccgccaatataatgccctcgtcctcacacctgtttgggagcatgccctggggaccaagcgtcccagttcccggtaaaccgtttcaccatacattgtacagcggcaccatgccaatggcagggggaatacccggtggtgtccacaatcagttcatccctttgcaagtgacgaaaaagagagtagccaacaaaaaaaacttcgagaataaggaggcccagtcttctcaagctacacctgtgcagaccagtcaacctgattcctccaacattgtcaaagtgtctcccagggagtcaagctctgcgtccctgaagtcctcgcctatcgcccagcctgccagttcattccaggtcgagacagcctctcagggacattctatctcccaccacaagagtactcctatctcttcctcccgccgtaagtcccgcaagctggccgtgaatttcggggtttcgaagccctctgaatag

SEQ ID NO: 27169 - DNA, 1380 bp, synthetic construct
  misc_feature 1..1380: note = Description of Artificial Sequence: Synthetic coding sequence
  source 1..1380: mol_type = other DNA
atgggggttccaaagttctaccgttggatctctgaaagatatccatgtcttagtgaggtggtgaaggagcaccagattcccgagtttgacaatctctacctagacatgaacggtatcattcatcagtgcagtcatcccaatgacgatgacgtgcacttcaggatttccgacgataaaatctttaccgacatcttccattacctagaggtgcttttccgcatcattaagcctcgaaaggtgttttttatggccgtggacggcgtggctcctcgggctaagatgaaccagcagcgaggcaggcggtttagaagtgccaaagaggccgaagataagatcaaaaaggctattgaaaagggggagaccctgcctactgaagccaggttcgacagtaactgcatcacaccaggaaccgaatttatggcgaggctccacgaacacttgaaatattttgttaatatgaaaatcagtacagacaagtcctggcagggggttaccatctacttttctgggcacgagactccaggcgaaggcgagcataaaatcatggagttcattagatcagaaaaagctaagcctgatcacgacccaaacacaagacactgcctctacggcctcgacgcagatcttattatgttgggattgacctcacacgaagcacacttcagtctccttcgggaggaagtacgcttcggaggaaagaagacacagagggtttgtgccccagaagaaacgacgtttcacctcctacacttaagcctcatgagagaatacatcgattatgaattctccgtgctaaaggaaaagattacttttaagtacgacattgaacggatcattgacgactggatcctgatgggctttctcgtgggtaatgatttcatccctcacctaccccatctccacatcaaccacgacgctcttccactgctgtatgggacgtacgttacaatactcccagaactgggaggttatattaatgaatccgggcaccttaatctgcctcgttttgagaagtacttagtgaaattatctgactttgacagagagcatttttcagaggtgttcgtagacttgaagtggttcgaaagcaaagtaggcaacaagtaccttaatgaggcagccggagtcgctgcggaggaagccaggaattataaagagaagaagaaactcaaaggtcaagagaatagtctgtgttggacagctctggacaagaacgaaggtgaaatgattacaagcaaggataacctggaggacgaaacagaagatgatgacctgttcgaaactgagtttcgtcagtacaaaaggacttattacatgacaaagatgggcgtggacgtcgtgtcagaatacgtcttcgcaaatgctttcattcttaagtag

SEQ ID NO: 27170 - DNA, 750 bp, synthetic construct
  misc_feature 1..750: note = Description of Artificial Sequence: Synthetic coding sequence
  source 1..750: mol_type = other DNA
atgttagggctaacaagtcatgaggcacactttagcctgttgcgggaagaggtccggtttgggggaaaaaagacacagcgtgtctgtgcgccagaagaaacaacatttcacctcctgcatctctctctgatgcgggagtacatcgactatgagttctccgtgctgaaagaaaaaatcacctttaaatacgacattgagagaatcattgacgattggattttgatggggtttctggtgggcaatgatttcatcccccatctcccacatctacacatcaatcatgacgcgctccctcttctgtatggaacctacgttacaatcttaccggaactggggggttacattaacgagtctggccatcttaatttgccaagattcgaaaaatacctggtgaagttgagcgactttgaccgagagcacttcagtgaggtgttcgttgatttgaaatggttcgaatcaaaagtgggcaataagtacctgaacgaagccgcaggggtggccgctgaagaagcaaggaattataaggaaaagaagaaactcaaaggccaggagaattctctatgctggaccgctctcgacaagaacgagggtgaaatgatcacctccaaagacaacttagaggacgaaacggaggacgacgatctgttcgagacagagttccggcagtataaaaggacctactatatgacaaagatgggcgtagacgtcgtgtccgagtacgtcttcgcgaatgcgttcatcttaaaatag

SEQ ID NO: 27171 - DNA, 3483 bp, synthetic construct
  misc_feature 1..3483: note = Description of Artificial Sequence: Synthetic coding sequence
  source 1..3483: mol_type = other DNA
taaaccaatgaagacagtcccattatagagtattaccctcccgactttaagaccgaccttaacgggaagcagcaggagtgggaagcagtggtgctcatcccctttatagacgagcggctgctggaggccatggagacctgcaaccacagtttgaaaaaagaagagagaaaaagaaaccaacactccgagtgtttaatgtgctggtatgatagagatacggaattcatttatccaagtccatggcctgagaagttccctgccatcgaacgctgttgcactcgctataaaatcatttctcttgacgcctggagagtggacattaacaagaacaaaatcactcggattgaccaaaaggcattatacttttgcggttttcctaccctgaagcacatcaggcacaagttcttcttgaaaaaaagtggggtccaagtctttcagcagtcctcaaggggcgaaaatatgatgctggaaattctggtggacgcggagtctgatgaactgaccgttgaaaatgttgccagctcagttttagggaaatccgtctttgtgaattggcctcacctcgaggaggctagagtcgtggcagtctccgacggtgagacaaagttttaccttgaagaaccgccaggcactcagaaactctattccggccgaaccgcccctccatccaaagttgttcacctgggcgacaaggagcagtctaactgggccaaagaagttcaagggattagcgaacactacttgcgcaggaaaggaattataatcaatgaaacatccgcagtggtgtacgcccagctgctgacggggcgtaaataccaaattaaccagaatggcgaggtacgactagagaaacaatggagtaagcaagttgtgcccttcgtgtaccagaccatagtcaaggatattagagcattcgatagtcgcttcagcaacatcaaaactctagacgatcttttccctctgagatctatggtgttcatgctgggcacaccttattatggttgcactggtgaggtccaggattctggggatgtgatcaccgaagggagaattcgcgtaatcttctcaatcccgtgtgagcctaatctggacgccctgatccagaaccaacacaagtacagtatcaaatacaaccctggatacgtactcgcctctcggctaggagtgtcagggtacctggtctctcggttcactggaagcatcttcattggcagggggtctcggagaaatcctcacggcgaccacaaggccaatgtgggcctaaatctcaagtttaacaaaaaaaacgaggaagtcccgggttataccaaaaaggtcggctccgagtggatgtactccagcgctgccgaacagctgctagctgaatacctcgagagagcacccgagctcttttcctacattgccaagaattcacaagaagacgtgttttatgaagacgacatttggccaggcgagaatgagaacggagctgagaaggtgcaggaaatcataacttggctcaagggccaccctgtctcaaccctctctcggtcaagctgtgacctccaaattctcgatgccgctattgtggaaaaaatagaagaagaagtggagaaatgtaagcaaagaaaaaacaacaaaaaagtgcgtgtcaccgtcaaacctcatctactctacaggcccctcgagcagcagcatggtgtgatcccagacagagacgccgagttttgtctgtttgatcgggtggtcaatgtgagggaaaatttcagcgtgcccgtcggcctacgaggaaccatcatcggaatcaagggagctaatagggaggccgatgttctgtttgaagtcctgtttgatgaagaatttcccggagggctgacaattaggtgcagcccaggaagaggttatcgcctcccaacttctgccctggtgaacctgtcgcatggctcgcggtcagaaactggaaaccaaaagttgaccgctatcgtgaagccccagcccgcagtgcatcagcatagctcctcctcttcagtttcatctggtcacctgggagccttgaatcactccccccagagcctgtttgtacccacacaagttcctaccaaagatgatgacgagttttgcaatatctggcagtccctgcagggttctgggaagatgcagtattttcaaccaacgatccaggagaagggtgcagtgctgcctcaggagatcagccaagtaaatcagcaccacaaaagcgggtttaacgataatagtgtcaagtaccagcagcggaagcacgatcctcatcggaagttcaaggaggaatgtaagagcccaaaagcagaatgttggtctcagaaaatgagtaataagcagccaaattccggtattgagaatttcctggcatccctgaatatttcaaaggagaacgaggtgcagagctctcaccatggggagcccccatcagaagagcacctgtccccccagtctttcgccatgaaggggacaaggatgctaaaggagatactgaaaattgacggctccaacaccgtcgaccataagaatgaaatcaaacagattgctaatgagatccctgtgagctcaaataggcgggacgagtatggtctgccatcgcagcctaagcagaacaagaagctggcctcttatatgaacaaaccacattctgccaatgaatatcacaatgtgcagagcatggacaatatgtgttggccagcaccatcacagattccacccgtctcgaccccagtgactgagctctcacgcatttgctccttggtgggaatgccacagcccgatttttccttcctgaggatgccccagaccatgactgtgtgccaggtgaagctgagtaacggcctgctcgtccatggaccacagtgccattccgaaaatgaggccaaggaaaaggctgccttatttgccttgcagcaattaggcagtctcgggatgaacttccccctgcccagccaggtgtttgcgaactatccctctgcggtgcccccaggaaccatccctccagcattccctcctcccacagccaatatcatgccctcgtcctcccacttattcgggtcgatgccatggggacccagcgtgcctgtcccaggcaaaccgttccaccacaccttgtattcgggtacaatgccgatggctgggggtatccccggtggtgtacacaatcagttcattcccctgcaggtcacaaaaaagagagtggccaacaaaaagaactttgagaacaaagaggcacagtcctcgcaggcaactcctgttcagacaagccagcccgactcttctaacatcgtcaaagtgagtcccagagagtcttcttctgcctctctgaaaagctcccccatcgcgcagcccgcttcaagttttcaagtcgaaaccgcttcccaggggcactccatttcccatcataagagcacacctatttctagctcacggagaaagagccgcaagctggctgtgaacttcggcgtgtctaaaccgtccgagtag

SEQ ID NO: 27172 - DNA, 1233 bp, synthetic construct
  misc_feature 1..1233: note = Description of Artificial Sequence: Synthetic coding sequence
  source 1..1233: mol_type = other DNA
atgcctgctcgggctctcctacccaggaggatggggcatcgaaccctggcctcaactcccgcactgtgggccagtataccttgtccccgttcggaactcaggcttgacctggtcctgccgagcggacagtcattcagatggagggaacaatcacccgcacattggagcggggttctggccgaccaggtctggacactgacccagacagaggaacagctccactgtaccgtgtacaggggcgacaaatcacaggcttctagacccacacccgatgaactagaggccgttcgcaagtactttcaactagacgtgaccctagcacagctgtaccaccattggggttctgtggactcacacttccaggaagttgcccagaagtttcagggtgttcgtctgttacgccaggaccctattgaatgcctgtttagctttatttgcagcagtaataataatatcgctagaattactggtatggtggaaaggctatgccaggcttttgggcctcgattgatacaactagacgacgtcacataccatggcttccccagcttgcaggccctcgccggtcccgaagtagaggcccatctgcggaaattaggactaggctatcgcgctcgatacgtttcagcctccgcgagagctatcctggaggagcaggggggactggcatggctgcagcagctcagggagagctcctacgaggaggcacataaagcactctgtatcctgcccggagtcggtaccaaagtcgctgattgcatttgcctgatggcattggataaacctcaggccgtgcccgtagacgtgcatatgtggcacattgcccagcgcgactatagctggcatcctactactagccaggcaaagggaccctcccctcagacaaataaggaactggggaatttcttcaggtctttgtggggcccttatgcaggctgggcgcaagctacaccccctagttacagatgctgctctgttcccacatgcgctaaccctgccatgctgcgatcccaccagcagtccgcagaacgcgtccccaagggtagaaaagcgaggtggggaaccttagacaaagaaatccctcaggctcccagtccgcctttccccacttctttatcaccctcacccccttccctgatgctggggagagggcttccagtcactacctccaaggcccgacacccccagatcaagcagtcggtttgtaccacacgctggggtggtggatattag

SEQ ID NO: 27173 - DNA, 1071 bp, synthetic construct
  misc_feature 1..1071: note = Description of Artificial Sequence: Synthetic coding sequence
  source 1..1071: mol_type = other DNA
atgcccgcaagagcattattgccccgtaggatgggccatagaacattggcatctaccccggctctgtgggccagcattccatgccctagatcagagctccgtctagacttggtgctacctagtggccaatcattccggtggcgggagcaatcgccagcacactggtccggcgtgctagctgatcaagtgtggacactgactcagactgaggaacagctccactgcacagtgtacaggggggacaagtcccaggcatcgcgacccacacccgacgagctggaagcagttcgcaaatatttccagctcgatgtgaccttagcacagctgtaccaccactggggaagcgttgactcccattttcaggaggttgcccaaaagtttcagggagtgcgactgctgagacaggatccaattgagtgtctgttttccttcatatgctcatccaacaataacatcgcacgaataacaggcatggtggaacggctctgccaggctttcggtccgcgtctcattcagctggacgatgtcacatatcatggctttccttctttacaggcgcttgccggacccgaggtcgaggcccatctgaggaaattgggcctaggatatagagccagatatgttagtgcaagtgccagagccattttagaggagcaagggggattggcttggcttcagcagctgcgcgagtctagttatgaggaggcccacaaagccttgtgcattttacccggagtaggaacgaaggtcgccgattgcatatgcctgatggccctagacaagccccaggccgtgccggtggatgtccacatgtggcatatcgcgcaacgggactactcctggcacccaactacaagtcaagcaaaaggtccttctccccagaccaacaaagagctcggtaatttttttcgctcactgtgggggccatatgcgggttgggctcaagccctgtgtcaagttattaccaccttcatgaccttccttggaccgcacagattggatcaaatgccccctgaagagctccagacgtccagtagtagactaggcggtcccccatggcagtgcatatag

SEQ ID NO: 27174 - DNA, 1275 bp, synthetic construct
  misc_feature 1..1275: note = Description of Artificial Sequence: Synthetic coding sequence
  source 1..1275: mol_type = other DNA
atgcccgctcgcgctctgcttccgcgaagaatgggacataggaccctcgccagtacacccgcactgtgggcttcaatcccttgccctaggtctgagctcaggctggacctggtactgccaagcggacagtctttcaggtggagggagcagagtcctgcccactggtccggagttttagctgatcaggtgtggacactgactcagacggaagagcagttgcactgcaccgtgtatagaggggataaatcccaagccagtaggccgactccggatgagctggaagctgtgcgaaagtacttccaactagacgtaacgctcgcccagctctatcatcattgggggagcgtggacagccatttccaagaggtggcccaaaaattccagggcgtccgccttctgcgtcaggatcctattgagtgcctcttttcctttatctgtagcagcaataacaatattgccagaattaccggtatggtcgagcgcctctgccaggccttcggccctcgtctaatacaacttgacgatgtgacataccatggttttccatcactccaagctttagcaggacccgaggtagaagcccacctgcgcaaacttggcttgggctatcgcgctcgatacgtgtcagccagtgctagagccattctggaggagcaaggtggcctggcctggcttcagcagctgagagaaagctcttacgaggaagcgcataaagctttatgcatactccctggcgttggcactaaggtggctgactgtatctgtctcatggctcttgataaaccacaggctgtaccagtggatgttcacatgtggcatattgctcaacgagactactcctggcacccaacaaccagccaggccaaaggaccctcaccccagacgaacaaggaacttgggaattttttcagatccctttgggggccatacgccggatgggcacaggccggtttattgggcaacgcctttgacggccatcagttgttgcgcccattgatcttttgccaggatcacctgcgagaaggcccaccaattggccgtggagattcgcaaggagaagagctcgagcctcagcttccctctagcctatcatccattccgtatggcttctgcgaccactgttggaccaaggacgttgatgacccaccattggtaacccatccaagtcccggaagccgagacgggcatatgactcaggcatggcctgtgaaggtggtgagcccattagcaaccgtgatcggtcacgtgatgcaggcatctttgcttgctctctag

SEQ ID NO: 27175 - DNA, 975 bp, synthetic construct
  misc_feature 1..975: note = Description of Artificial Sequence: Synthetic coding sequence
  source 1..975: mol_type = other DNA
atgccagccagagctctgctgcctagaaggatggggcatagaactttggcctccaccccagctctgtgggcctccatcccttgtcctcggtccgagctgaggcttgatctagtactcccgagcggacagtctttccgttggcgcgagcagtcccctgcccactggtctggggtgctggcagaccaggtgtggactttgacacaaacggaagagcagctccattgcacggtgtaccgcggagacaagagccaggcttcccgccctacaccggacgaactcgaagctgtgcggaagtattttcagctggatgttacgctggctcagctttatcatcactggggcagcgtggattctcatttccaggaagtggcccagaaatttcagggtgtgaggctcctacgccaggatccaattgaatgtttgttttctttcatttgttcttctaacaacaacattgcaaggatcacagggatggttgaacggttgtgccaggcctttggccctcggctgatacagttggatgatgtgacgtatcacggcttcccatccctacaggcacttgccggacctgaagtcgaagcacacctgagaaaactgggcctgggctatcgcgcacggtatgtgtcggcttcggctcgggctattctggaggagcagggaggactggcatggcttcagcagctgcgcgaatcttcctacgaggaggctcataaggcactgtgcatactgcccggtgtcggcacaaaagtagcagattgtatttgccttatggccttggacaagccccaggcagtaccggtcgacgtgcatatgtggcacatcgcccaacgcgattattcttggcaccccaccacgtctcaggccaaaggacctagccctcagacgaataaggagctgggtaacttcttccgctccttatggggcccatacgcagggtgggctcaagctgtgtcagtgcctcggtgtcctccatag

SEQ ID NO: 27176 - DNA, 594 bp, synthetic construct
  misc_feature 1..594: note = Description of Artificial Sequence: Synthetic coding sequence
  source 1..594: mol_type = other DNA
atggtggaacgtctgtgtcaggcgtttggccctcgtctgatccagcttgacgatgtgacgtaccacggctttccctcgttgcaagctttggcgggacccgaagtggaggcccatctccgtaagctgggactaggatatagagctcgctatgtctccgcctctgcacgcgcaatcctcgaggaacaggggggactggcatggctccagcagctccgcgaaagctcatatgaagaggcacataaggctctttgtatactccctggtgtggggacaaaagaaaccttcagtggggcttgtggagatctcatgctcgcgggaccaaaaaggtgctgtagtgtgccaacctgcgccaaccccgctatgctgcgctctcatcagcagtcggctgaacgtgtgcccaaaggtcggaaagctcgctggggcacacttgataaggagatcccccaagcccctagccctccatttcccacatctctgtcgccttcgccccctagtcttatgttgggcagaggtttgcccgtgactacctctaaagctcggcatccccagattaagcaaagcgtgtgcacaacacggtggggcggaggatactag

SEQ ID NO: 27177 - DNA, 1038 bp, synthetic construct
  misc_feature 1..1038: note = Description of Artificial Sequence: Synthetic coding sequence
  source 1..1038: mol_type = other DNA
atgcccgctagggctttactgcctcggaggatgggccatcgtaccctcgcatccactccagccctgtgggcgtcaatcccgtgtccaaggtcagagctccgcttagacctcgtgttaccctctggacagtccttccgatggcgcgagcagtctcctgcccactggagcggtgtgctcgctgatcaggtatggactttaacacagacagaggagcagctgcactgcaccgtttatagaggagacaaatctcaggcgagccgcccaacacccgacgaactcgaagcagtacggaagtatttccagctggatgtgacactcgcccagctgtaccatcattggggctcagttgactcacacttccaggaggtcgcccagaagtttcagggggttcgtctgctgcgccaggatcctatcgaatgcttattctcatttatttgttcgagtaacaataacattgcgagaataacagggatggtggaaaggctgtgtcaggcttttggcccacggctgatccagctcgatgacgtcacatatcatgggttcccttctctacaggctctagccggacctgaggtggaagcccatctgcgtaagctaggattgggataccgcgcacgatacgtttctgcctctgctcgtgcaattctggaggagcagggcggacttgcctggctgcagcagctgagagagtcttcctatgaggaagctcataaagcattgtgcatacttccaggggtcggcacaaaggtggccgattgtatctgtctgatggctctcgacaaaccccaggccgtgcctgtagacgtgcatatgtggcacatcgcccagagagactatagctggcaccccacaacttcgcaggccaagggacccagtcctcagacaaataaagagcttgggaatttctttagaagcctttggggcccatacgcaggctgggcacaggcagtcctgttcagcgcggacttacgtcagagtagacatgctcaggaacccccagcaaagcgtcggaagggctccaaaggccctgaaggctag

SEQ ID NO: 27178 - DNA, 1074 bp, synthetic construct
  misc_feature 1..1074: note = Description of Artificial Sequence: Synthetic coding sequence
  source 1..1074: mol_type = other DNA
atgccagcgagagctctcctgcctcgaagaatgggacacaggactttagcatcaacacctgccctgtgggcgagtatcccgtgccctagaagcgagctccgtttagatctcgtcctccctagtggtcagagtttcaggtggagagagcagagtcccgctcattggtcaggcgttttagctgatcaagtatggaccctgacccaaacagaagagcaactacattgcaccgtgtataggggagacaaatcccaggcctctcggcctactccggacgaactggaggccgtacgtaaatattttcagttggacgtgaccctggcccagctttaccaccactggggatctgtagatagtcactttcaggaagtggctcagaagtttcaaggagtccgcctgttgcgacaggatcctatcgaatgtctgtttagctttatctgttcctcaaacaacaacatagcacggattaccggaatggttgagagactatgtcaggccttcgggccaaggcttattcagctcgacgatgtgacttatcacggcttcccgagccttcaagctcttgccggtccagaggtggaagcccatctgcgaaagctgggtctaggctatcgcgcaagatatgtctccgccagcgcacgggcaatattagaggaacaagggggactagcatggctccaacagctgcgagaaagttcctacgaagaggcgcacaaagccctgtgtatactgccaggcgtggggacgaaggggctcctgggcaacgctttcgatggccaccagcttcttcggcctctgatcttctgccaggaccatctgcgagaaggccctccaattgggaggggggactctcagggcgaagaacttgagccccaacttccttcgagcttgagctcaataccctacggattctgtgatcattgctggactaaggatgtcgacgacccccctctggtgacccacccctctccaggttctagagatggtcacatgacacaggcgtggccagtaaaggtggtcagtcccttagctacagtgatcggacacgtcatgcaagccagcttgctcgccttatag

SEQ ID NO: 27179 - DNA, 588 bp, synthetic construct
  misc_feature 1..588: note = Description of Artificial Sequence: Synthetic coding sequence
  source 1..588: mol_type = other DNA
atgcccgcacgggctttgctgccccgaagaatggggcaccgaacgctcgcgtctacaccggcactgtgggcaagtattccttgtccacggtccgaacttaggctcgacctcgtgctgccaagcggacagtctttccggtggagggagcagtcaccagctcactggtcaggcgtcctagccgatcaagtctggaccctcacgcaaaccgaagaacagttgcactgcaccgtgtacaggggggacaagagccaggcctcaaggcctacccccgacgagctggaggccgtgaggaagtactttcagctcgatgtcactctggctcaactctaccatcattggggatcagtggactctcacttccaggaagtggcccagaagtttcaaggtgtgagactactgaggcaggatccgattgaatgcttattctcatttatttgttcctccaacaacaatatcgcacggatcactggaatggtagagagactctgccaagctttcggccctaggctgatccaattggatgacgtgacttaccacggcttcccaagcctgcaggctttggctggacccccttggcaatgcatatag

SEQ ID NO: 27180 - DNA, 969 bp, synthetic construct
  misc_feature 1..969: note = Description of Artificial Sequence: Synthetic coding sequence
  source 1..969: mol_type = other DNA
atgccggcaagagcactactgccacggcgaatgggtcaccggactctggcaagcacgcccgcactgtgggcttccataccttgtcccaggtccgaactccggctggacttggttctgccctccggacagtccttcaggtggcgcgagcagtccccagctcattggtcgggcgtgctagccgaccaggtgtggactcttacgcagaccgaagaacagctccattgtaccgtttacaggggtgacaaaagccaggccagtcggcctacaccggacgaactagaagcggttcgcaaatattttcaacttgatgttacgctggcacagttatatcatcactgggggagtgtagattcccattttcaggaggttgcccaaaagtttcagggtgtgcggttgctaaggcaagatccaattgagtgcttgttctcctttatttgctcctctaataataatattgctcgtatcaccgggatggtagagcgtctttgccaggccttcggccctcgcctgatccaactggacgatgtgacataccatggatttccttcactgcaagccctggctggacccgaggttgaggctcatctgcgcaaactcggcttgggctaccgcgctaggtatgtctcagcctctgccagagccatcctggaggagcaaggcggtcttgcttggctgcaacagctgcgcgaatctagctacgaggaggctcataaggctttatgtattttacctggagtgggcaccaaggtagcagactgcatttgcctgatggcactggataaaccccaagctgtgcctgtggacgtgcacatgtggcacatagcccagagggactacagctggcatccaaccacatcccaggccaagggtcctagcccccagaccaataaggaactggggaatttcttccggtcactgtggggtccttacgccggttgggcacaagctgccggatcagacgcgtcttag

SEQ ID NO: 27181 - DNA, 6806 bp, synthetic construct
  misc_feature 1..6806: note = Description of Artificial Sequence: Synthetic coding sequence
  source 1..6806: mol_type = other DNA
atgagtgggttgcacctggtaaaacagggacgcgacaggaaaaagatagatagccaaagagattttacagttgcctctcctgcagagttcgtgactcgctttgggggtaacaaagtgattgagaaagtgctcattgctaacaatggcatagccgctgttaagtgcatgcgctcaatcaggagatggagttatgagatgttcagaaacgagagggcaatccgcttcgtcgttatggtgacgcccgaagacctgaaagccaacgccgagtacatcaaaatggctgatcactacgttcccgtgcctggcggacccaataataacaattacgctaacgtcgagctcatactcgatatcgccaaacggatccccgtgcaagccgtctgggccggttggggccacgcgtccgaaaatcccaagttgccggaactcctgctcaaaaacggcatcgccttcatggggcctccttctcaggccatgtgggccctgggagacaagatcgcatcctccatcgtcgcccaaactgcaggcattcctaccctcccttggagcgggtctgggctccgagtggattggcaagaaaatgacttcagcaagagaatcttgaatgtacctcaggaattgtacgagaagggatatgtgaaggatgtggatgatggtctgcaagctgcagaggaagtcggctatccagtgatgatcaaagctagcgaggggggaggagggaaaggcatacggaaggttaataacgccgacgacttccccaacctctttagacaggtccaggcggaagtgcctggtagccctatattcgtgatgagactggctaaacagagccgacatctggaggtccagatcctggcggaccagtatggcaacgccatcagtctgttcggacgggactgctccgtccagcggagacaccagaagattattgaggaggctcccgcaaccattgctacacccgctgtatttgaacacatggaacaatgcgctgtgaaactcgctaagatggtgggctacgtgtctgccggtacggtggagtacctgtactcgcaggatggatctttttattttcttgagctgaaccccaggctgcaggtcgaacacccctgtaccgagatggtggccgacgtgaacctccccgcagcccagctccagatagctatgggcattcccctgtaccggattaaggacatcagaatgatgtacggagtgtctccatggggtgattcccccattgattttgaggactctgcccacgtgccttgcccgagaggccatgttatcgccgcaaggatcaccagcgagaatcctgatgagggtttcaagccgtcttcaggtaccgtacaggaattaaatttcaggtccaacaaaaacgtgtgggggtatttctctgtggccgctgcaggcggattgcatgaatttgctgatagtcagttcggacattgcttctcatggggcgagaatcgggaggaggccatttccaatatggtggtggcgttaaaggaattgagtatccgaggggacttcaggacaaccgtggaatatttaatcaagttgttggagacagaatcctttcagatgaatagaattgatactggttggttagataggctgattgccgagaaagtgcaagctgagcgaccagacaccatgctcggtgtcgtctgcggagcactgcatgttgccgatgtgagtctgaggaatagtgtgagcaatttcctgcacagcctggagcggggtcaagtacttcctgcgcatactctgctgaacaccgtggatgttgagctaatctacgaaggcgtgaaatacgtgctcaaagtgaccaggcagagccccaactcatacgtcgtgattatgaacggcagttgcgtggaggttgacgttcacagactgtccgacggcggtcttttgctctcctatgatggcagtagctatacgacatacatgaaggaggaggtcgacaggtaccgtataacaattggcaacaaaacatgtgtttttgagaaggagaatgaccccagtgtgatgcggtccccgagtgccggaaaactcattcagtacatagtcgaagacggaggacacgtgttcgctgggcaatgttatgccgaaatagaagtgatgaagatggtgatgaccttgaccgctgtcgaaagtgggtgcatacattatgtgaagagaccaggtgcagcccttgatcctggatgtgtgctggctaagatgcagctcgacaacccaagtaaagtgcaacaagcagaacttcacactggttccctgcccagaatccagagcaccgcactccgcggagaaaaactgcatcgcgtctttcactatgtactggacaacctggtgaatgtaatgaatgggtattgcctgcctgatccttttttctcttctaaggtgaaggactgggtcgagagattgatgaagacactgcgagatccctctctgcccttactggaacttcaagacattatgacctcagtgtcaggccgaattcctccaaatgtggaaaaaagcatcaagaaagagatggcccagtatgcatccaatataaccagcgtactctgtcagtttcctagccaacagatagcaaacattctggactctcacgctgccaccctgaatcgcaagtctgaaagggaagtgttcttcatgaatacgcagtcgatcgttcagctcgtacagaggtaccgaagtggaatcagaggacacatgaaagccgtggtgatggatcttctaaggcagtacctcagggttgagacacaatttcagaatggacactacgataaatgcgtgttcgctctgcgggaggagaacaagtcagacatgaacacagtcctcaattatattttcagccacgcccaggtgacaaagaagaatcttctcgtcaccatgttgattgaccagctgtgcggcagagatccaacactgacagatgagctcctgaacattctcacggaattgacacagctgtcaaaaactaccaatgccaaggtagcccttagagccaggcaggtcctgattgccagtcatcttccctcttacgagctccgtcacaaccaggtggaaagtatctttctgtctgcaattgatatgtacgggcatcaattttgcatcgagaacctccagaagctgattctaagtgagactagcatttttgatgtgcttcccaactttttctatcacagcaaccaggtagtccgcatggctgcgttggaagtgtatgtccggcgagcatacatcgcctacgaattgaattcagtccagcacaggcagctgaaggacaacacttgtgttgtggagttccagtttatgttacctacgagtcatcctaatcggggtaacatcccgacgctgaaccgtatgtctttttcctcgaatctcaaccactacgggatgacccatgtcgccagcgtaagcgatgtgctgctagataactcatttacacctccctgtcagcgaatgggaggaatggtgtctttccgtacattcgaggacttcgtgagaatcttcgacgaggtaatggggtgcttttccgacagtccgcctcagagcccaacctttcccgaagcaggtcatactagcctctacgatgaggataaagtgcccagagacgaacccatccatatcctaaatgttgccattaaaaccgactgtgacatcgaggacgatagattggctgcaatgttccgggagttcacccagcagaataaagccacattggtggaccatggtatcagacggctcacatttctagtcgctcagaaggattttcggaaacaagtgaactatgaggtggaccgaaggttccatcgagagttccctaaattctttaccttccgggctagggacaagtttgaggaggacagaatttacagacatctggagcccgcactggcctttcagttggaacttaatcgtatgagaaatttcgacctgactgccatcccttgtgccaatcacaaaatgcacctctacctgggcgctgctaaagttgaagtgggtacagaagtgactgactatagatttttcgttcgcgcaataattagacactctgacctcgtgacaaaagaggctagtttcgagtacttacaaaatgagggggagaggctgttgcttgaggcaatggacgaactcgaagtggccttcaataacaccaatgtacggactgactgcaatcacatcttcctaaatttcgtccctaccgtaatcatggacccctccaaaattgaggagtcagtccggtcgatggtcatgaggtatggctcacggctgtggaagctcagagtgcttcaggccgagctgaaaatcaacattagactgacaccaacaggcaaggctattcctattcggctgttcttgaccaacgagtccggctactatctagacatatccctttacaaagaggtgactgactctcggactgctcagatcatgttccaggcatacggggacaagcaggggcctctgcatgggatgttgattaacactccttatgtcaccaaggacctgcttcagtctaaaagatttcaggcccagtccctaggcacaacctatatatacgacatccctgagatgtttaggcagtcccttattaaactttgggagagtatgagcacacaggccttcttgccatccccgcctttaccaagcgacatgctcacatatactgagctggtcctggacgatcagggccagttagtgcatatgaacagactacccggaggcaacgaaattggaatggtcgcctggaagatgacattcaaatctccagagtatccagagggcagggacatcattgtgataggtaatgatatcacctaccgcattggatcctttgggcctcaagaagacttactgttcctccgcgcatctgaactggcacgcgctgaggggatcccaaggatatacgtcagtgctaattctggtgccaggatcggcctggctgaggagatcaggcacatgtttcacgtcgcttgggtggaccccgaggacccctataagggataccgatatttatacctcacaccacaggactataaaagagtttctgcactaaactctgttcactgtgagcacgtcgaggacgagggagagtctcgatataaaatcacagacattatcggaaaggaggagggaataggacccgaaaacctcaggggctccggcatgatagcaggcgagtccagtctagcttataatgaaatcatcacaatttctcttgtgacatgcagagctatcggcattggggcatacctggtgcggctgggacaaagaactatccaagtggagaactctcaccttatcctgaccggggcaggagccctgaataaggtgctgggcagggaggtatataccagcaataaccagctcgggggaatccagattatgcacaacaacggagtcacacactgtacggtgtgtgatgattttgaaggggtgttcacagtgctccattggctgtcctatatgcccaaatccgtgcactcgagcgttccgctgctgaactcgaaggacccaattgatcggattatcgaatttgtgcccactaaaactccgtatgaccccagatggatgctcgcaggcagaccccaccctacccagaaggggcagtggttatctggcttcttcgactacggttccttctccgaaatcatgcagccctgggcccagaccgtggtggtcggacgggcaaggttgggcggaatccctgttggcgtcgtggccgtggagactcggactgtcgaattgtccatcccagcagatcccgctaatctggactccgaggctaagatcatacagcaggctgggcaggtgtggtttccggattcagcctttaaaacctatcaggccatcaaagactttaatagagagggccttccactaatggtctttgccaactggcggggtttcagtggtggcatgaaggacatgtacgaccaggtcctcaaatttggggcttacattgtcgatgggctgcgggagtgctgtcagcccgtcctcgtttacatacctccacaagcggagttaagggggggtagttgggtcgtcatcgactcatcaattaatcctagacatatggaaatgtatgccgacagggaatctcggggatcagtcctggagccagaaggcacagtagaaatcaaattccggaggaaggacttggttaagacaatgcggagagtggaccctgtctatatacatttggccgaaaggctggggacacctgaactgtccaccgccgaacggaaggaattggagaataagctgaaggagcgcgaagagttcctcattcctatatatcaccaagtcgctgtgcaattcgcagatctccacgatacccccggacgaatgcaggaaaagggcgtcatctctgacattctagactggaaaacatctcgcacattcttttactggaggcttcgcaggttgctgctcgaagacttggtgaagaagaaaatccacaatgcaaatcccgagctaacagatggacagatccaagccatgctacgccgttggtttgtggaagtggaagggaccgtaaaggcatacgtgtgggacaataataaagacttagccgaatggctggaaaagcagctgaccgaagaggacggcgtccattccgtgattgaggaaaacatcaagtgtatttctagagactatgttctcaaacagatcaggtccttggtccaagctaatcctgaagtggctatggacagtatcatccacatgacacagcatatctcgccaacgcagagagctgaggtgattagaatcctctccactatggattctcctagtactta

SEQ ID NO: 27182 - DNA, 7151 bp, synthetic construct
  misc_feature 1..7151: note = Description of Artificial Sequence: Synthetic coding sequence
  source 1..7151: mol_type = other DNA
atgtggtggtccaccctgatgagcattctgcgagccagatctttctggaagtggatcagcacccagaccgtaagaatcatccgcgcagttcgggcacatttcggcggaatcatggacgagccatccccactggcccagccactggagctcaaccagcattccagatttattataggatcggttagtgaagacaatagcgaggatgagatatctaatctggtaaaattggatctcttggaagagaaagaaggatctctgagcccggctagcgtcggctctgatacgctctcggacctcggcatatcaagtttacaggatggcctggccttacatatcagatcctctatgagcggcctgcacctcgtcaagcagggcagggacaggaaaaagattgattcccagagagatttcacagtggcttctcccgcagaattcgtaactagatttgggggaaacaaggtaatcgagaaggtcctgattgctaataatggcatagcagcggttaaatgtatgcgaagtataagaagatggagctacgagatgttccggaacgaacgggcaattcggttcgtggtgatggtgactcccgaagacttaaaggcaaacgccgaatatatcaagatggcagaccactacgtgccggttcctgggggacctaataacaacaactatgccaacgtcgagttgatccttgacatcgccaagaggatcccggttcaagctgtgtgggccggatggggtcatgcgtccgaaaacccaaaactgcccgaacttctgctgaaaaacgggattgcatttatgggacctccatctcaagccatgtgggccctcggagacaaaattgccagctccattgtagctcaaacggcgggtatccctacgctgccgtggagtgggtctggacttcgtgtggactggcaagagaatgacttctcaaaaagaattcttaatgtaccacaggaactgtatgaaaaaggatacgtgaaggacgttgatgatggcctacaagctgcagaggaagtgggctaccccgtcatgatcaaggcaagcgagggcggtgggggaaagggcataaggaaggttaataatgcggacgactttcccaacttatttagacaagtgcaggcagaggtgccaggctcccccatttttgtcatgcggctcgcaaagcaatcccgccacctggaggtccagatcctcgcagaccagtacggcaacgcgatctctctcttcggtagggactgctcagttcaacgaaggcaccagaaaatcatagaggaggccccagccacaatagctacacccgctgtgttcgaacacatggagcagtgcgccgtcaaactagcaaaaatggtgggatacgtttcagccggaaccgtcgagtatttatattcccaagacggcagcttctactttctggaactgaatcccagactgcaggtcgagcatccctgcacagaaatggttgccgacgtcaaccttcccgctgctcaactgcagatcgccatgggcatccctctgtaccgcataaaagacattcgaatgatgtacggggtctccccttggggagattccccgattgattttgaggacagtgctcatgttccatgcccaagggggcatgtgattgcagctaggatcacatctgagaatcccgatgaggggttcaaaccatctagcggcaccgtacaggaactgaattttcgctccaacaaaaacgtgtggggctatttctcggtagccgcagcgggtggcctccacgagttcgctgacagccaattcggacactgcttctcatggggtgagaacagggaagaggccattagcaatatggttgtggccttgaaggaactgagcatcagaggcgatttcaggaccactgtagaatacctgatcaaactgctcgaaacggaatcttttcagatgaatcgtatagacacgggctggctcgaccgcctgatcgccgaaaaggtacaggcagagaggccggacacaatgcttggcgtggtgtgtggcgcactccatgtcgcagatgtgtcattacgaaattcggtcagtaatttcctgcacagtctagaacggggacaggttctgccagctcatacgttgttaaatacggtagatgtcgagttaatctatgagggagtcaagtatgtgctcaaagtcacacggcaaagtcctaattcctatgtagtcattatgaatggcagctgcgttgaggtggacgtacataggcttagtgatggaggtctgctgctcagttatgatggaagctcctataccacttatatgaaggaagaggtggataggtatcggataaccattggcaacaaaacgtgcgttttcgagaaagaaaatgatcccagcgtcatgcggtctccaagcgctggcaaacttatccagtacatcgtcgaggacgggggacacgtcttcgcgggacagtgctatgcagagatcgaagtgatgaagatggtcatgaccctcactgccgtggagagcggttgtatacactacgtgaagcgaccgggagctgcactggaccccggatgcgtcctggcaaagatgcagctggacaacccaagcaaagtgcagcaggccgagctgcacactggatcattaccaaggatccaaagcacagcactgagaggcgaaaaactgcatagagtattccactatgtcctagacaacctggtgaacgtcatgaatgggtattgtttgccagacccattcttcagctccaaggtgaaggattgggttgagcggctaatgaaaacactcagggatccgagtctgcccctcttagaattgcaggacatcatgacaagtgtgtccgggagaattccgccaaatgtcgagaagtctataaagaaggagatggcacagtatgcaagcaacattactagtgtgctgtgccaatttccttcacagcagatcgcgaatatactcgattctcatgcggcaaccctgaacagaaagtccgaacgagaggtgttttttatgaacacccagtctatcgtgcagctggtgcagagatatcggtctggcatccgtggacacatgaaagccgtcgttatggacttacttcgccagtacctgagagtggagacacaatttcagaacggtcattacgataaatgtgtgttcgctcttagggaggagaacaagtccgatatgaacacagtcctgaattatatattttcacacgcacaggtgactaagaagaatctgctggttacaatgctcatcgaccaattgtgcggcagggatccaacccttaccgatgagctgctcaacatcctaactgagctgacccagttgtcaaagaccactaatgccaaagtggctctcagggctaggcaggtgctgattgcgtcccatctgccaagctacgaactgagacacaaccaggtggagtctatttttctttccgcgatagacatgtatggccatcagttctgcattgagaacttgcagaagttgatcctgtctgaaacaagtattttcgatgtgcttccaaatttcttttaccactccaaccaggtcgttagaatggcagccctggaggtctatgtgagacgggcatatattgcttacgagctgaattcagtccagcatagacagttgaaggacaatacctgtgtagtagaatttcagttcatgctgcctacttctcaccccaatcgcggaaacattccaacgctgaaccggatgtctttttcctcaaatttaaaccattatgggatgacccacgtggcctccgtctccgacgtgctgctcgataatagctttacccctccctgtcagaggatgggcggtatggtgtccttccggacatttgaggactttgtccggatcttcgacgaagtgatggggtgcttttctgattcaccaccccaatctcccacctttcctgaagctgggcacacctcattatatgacgaagacaaggtccctagagacgagcctatccacatcctcaatgtcgccattaagacagattgtgatatcgaagatgaccggttggcagccatgtttcgggagttcacacagcaaaataaggccactcttgttgaccacggcattcggagactcacctttttggtggctcagaaagattttagaaaacaagtgaactacgaagttgatcggaggtttcaccgcgaatttccaaagttttttaccttcagggctagagataagttcgaagaagatcgcatataccgccacctggaaccggcactggcttttcagttggaacttaacaggatgcggaattttgatctgaccgcaatcccatgtgccaatcacaagatgcatttgtatttaggggctgcgaaggttgaggtgggaaccgaggtgactgattaccgcttctttgtgcgagctatcatccggcattctgacctggttaccaaggaagcatcctttgaatatctgcaaaatgaaggcgagcggctcctgctcgaggccatggatgaactggaggtggcttttaacaatacaaatgtccggaccgactgcaatcacatcttcctgaactttgtcccaacagttatcatggacccttccaagatcgaagagtccgtgcggtccatggtgatgcgttacgggtcacgactttggaagcttcgagtactgcaggcagaactgaaaatcaatatacgtctgaccccgacggggaaagcaatccctatacggctgttcttgacgaatgagagcggatactacctggacatcagtctctacaaggaggtgaccgacagccgcactgctcagattatgttccaggcttatggcgataagcagggccctctgcacggtatgctcatcaacacaccatatgtcactaaagaccttctgcagtccaagaggtttcaggcccagagcctgggcactacctatatctatgacattcccgaaatgttccggcagtcattgatcaagttgtgggagtctatgtccacacaggcctttttaccaagccctcctttgccaagtgatatgcttacatataccgagctggtccttgatgatcagggccagctagtgcacatgaacagactcccagggggaaacgagatcgggatggtggcgtggaagatgactttcaagtccccagagtacccagagggacgcgacattattgtcatcggcaacgacatcacttatcgaatcggcagtttcggaccacaggaagacctgttatttctccgtgcttctgagctcgcacgtgctgaaggaatccctcgcatatatgtgagcgctaatagtggagccagaatcgggttggccgaggaaattcgacacatgttccatgtcgcctgggtggatcctgaggatccgtacaagggctaccggtacctctacttgaccccccaggattacaaacgcgtgagcgccttaaattccgtccactgtgaacatgtggaggatgagggtgaaagtagatacaagattacagatataatcggaaaggaagagggtataggcccagaaaacctccgcggtagcggaatgattgctggggagagcagcctggcctataatgagatcatcacaatctcactagtaacctgccgtgccataggcataggagcctacctcgtccgtctgggacagcgcaccatccaggtggagaattcacacctgatcctcacaggggcaggggcacttaataaggtgctgggccgagaagtgtatacctcaaacaaccagctcggaggcatacagatcatgcataacaacggagtgacccactgcacggtttgcgacgattttgaaggggttttcacagtcctccactggctctcatacatgcctaaaagcgtccactcctcggttcccctgttaaactccaaggatcccatcgaccgaatcatcgaatttgtgcccaccaagacaccgtatgaccctaggtggatgttggcagggagaccgcaccccacacagaagggacagtggctcagcggattttttgattacgggagtttcagcgagatcatgcaaccatgggcgcagactgtcgttgtgggccgagcaagactgggcggtataccagttggagtggtggccgttgagacccggaccgtggaactgtccattccagccgacccagcgaatctggattctgaggctaagattatccagcaagcagggcaagtgtggtttcccgatagcgcgttcaagacctaccaggctataaaagactttaaccgggaaggccttccacttatggtttttgcaaactggaggggattctcagggggaatgaaagatatgtacgatcaggtccttaagtttggagcttatatcgtagatggtttgcgggagtgctgccaacccgtgttagtgtatatcccaccacaggccgagcttcggggagggagttgggtggtcatcgactcttctatcaaccctcgtcacatggaaatgtatgcggacagggagagtcggggttctgtgctcgaacctgaggggacggtagagattaaattcagaaggaaggaccttgtgaaaactatgagaagggttgatccggtgtacattcacctcgcagaacgactggggactcccgagctctccacagcagagagaaaagagctagagaacaaactgaaggaacgcgaagaatttctgattccaatctaccaccaggttgctgtccagtttgccgatctacatgacacacccggacgtatgcaagaaaaaggcgtgataagcgatattctggattggaagacctcccggacattcttttattggcggttacggcgactgctgctggaggacctggtgaagaaaaagattcataacgccaaccccgagctcacagatggacagattcaggctatgctcagacggtggttcgtggaagtagaggggaccgtcaaagcgtacgtctgggacaacaacaaagatctggcagagtggcttgagaagcaacttacggaggaagacggtgtccactctgtaattgaagaaaatatcaagtgtatttcccgggattatgtgctgaaacaaattcggagtctggtacaggcaaatcctgaagttgctatggattccataatccacatgacacaacacatcagccctacccagcgggcagaggttatacgcatactatcgacgatggactccccaagtactta

SEQ ID NO: 27183 - DNA, 6866 bp, synthetic construct
  misc_feature 1..6866: note = Description of Artificial Sequence: Synthetic coding sequence
  source 1..6866: mol_type = other DNA
atggaggggtccccagaggagaacaaggagatgagatattatatgcttcagaggagctctatgtctggcctgcatctggtaaagcaggggcgagatcggaagaagattgactctcagagagatttcaccgtggccagcccagcagaattcgtgaccaggtttggcggtaacaaggtgattgagaaagtgctgattgcgaataatggtatcgcagcggtcaagtgcatgcgatctattagacgctggtcttatgagatgttccggaatgagcgcgctatacgattcgtggttatggtgacacctgaggatctgaaagcgaacgccgagtatattaagatggcagatcactacgtccctgttcctggaggtcccaataataacaactatgccaacgtagaattgatcctcgacatcgccaagagaattcccgtgcaagccgtttgggctggatggggtcacgcgtccgaaaatcctaaattgccagaactgcttctgaagaacggcattgccttcatgggaccaccatcccaggcaatgtgggctctgggagacaaaatcgccagcagtattgtggcccagaccgcgggaattcccaccctaccctggagcggatccggcttgagagtggattggcaggagaacgattttagcaaaagaatcctgaatgtgccgcaggaactttatgagaagggctacgtgaaggacgtcgatgacggtctgcaagcggctgaggaagtcggctatccagttatgattaaggcgtctgaaggtgggggagggaaggggatacgcaaggtcaacaacgcagacgactttcctaatttatttcggcaagtacaggctgaggtccccggaagccccatcttcgttatgcggttggctaagcagagccgtcacctcgaggtgcagatccttgcagatcaatatggcaacgctatcagcctgtttggaagggattgttccgtccaacgacgacatcaaaagattatcgaggaagctcctgcgaccattgcaaccccggcagtgttcgaacacatggaacagtgtgctgttaagctcgctaagatggtaggctacgtttcagctgggaccgtggaatatctgtactcacaggacgggagtttctatttccttgaacttaaccctcggctgcaggtggaacatccctgtactgagatggtggctgatgtcaatctgccggctgctcagctgcagatcgccatgggaattccactgtatcggataaaggatatccggatgatgtatggagtttcaccctggggggacagcccaatagatttcgaggactccgcccacgtcccctgtccgaggggccatgtcatcgccgctagaattactagcgagaacccagacgagggctttaaaccctcttcagggaccgtgcaggaactaaattttcgctctaacaaaaatgtctggggctatttttccgtggccgctgctggcggtcttcatgagtttgcagacagtcagtttggtcattgcttctcgtggggggagaacagagaagaggcaatttcaaacatggtggtggcgcttaaagaactcagcatcaggggtgactttcgaactaccgtcgaatacctaatcaagttgcttgaaacagagagtttccagatgaataggatcgacacgggatggctcgaccgcttgattgccgaaaaagtgcaggctgaacgacccgacacaatgctgggcgtggtgtgtggagccttacatgtcgcggacgtgtctttgagaaacagtgtgagcaactttttacacagcttggaaagggggcaggtcctgccagcccataccctgctgaacaccgtcgacgtggagctgatttatgagggcgtaaagtatgtcttaaaggtgacacggcagagccctaactcctatgtagtgatcatgaatggaagttgcgtggaggtcgatgtacatcgattgagcgacggcggactcctgctgtcctatgatggttcttcctacaccacatatatgaaggaagaagtcgaccgatatcggattactattggaaacaagacatgcgtgtttgagaaagaaaatgacccctccgtaatgagaagcccaagcgccggaaaattgattcagtatatagtcgaggacggcggacatgtgtttgcagggcagtgctatgcagagattgaggtaatgaaaatggtcatgactctcaccgcagtcgaatccggctgtattcactacgtgaaaaggccaggagctgctttagaccctggctgtgtactcgccaagatgcagctggataacccctctaaggtccaacaagctgaattgcacactggttccttgcctagaatacagagcaccgcgctacgaggggagaaactgcacagggtctttcactatgtcttggataatctagtgaacgtgatgaatggctattgtctgccagatccttttttctcctctaaagtaaaagattgggtggagagacttatgaagacactccgagatcctagcttacccttgctggagctgcaagatatcatgacttcagtgtctgggaggatacccccaaatgtggaaaaatctattaaaaaagagatggcacagtatgcatctaatattacatccgtactctgtcagttccccagtcagcagattgcaaatattctcgactcacacgccgcaaccttgaatcggaagtcagaacgcgaggtgttcttcatgaacacacaatccatcgtgcagcttgtgcagagatacagaagcgggattcgcggacacatgaaggccgtggttatggacctgctccggcagtaccttcgggtggaaacgcagttccaaaacggtcactatgataagtgtgtatttgcacttagagaggaaaataaatccgatatgaataccgtgctgaattatatcttctcccacgctcaggtcacaaagaaaaacctgcttgttaccatgctgatcgaccaattatgtggccgagatcctaccctcactgatgagctcctgaacatcctcacagagctgacacagttgagtaaaacaacgaacgcaaaagtagcattgcgagccaggcaggtcctaattgcatcgcatttgcccagctatgaactgcgccataatcaggtcgaaagtattttcctcagcgccatagacatgtacggacatcagttctgcatcgagaatctccagaaactgattttgtcagagacctctatctttgacgttctgccaaacttcttttaccactccaaccaggtagtgaggatggccgctcttgaggtgtacgtccgaagggcatatattgcatacgagttgaacagtgtgcaacaccggcagctcaaagataatacatgcgtcgtcgaatttcagttcatgctcccgactagccatccaaacagaggcaacatcccgactctcaatcgaatgagtttttcaagcaaccttaatcactacggaatgacacatgtggcaagcgtctccgacgtcttgctggacaattctttcaccccaccttgtcaacgaatgggcggaatggtgtctttccgcactttcgaagacttcgttcgcatctttgacgaggtcatggggtgtttctcagatagccccccacaaagcccgacgtttccggaagccggacatacctcactatacgacgaggacaaagtgcctagggacgaaccaattcacatcttgaacgtggctatcaaaaccgactgtgatatcgaggacgatcgtctcgcagccatgtttcgcgaatttacacaacagaataaggcgaccctcgtcgaccacgggatccggaggctgacctttctggtggcacagaaagatttcaggaagcaagtcaactatgaagtggaccgtaggtttcaccgggaatttccgaaattttttacatttcgagcaagggacaagtttgaagaagacaggatttaccgccaccttgaaccagctctcgcttttcaactggagctcaatagaatgcgcaattttgacctcacagctatcccctgtgctaatcacaagatgcacctttatctgggagccgctaaagtggaggtggggacagaagtcaccgattaccggttctttgtgcgggctatcattaggcactctgacctggtgaccaaggaagcctcttttgaatatctgcagaacgaaggagagaggctgctgctcgaggcaatggatgaactggaggtagctttcaataacaccaatgttcgcactgactgtaaccacatttttttgaacttcgtgcccactgtaatcatggaccctagcaaaattgaagaatctgtacgctcgatggtaatgcgctacgggagcaggctttggaagctgcgagtcctgcaggccgagttaaagattaatattcgcctcacaccaacaggtaaagcgatacctatccgactgtttctcacaaatgagtcaggatactacttggacatctccctttataaagaagtcactgacagccggaccgcccagataatgtttcaagcatacggcgacaagcaaggacctctccatggtatgcttatcaacaccccctacgtcactaaggatcttctgcagtctaagcgttttcaagctcagtctctagggacaacctacatttacgatatacctgaaatgtttaggcagagcctcatcaagctttgggaaagtatgtctactcaagccttcctgccctcccccccactgccttccgacatgcttacttacacagagctggtgctggatgaccaagggcagttggtgcacatgaaccgcttaccagggggtaatgaaatcggaatggtagcatggaagatgacattcaagagccctgaatacccggaggggagagacattatcgtcatcggcaacgacataacttatcggatagggtcttttggtccccaggaggacctgttattcctgcgcgcttctgaattggctcgtgcagaaggcattcccaggatttatgtgtccgccaattccggtgccaggatcggcttagcagaggagattcgccatatgttccatgtggcttgggtggaccccgaggatccctacaagggatatcgctatctgtacttaacacctcaggattataaacgggtgtcagcccttaactcggtacactgcgaacacgtcgaagacgagggtgagagccggtacaagattaccgacattatcggcaaggaagagggaatagggccagaaaacctccggggatccgggatgattgccggagagagttccctggcgtacaacgagataatcaccatcagtttggtgacatgtcgggcaattgggataggtgcgtacttagtgaggttaggccagagaactatccaggttgagaactctcacctaatcttgactggagctggcgctctgaataaagtgctgggtagggaggtttacacatccaacaatcaacttggaggtattcagatcatgcacaataacggagtgactcactgcacagtttgtgatgactttgaaggcgtttttactgtgcttcactggctgtcctacatgcccaaatccgtgcactcatctgtccctctacttaactccaaggatcctatcgaccgcattatagagtttgttccaactaaaaccccctacgaccctaggtggatgctggctggacggcctcaccctactcaaaaggggcagtggctgtcaggctttttcgattacgggagtttcagtgaaattatgcagccttgggcccagaccgtcgtcgtgggcagagcgaggttggggggtataccagtcggcgtggtggccgtggagacaaggactgtggagctctccatacccgcagatccagccaacctagactccgaagctaagattatccaacaagctggacaggtctggtttcctgactcggctttcaagacatatcaggcgattaaagattttaaccgagaagggctccccctgatggtctttgccaactggagggggttctcaggcggaatgaaggacatgtacgatcaagtgttgaaattcggggcttacattgtggacggcctgagggagtgctgtcagcccgtgttggtttatattccacctcaggccgaactccggggagggagctgggtggtcattgattcatctatcaaccccagacacatggagatgtacgcagatagagagagccgcggatcagtgctagaaccagaggggactgtcgagatcaagttcaggagaaaagacctggtcaaaactatgagacgcgttgaccccgtttatatccacttggccgaaagactggggacccccgaactgagcacggctgaacgtaaggagctggagaataagctgaaggagcgcgaggagtttctcattccaatctatcaccaggtcgccgtccagttcgcagatctgcacgacactcctggacgcatgcaggaaaagggggttattagtgatatcttggattggaaaacgagcagaaccttcttttattggcggctgcggcgactgctgttggaggacctcgtcaagaaaaagattcacaatgctaaccctgagctaaccgatgggcagattcaggccatgctgcgtcgctggttcgttgaggtagagggaactgtcaaggcttatgtctgggacaacaacaaggacctggcagaatggttggagaagcaactcacagaggaggatggagttcactcagtaatagaggaaaacatcaaatgtatctcaagagattacgtgttgaagcagatcaggtctttagtgcaggctaaccctgaggtcgccatggatagtatcatccatatgacacagcacatcagtcccacacagagagcagaggtcatcaggatactgtctacgatggattccccttccaccta

SEQ ID NO: 27184 - DNA, 1419 bp, synthetic construct
  misc_feature 1..1419: note = Description of Artificial Sequence: Synthetic coding sequence
  source 1..1419: mol_type = other DNA
atgcacaataacggtgtgactcactgtaccgtgtgtgatgatttcgagggggtgttcaccgtcctccactggctgtcttatatgcccaaatcggtgcactccagcgtgcctctcctgaatagcaaggaccctattgatcgtataatcgagttcgtgcccacaaaaaccccatatgaccccaggtggatgttagctggtcgcccacaccccacccagaaaggtcagtggctcagcgggtttttcgattacggatcctttagtgaaataatgcagccctgggctcaaacagtggttgtaggacgggcaaggttaggcggaattccggtgggtgtcgttgcagtcgaaacaagaacagttgaactgagcattccagccgatccagcgaatctggatagcgaggccaagatcattcagcaggccggtcaggtctggtttcccgatagtgcttttaaaacatatcaggccataaaggacttcaatagagaaggtctcccactgatggttttcgcaaattggcggggatttagcgggggaatgaaggacatgtatgatcaggtgctcaagttcggcgcttacatcgtggacggtctcagagagtgttgtcagcctgtgttggtttacataccacctcaggccgaactgaggggcggtagctgggttgtgattgattcttcaatcaatcccaggcacatggaaatgtacgccgatcgcgagtcccgaggatctgtgctggagccagagggtaccgttgaaattaaatttcgtcgtaaggacttagtcaaaaccatgcggagagtggacccagtgtatatccatttagcagagcgcctgggaacacctgagctcagtaccgctgagcgaaaggaactggagaacaaactcaaagaacgagaggaatttctcattccaatctatcaccaagtggcagtccagtttgcggatctgcatgacactcccggtcggatgcaagaaaaaggcgtgatctctgacatccttgactggaagacaagccggacttttttttactggcggctccgcaggctgttgttagaagacctggttaaaaagaagatccataacgcgaatcctgagctgactgatgggcagatccaagccatgctccggcgatggtttgttgaagtggaaggaacagtcaaagcctacgtgtgggataataacaaagacctagctgagtggctggaaaaacaactgaccgaggaggatggggtgcattctgtgatcgaggaaaatattaagtgcatctccagggattatgttttaaagcaaatcaggtcgctggtgcaagcgaaccctgaagtggcaatggattccattatacacatgacacaacacattagcccaactcagagagctgaggtgattcggatcttaagcactatggattccccatccacctag

SEQ ID NO: 27185 - DNA, 129 bp, synthetic construct
  misc_feature 1..129: note = Description of Artificial Sequence: Synthetic coding sequence
  source 1..129: mol_type = other DNA
atgtccggtctgcacctcgtgaagcagggtagagaccggaagaagatagacagtcagcgcgacttcacagtggcttcccctgccgagttcgtgactagatttggcggaaataaggttattgaaaaatag

SEQ ID NO: 27186 - DNA, 7040 bp, synthetic construct
  misc_feature 1..7040: note = Description of Artificial Sequence: Synthetic coding sequence
  source 1..7040: mol_type = other DNA
atggatgaaccctccccacttgcccaaccgcttgaactcaaccagcacagtcgatttattataggaagcgtcagtgaggacaactcagaggacgagatcagcaacctggtcaagctggatttattagaggaaaaggaggggtcactttcgcctgcaagcgtgggtagcgatacattgtctgacctggggattagctctctccaggatgggcttgccctacatatccggagctccatgagtggcctccatctcgtgaaacagggcagagataggaagaagattgacagtcagcgagactttaccgtggcgtcacccgctgagttcgtgacccgatttgggggtaataaagttatcgagaaggtgctgattgcaaataatggcattgccgctgtcaagtgtatgcgctcaatccgtcgctggtcttacgaaatgttccggaatgaacgagcgatacgttttgtggttatggtgactcccgaggacctgaaagccaacgcagagtacattaagatggctgaccactacgtcccagtgccaggcggtcctaacaacaataattatgccaatgtggagctcattctggatattgctaagagaatcccggttcaggcggtatgggccggatgggggcacgctagcgagaatccgaaactccctgagctgttactaaaaaacggcatcgcctttatgggcccaccaagccaagctatgtgggccctgggagataagatcgccagctctatcgtcgcccagaccgccggaatccctaccctgccttggtctggaagcggcctgagggttgattggcaagagaacgacttttcaaagcggatactcaatgtaccacaggagctatacgaaaagggatacgtaaaggacgtcgacgacggactccaagccgctgaggaagtcggataccctgtgatgattaaagccagcgaaggaggcggtggcaaggggataaggaaggtgaataatgccgatgactttccaaatctctttaggcaggtgcaggctgaggttcctgggtccccaatctttgttatgagattagccaagcaatcgcggcaccttgaagtacaaatcctcgctgaccaatatggaaatgccataagcctgtttggaagagattgttctgtccaacggaggcatcagaagattatcgaggaggctcccgctacaatcgcgactccagcagtgttcgaacacatggagcagtgtgccgtgaagctagccaagatggtgggatatgtatcggccggtaccgtggagtatttgtattctcaggacggaagtttttactttctggagctgaatcctaggttgcaagtagagcatccatgcaccgagatggtggctgatgtgaacttgcccgcagcgcagttgcagatcgctatgggtatccccctttacagaatcaaagatattagaatgatgtatggtgttagtccgtggggagactcacctatcgattttgaagatagcgctcacgttccctgtcccaggggacacgttatcgccgcacgcattacctccgaaaatcctgacgaagggttcaagccttcttccggcaccgttcaggaactgaatttcagatctaacaagaatgtgtggggatacttcagcgttgcggcagccggtggcctacacgagtttgctgatagccagttcggccactgctttagttggggggagaatagggaggaggccatttcgaatatggtcgtggcactgaaggaactgagtatcagaggcgattttcggaccaccgtggaatacttgatcaaactgctcgagaccgagagtttccaaatgaatcgcatcgatacaggatggctagaccgtcttattgccgagaaagttcaagccgaacggcctgataccatgctgggagttgtgtgcggcgctctgcatgttgccgacgtaagtctgcgcaacagtgtctccaacttcctgcacagcctggagaggggacaggtactgcctgcacatacactgcttaataccgttgatgtcgagttgatctatgagggtgttaaatatgtcttgaaagtgactcggcaaagcccaaatagctatgttgtgataatgaacggctcatgcgtggaagtggacgttcacaggctttctgatggaggtttgctgctcagttacgacggctcctcatacacaacatacatgaaagaagaagtggatcgttataggatcacgatcggaaacaagacatgcgtctttgagaaagaaaatgatccaagcgtcatgagaagccccagtgccggaaagctcatccaatatattgtggaagatggagggcacgtgtttgcagggcagtgctatgcagagatagaggtcatgaaaatggtgatgaccctcaccgccgtagagtccggctgcattcactacgtgaaacgaccaggcgctgctctcgatccagggtgcgtgttagctaagatgcagcttgacaacccgagcaaggtgcagcaggccgagctgcacacggggtccctgcctaggatacaatctacagccctgcgtggcgagaaactccacagagtgtttcactatgtgttggataacctggtgaacgtgatgaacgggtactgtcttcccgatccattcttctcttctaaggtgaaagactgggtagagcggctcatgaagactctccgcgatccaagccttccactgcttgaactgcaggacatcatgacttccgtctccggccgaattcctcctaatgtggaaaagtctatcaagaaagagatggcacagtatgcaagtaatattacctctgtcctctgtcagttcccgtcccagcagattgcaaacatcctcgacagtcatgccgcaactctgaatcggaaaagcgaaagagaggttttttttatgaacacacagagtatagtccagctggtacagcgttaccgatctggaattcgtggacacatgaaagctgtggtgatggacttgctcagacagtatctgcgcgtcgagacccagttccagaatggccactacgacaaatgcgtcttcgccctgcgcgaggaaaacaagtcagacatgaacacagtattgaactacatcttctctcacgcacaggtcactaagaagaatctcctagtgacaatgttgatcgatcagctgtgtggaagagaccccaccctcactgacgagctcctgaatattctgaccgagctgacccagctctcaaagaccaccaacgctaaggtcgcccttcgcgcaagacaggtcttgatcgcttctcatctaccttcgtatgagctgagacataaccaggtggaatctatattcctgagtgcgatcgatatgtatggtcatcagttttgtatcgagaaccttcaaaaactgattctgagcgagacttcaatcttcgatgtgctgcctaacttcttttaccattccaaccaggtggtccggatggctgcactcgaggtgtacgtccgacgcgcttacattgcctacgaactcaacagcgttcagcaccgtcaacttaaggataatacttgcgttgttgaatttcagttcatgctgccaaccagtcaccctaatcgcggaaatataccaaccctgaatcgcatgagtttctcctcgaatttaaatcattatggtatgacacatgtggcctccgtttccgacgtccttcttgataactcctttaccccgccttgccagcgtatgggtggcatggtgtcctttagaaccttcgaagactttgtcaggatcttcgacgaagtcatgggctgtttttccgattcacccccacaaagtcctacttttcccgaagccggtcacacgtcattgtatgatgaggataaggtgccccgagatgaacccatccacatcctgaacgttgccatcaagaccgattgcgacatcgaggacgatcgactggctgcaatgtttcgcgagttcactcaacagaacaaggcaacactcgtcgaccatgggatcaggaggctgacctttcttgtggctcagaaagatttcagaaaacaggttaattatgaggtggaccgaagattccacagagagttccccaagttttttaccttccgcgctcgggataagtttgaagaggatcgaatatacagacacctggaacccgcacttgcctttcaattggagctgaatcgaatgagaaatttcgatcttacagccatcccgtgcgccaaccataagatgcacctctacctgggtgctgcaaaggtagaggtgggtacagaagtgacagattatcgctttttcgtgagagctatcataaggcactcagacctggtgactaaagaagcttccttcgagtatctgcagaatgagggagagcgattactgctggaggctatggatgagctggaggtcgccttcaacaacaccaatgtcagaaccgattgcaatcatatttttcttaattttgtaccaactgttatcatggacccttccaaaatagaagagtctgtgagatccatggtaatgagatacgggtccaggctgtggaaattgcgtgtgttgcaagctgagctcaaaatcaatattcggctgacaccaactggcaaggcgatccctatcagactttttttgaccaacgaatcagggtactacctcgacatctcattgtacaaggaggtaacagactctcgtactgcacagataatgttccaggcttacggtgataagcaaggaccactccacggcatgctgataaataccccctacgtgaccaaagacctgcttcagtcaaaacggttccaagcccagagtctaggaactacctacatctacgatattcctgaaatgtttagacagtctttgattaaactctgggaatctatgagcactcaggcgtttcttccctcccctccactgccctcagacatgttgacttacactgaactggtgctggatgatcagggtcagcttgtgcacatgaatcggcttcccggtggcaacgagatcggtatggtagcatggaagatgaccttcaagtctcccgaatacccggaaggaagggatatcatagtaatcggtaatgatatcacgtatagaatcggctcctttgggccacaagaggatctactgttcttgcgtgcttccgagctggcgagagcagaagggattccgaggatttatgtcagtgccaacagtggtgcccgaatcggcctcgccgaggagatcagacacatgttccacgtcgcatgggtggatcccgaagatccttataaaggttataggtatttgtatttgaccccccaagactacaagcgagtgagtgcacttaactccgtccattgcgagcacgttgaggatgaaggcgagtcccgatataagatcactgatatcattggaaaagaggagggcattggcccagagaacctacgaggttctggcatgattgccggagagagcagccttgcatataacgaaattataaccataagtctggttacttgcagagcaatcggaattggtgcctatctggttcgcctggggcagcgaactatacaggtcgaaaactctcatctcatcctaaccggcgctggtgccctgaacaaagttttggggagagaggtctacacaagcaacaaccaattggggggtattcagattatgcacaacaacggcgttactcattgcacggtctgtgacgacttcgaaggggtctttactgttctgcactggctaagttatatgcccaagagcgtccatagttctgtgccgctgctcaattcaaaggaccccatcgataggattatagaatttgtccccacaaagacgccctacgacccgagatggatgcttgccggtcgaccccaccctacgcaaaagggccaatggttgagcggcttcttcgattacggcagtttttctgaaataatgcagccttgggctcagacagtggtggtaggccgagcccgtctgggcggaatacccgtgggcgtcgtggcagtggaaaccaggaccgtcgaactctccatcccagcggatccagctaacctggactcggaggcgaagattattcagcaggcgggacaggtgtggttccccgatagcgcgttcaagacctaccaggccatcaaagattttaaccgcgagggtttgcccctgatggtgtttgcgaactggcggggattttcgggcggaatgaaggatatgtacgaccaggtcctcaagtttggagcttacattgttgacggactgagagagtgttgccagccagtgcttgtgtacatcccgcctcaagccgaactgcgcggagggtcttgggtggtgattgatagctctatcaatcccaggcacatggagatgtatgcagatagggaatccagagggtccgtgttggagcctgaagggactgtagaaataaaattccggagaaaggacttagttaagacgatgcgcagggtggaccctgtctatatacaccttgccgagcggctcggaacacctgagcttagtacagcagaaagaaaggagttggaaaacaaacttaaagaacgggaggagttccttatccctatataccaccaggtggccgtgcagtttgctgacttgcatgacacacccggtcgcatgcaggaaaagggggtgatatccgacattctcgattggaagacatcacgaaccttcttctattggcggctacgccgtctacttctggaggatctcgtgaaaaagaaaattcataatgcaaatcctgaactgaccgacggacagattcaggctatgctgcggaggtggtttgtcgaggtggaaggcacagtcaaggcctatgtctgggataacaacaaggatctggccgagtggttagaaaagcaattaacagaggaagatggcgtgcattccgtaatcgaagaaaatataaaatgcatatcccgggattacgtgctgaagcaaatcaggagcctggtgcaggccaacccagaggttgccatggactctatcatccacatgacccagcacatttcacccacccaaagggccgaagtgatccggatactgtctacaatggacagcccaagcacata

SEQ ID NO: 27187 - DNA, 129 bp, synthetic construct
  misc_feature 1..129: note = Description of Artificial Sequence: Synthetic coding sequence
  source 1..129: mol_type = other DNA
atgagtgggctccatctagtcaagcagggcagagacagaaagaagatcgacagccagcgagactttacagtggcttcacctgcagaatttgttacccggttcgggggtaacaaggtcatagaaaaatag

SEQ ID NO: 27188 - DNA, 234 bp, synthetic construct
  misc_feature 1..234: note = Description of Artificial Sequence: Synthetic coding sequence
  source 1..234: mol_type = other DNA
atggatgagcctagtcctctggctcagccacttgagctgaaccaacactctagatttattattgggagtgtgtctgaggacaacagcgaggatgagatctccaatctggttaaactcgacctgctggaagagaaagagggaagcctgtccccagcgtctgtgggctccgatactttgtcggacctcggtatcagcagtcttcaggatgggctggcactgcacatcagactctag

SEQ ID NO: 27189 - DNA, 3138 bp, synthetic construct
  misc_feature 1..3138: note = Description of Artificial Sequence: Synthetic coding sequence
  source 1..3138: mol_type = other DNA
atgggctgttttagcgacagtccaccacagtctcccacattccccgaggcgggacacacgagtctgtatgacgaggacaaagtccccagggacgaaccaatccatattttaaatgtagctattaagaccgattgtgatattgaagatgatcgactggccgcaatgttccgcgaattcacccaacagaacaaggcaaccctcgttgatcatggaatccggagactgacctttcttgttgctcagaaggatttcagaaaacaagtcaactacgaggtcgatcggagattccatagggagttcccgaaattctttactttccgggctcgcgacaagtttgaagaggacaggatctatcggcatctggagcctgcccttgctttccagctggagctgaacaggatgaggaattttgatctgaccgccataccatgtgcaaaccataaaatgcacctatatctcggtgcggcaaaagtcgaagttggaactgaggtgacagattatagattttttgttcgggcaattatcagacattcagatctggtgactaaagaggcgagctttgaatatttgcagaatgagggggagcgattacttcttgaggcaatggatgagctggaggtggctttcaataatactaatgttcggactgactgcaatcacatctttctcaactttgtgcccacggtgatcatggatccatcaaaaatcgaggagtctgtaagatctatggtgatgcggtatggatcacgtttgtggaaattgcgtgtcctccaggctgagctgaagatcaatattcggctcacccctaccgggaaggctataccaatacggcttttcttgacgaacgagtccggctactatctcgacatcagtctatacaaagaagttacagacagccgcacagctcagattatgtttcaggcttacggagataagcaaggacccttgcacggcatgctcattaatactccttacgttactaaggatcttctacagtccaagcgttttcaggcccagagccttggcactacttatatttacgacatacctgagatgtttaggcagattggaatggtggcctggaagatgaccttcaagtccccagagtacccggaaggaagagatataatagtcataggtaacgatataacatacagaatagggtcatttggccctcaggaggacctcctctttctgcgggctagtgaattggctagagccgaagggatacctcgcatctacgtcagcgcaaatagtggcgcaaggatcggccttgccgaggaaataaggcatatgttccatgtagcttgggtcgatcccgaagacccatataaaggatataggtatctatacctgactccccaagactacaagcgggtctccgctctgaatagtgtccattgcgagcacgtggaggatgaaggcgaaagtaggtacaagattacagatatcattggtaaagaagagggaatcggccctgagaaccttcgtggcagtggaatgattgccggagagtcatcattggcatacaatgagatcattactatttcattagtaacctgtcgcgcaatcggcatcggagcctatctggtgagattggggcagcgaacaatacaggtcgaaaactcgcatctgattctgactggggcaggcgctctaaacaaagttctgggcagagaggtgtacacttcaaacaaccaactaggaggaatacagataatgcacaataacggtgtcacccattgcaccgtctgcgacgatttcgaaggcgttttcaccgtgcttcattggctgagttacatgcccaagtctgtgcattctagcgtgccccttctgaattcaaaagaccccattgaccggattattgagtttgtcccaaccaagaccccgtacgatccaaggtggatgttggctggcagaccgcaccccacccagaaggggcagtggctcagcggattttttgactatgggagcttcagtgaaatcatgcagccatgggctcagactgtggtagttggacgcgctaggttggggggtatccccgttggggtggtggccgtggaaacgaggactgtggagctgtccattcctgcagaccctgccaacctcgattcagaagctaaaatcattcaacaggcaggtcaagtgtggtttcctgactcagcttttaaaacctatcaggcaattaaggatttcaatagggagggacttccgctgatggtgtttgcaaattggcgcggttttagtggcggaatgaaggacatgtacgaccaggtgttaaagtttggggcatacattgtggatggcctcagggagtgttgccagcccgtgttggtctacatccccccacaagccgagctgagaggtggctcatgggtcgtcattgacagtagtatcaatccacgccatatggagatgtatgccgatcgtgagtctcggggatccgtcctagagcccgaggggacagtagaaatcaaatttcgcagaaaagacctggtcaagacaatgcgcagagtcgaccccgtctacatccatctggctgaaagactcgggacccccgagcttagcacggctgagagaaaagaactggagaacaagctgaaggagagagaggagttcctgattcctatataccaccaggtagccgtgcagtttgctgacctgcatgatacacccggaagaatgcaggaaaaaggagtcataagcgacatactagattggaagacttccagaacctttttctactggagactccggagactgttgctggaagatctcgtgaaaaagaagattcacaatgctaatcccgagttgacagacggtcaaatccaggcgatgctgagacgatggttcgtcgaagttgaaggcacagtcaaagcttatgtctgggacaacaacaaagacctggccgaatggctggagaaacagcttacagaagaggacggggtgcattctgtgatcgaagagaacataaagtgcatatcgcgcgactacgtactgaaacagatcaggtcactggtccaggccaaccccgaggtcgcgatggatagcataattcacatgacacaacacatttcccctacccagcgtgctgaagtcatccgcattctctcaacaatggactcccctagtacctag

SEQ ID NO: 27190 - DNA, 363 bp, synthetic construct
  misc_feature 1..363: note = Description of Artificial Sequence: Synthetic coding sequence
  source 1..363: mol_type = other DNA
atggatgagcccagccctctcgctcagcccttggagttaaaccagcattccagatttatcattggatccgtgtctgaggacaattctgaggatgagatttccaacctggttaagctggatctactcgaagaaaaggaagggagcctgagccccgctagcgtcggaagcgacaccctgagcgatctcggaatcagttctttacaggacggcctggcacttcacatcaggtccagcatgtccggattacacctggtgaagcaggggcgagatagaaagaagatagacagccagcgagattttacagtcgcatctcctgcagaatttgttactagattcggaggtaacaaagtgattgagaaatag

SEQ ID NO: 27191 - DNA, 7112 bp, synthetic construct
  misc_feature 1..7112: note = Description of Artificial Sequence: Synthetic coding sequence
  source 1..7112: mol_type = other DNA
tccttttggaaatggatctccacccagacagtgcgtattattagggctgtcagggcccacttcggtggcatcatggatgagccctcacccctggcccaacccctggagctcaaccaacacagcaggttcataatcgggtcagtgagtgaggacaattctgaagacgagatctcaaatctggttaagctggacctcttagaagagaaggagggcagtcttagccctgccagtgtaggctctgataccctcagcgacttgggaatcagcagtctgcaggacggcctggcccttcacatcaggtccagcatgagcgggctacacctggtgaaacaagggagggaccgcaagaaaattgacagccaacgagattttacggtggcgagtcccgctgagtttgtgactcggtttggcggaaataaggtgatagagaaagtcctgatcgctaacaacgggatcgctgcagtgaagtgtatgcgcagcataagacgctggtcgtacgagatgttccggaatgagcgcgctatccggttcgtggtgatggttacccctgaggacctaaaggcaaacgcggagtatatcaagatggcagaccactacgtcccagtgcccggagggcctaacaacaataattatgccaatgtcgagctcatccttgacattgcaaagcggatccctgtgcaggccgtatgggccggttggggccatgcttctgaaaatccaaaattgcccgagctgctcctgaaaaacggcattgccttcatgggccctcccagtcaggcaatgtgggcattaggtgacaaaatcgcgagttctatcgtcgcccagaccgctggcattcctactttgccatggtccgggagcggcttgagggttgattggcaggagaatgacttcagcaagcgaattctaaacgtgccgcaggaactgtatgaaaagggttacgtgaaagacgtggacgacggactgcaggctgcagaggaggtgggatacccagtaatgattaaggcatctgaggggggaggcggaaaaggaataaggaaggtaaacaacgccgacgacttccctaacttgttccgccaggtccaggcagaagtccctggcagtccgatcttcgtgatgaggctcgcaaaacagtctcggcacctcgaggtccagattttggccgaccagtacggcaacgcaatctccctgtttggcagagattgctctgtgcagcgacgacatcaaaagatcatagaggaagccccagctactatagccacccccgcagtgtttgaacacatggagcagtgtgccgttaaactcgctaagatggtggggtacgtgtccgccggtaccgtcgaatacctttactcccaggacggctcattttattttctggagctcaacccgaggctccaggtagaacacccttgtacagaaatggtggccgatgttaatttgcccgctgcccagttgcagatcgccatggggatccccctatatcgtattaaagatatcaggatgatgtatggggtgtcgccctggggggattcaccaattgactttgaggattctgcccatgtgccatgtcccagaggccacgtcatcgcagctcgcatcacttccgaaaaccccgatgaaggcttcaagcctagttccggaacagtgcaagaactgaacttccgtagcaacaagaatgtctggggctatttctcagttgccgctgcaggaggcttgcacgaattcgctgatagtcaatttggccattgcttcagctggggcgagaacagggaggaagctatcagcaacatggtggtggcgctgaaagaactctccatcagaggggacttccggaccactgttgagtatctgattaaacttttggagacagaaagcttccaaatgaaccgaatcgacaccgggtggctggaccgcttgatagcggaaaaggttcaggcagagcgccctgatactatgctgggtgtcgtgtgcggagccctgcacgttgcggacgtttccctgcggaactctgtgtccaacttcctccactccctcgaacgtggacaagtattgccagcccacactctgctcaacaccgtggacgtcgaactcatttacgagggagttaagtacgtcttgaaagtgacccgacagagtcccaattcttacgtagtaatcatgaacgggtcttgcgtcgaggttgatgtccacaggctgtctgatgggggactgctgctgtcttatgatggtagtagctataccacatacatgaaagaagaggtagatcgttatcgcatcacaataggcaacaaaacctgcgtcttcgagaaagagaacgatccttccgtaatgagatccccgtccgccggaaaattaatacagtatatcgtcgaagatggtggacacgtgttcgccggtcagtgttacgccgagatagaggtcatgaagatggttatgaccttaacagccgtcgaatcggggtgcattcactatgtcaagcgccctggagccgctctcgatcccggatgcgtcctggccaagatgcagctggataatcccagtaaggtgcagcaggcagaactgcataccggctctttgcccaggatccaaagcacagccctgaggggcgagaaactccacagagtattccactatgtgctggacaacctggttaacgtcatgaacggctactgtctgccggatccttttttttcctctaaggtgaaagactgggtagagagactgatgaaaacccttcgcgatccctctctccccctgctggagctgcaggacatcatgacgtccgtgagtggacgcatccccccaaacgtcgagaaaagtatcaaaaaggagatggcccagtacgcctcgaatattacctctgttctctgtcagtttcctagtcaacaaatagccaacatcttggatagccacgccgcaacgctgaaccggaagtcagagagggaagtattttttatgaatacccaatcaatcgttcaactggtgcagagatacaggtctggcatccgaggccacatgaaggctgtggtgatggatctcctgagacaatatctgcgagttgaaacacagttccagaatggacattacgataaatgcgtgttcgctctgcgagaggagaataagagtgatatgaacaccgtcctgaattacatcttttcacacgcgcaggtgacgaagaagaatttgctggtgaccatgttgatcgaccagttatgtggccgagatcctaccctcacggatgagctcctgaatattctgacagagttgactcagttgtcgaagactaccaatgcaaaggtggcattgcgggctcgccaggttttgatcgcctcccatctgccctcatatgagctgcggcataatcaagtggagagcatcttcctttctgctattgacatgtacggccatcagttctgtatagaaaacctccagaagctgatcctgtccgagactagcatctttgatgtcctgcccaactttttctaccactctaaccaggtggtcaggatggcagcattggaagtgtacgtgcgaagagcatatatagcctacgaactgaatagcgtgcagcataggcagctcaaggataacacctgcgtcgtggagttccagtttatgctgcccacctcacacccgaacagggggaacatccctacgctgaatcggatgtctttctcgagtaacctaaatcattatgggatgacgcatgttgccagtgtcagtgacgtcctcctggacaacagctttacgccaccatgtcaaagaatggggggaatggtctcgtttagaacctttgaggactttgtgcggatcttcgacgaggtgatgggctgcttctccgactcaccccctcagtctcctacattccccgaagctggccacaccagtctctacgatgaggacaaggtaccaagagatgagcctatccatatcctgaacgtcgccatcaagaccgattgcgacattgaggacgaccggctcgccgcaatgtttagagagtttacacagcagaataaggccaccctagttgatcatggtatccggaggctgacattcctggtcgcccagaaggatttccggaaacaggtcaactacgaagtggatcgacgattccaccgcgagttccctaaattctttacctttcgggctcgcgataaatttgaagaggatcgaatctacagacacctggaacccgcattggccttccagctggaactgaatcggatgagaaattttgatttgacggctataccctgtgccaatcacaaaatgcacctttacctcggcgcagcaaaggttgaagtgggcaccgaggtcactgactaccggttctttgttcgggctataatcagacattcagatctggtgacaaaagaggcttcgtttgaatatctgcagaatgagggggagcgcttactgctcgaggctatggacgaattagaagtcgccttcaataatacgaacgttagaacggactgcaatcacatctttttgaacttcgtgccaactgtaattatggacccgtctaagattgaggagtccgtacgatcaatggtgatgaggtatggtagccgcctgtggaaactccgggttctccaggcggaactgaagatcaacatacgccttactccgaccggtaaggcaatccccattaggctgtttttgactaacgagagcggctactatttggatattagcctgtataaagaagtgacagatagtcgcacggcccagatcatgttccaggcttacggcgacaaacaaggacccttgcatggtatgctgatcaatacaccttacgtaacgaaggacttgcttcaatctaagagattccaggcccagagtctgggcacaacctacatctatgatattcccgagatgttccgccagtctttgatcaagctctgggagagtatgtctacccaggctttcctcccctctccaccattgcctagcgacatgctgacctacacggagctggttctggacgatcaggggcaattggttcatatgaatagactaccaggtgggaacgaaataggcatggtggcctggaagatgacatttaaaagtcccgagtaccccgaaggcagggatataatcgtgataggcaacgatatcacctacagaattggctcatttggaccacaggaggatctcctgttcctaagggcatcagagctggctcgcgcagaaggaattccaagaatttatgtgagtgcaaatagcggggcacgtatcggtttggctgaagagatcaggcatatgtttcacgttgcctgggtggaccccgaggatccatataagggctaccggtacttgtacctcacacctcaggattataaacgcgtttctgcccttaattccgtccactgcgagcatgttgaggacgaaggagaaagtagatacaagattacggacattattggcaaggaagaaggtattggcccagaaaacctgcggggatctggcatgatcgccggagaaagctcacttgcctacaatgagatcatcacaatctcattggtaacctgtagggccatcgggatcggagcgtatcttgtccgacttggtcaacgcacaatccaggtggagaactcccacttgatcctgacgggggcaggcgctcttaacaaggtacttggacgggaggtgtacacctctaacaatcagctaggaggcattcaaataatgcacaacaatggcgttacccactgcaccgtatgcgatgactttgagggcgtcttcaccgtgctgcattggctgagttatatgcccaagtcagtgcattcttccgtgccacttctgaatagtaaggatcctatcgatcgcatcattgagttcgtacccaccaagacaccctacgatcccagatggatgctggcaggcagaccccaccccacgcagaaaggccagtggctttcaggttttttcgactatgggagcttctctgagatcatgcaaccatgggcacaaactgttgtggtaggaagagccagacttggcggaatcccagtcggtgtcgtggcggtggaaaccaggaccgtggaactgtccatccccgcagaccctgcgaacttagattccgaggctaagataatccagcaagccggtcaggtctggtttccggattcggctttcaaaacctatcaggctattaaagacttcaatagggagggactgcccctgatggtgttcgctaattggcggggatttagcggtggtatgaaggatatgtacgatcaggttcttaagtttggagcgtatattgttgatggcctgcgggaatgttgtcagccggttttggtgtatattcctccacaagcagagttgcgcggaggcagttgggtcgtgattgacagtagcatcaacccccgacacatggaaatgtacgccgatcgagagagtaggggttccgttctggagcccgaaggaacagtggaaatcaaattccggaggaaggacctcgttaaaacgatgcgcagagtagacccagtctacatacacttagcagaacgcttgggcactcctgaactgtccacggctgaacgaaaggagcttgagaacaagctaaaagaacgcgaagagtttctcatccctatctatcaccaggtggccgtgcagtttgcagacctccatgatacacctggcaggatgcaagagaaaggcgtaatttctgatatccttgattggaaaacaagcaggacatttttctactggaggctgcggagactgctgctcgaagaccttgtgaaaaaaaaaatacacaacgctaatcctgagctgaccgacggacaaatccaggccatgctgcgcaggtggtttgtggaagtagaaggaactgtaaaagcctacgtgtgggataataataaggacctggcggaatggctcgaaaagcagttgacagaggaggatggagtgcactcagtgatcgaggagaacattaaatgcatttcgcgggattatgttctgaagcaaatccgctccctcgtgcaggccaatcccgaggtggccatggactcgataatacatatgactcagcatatttcacccactcaacgggcagaagtaattcgcatcttatctacaatggacagtccttccaccta

SEQ ID NO: 27192 - DNA, 777 bp, synthetic construct
  misc_feature 1..777: note = Description of Artificial Sequence: Synthetic coding sequence
  source 1..777: mol_type = other DNA
atgtctggtcttcaccttgtgaagcagggtagggatcgtaaaaaaatcgattctcaaagggacttcacagtggcatcccctgctgagttcgtcacacgttttggcggaaacaaggtcattgagaaggtgttgatcgcaaacaacggcatcgctgccgttaagtgtatgaggagcattagaagatggagctatgagatgtttcgaaatgagcgcgcaatcaggtttgtagtgatggtgacccctgaggatctcaaagccaatgccgaatacattaagatggcagaccattacgtgcctgtgcctggtggcccaaataacaacaattacgccaatgttgagcttatactcgatatcgccaagcggatcccagtgcaagccgtgtgggccggttgggggcacgcctcagaaaatcccaagttgccagagttactgctcaagaatggaattgccttcatgggtcccccatcacaggccatgtgggcgttgggcgataagattgcttcttcaatagtcgctcaaactgctggcattcccaccttgccgtggagtggaagtggactgagggtcgactggcaggaaaacgatttctccaagcgcatattgaacgttcctcaggagttatatgagaaaggttacgtgaaagacgtagacgacggtttgcaagccgcagaagaggtgggttaccctgtaatgattaaagcctcagaaggaggtggaggtaaagggatccgcaaagtaaacaacgccgatgatttccccaacctgttcaggcagtag

SEQ ID NO: 27193 - DNA, 144 bp, synthetic construct
  misc_feature 1..144: note = Description of Artificial Sequence: Synthetic coding sequence
  source 1..144: mol_type = other DNA
atggatgagccttcccccctcgctcagccgctggagctcaatcagcactccagatttatcataggttcggtgtccgaagacaactctgaagatgaaatttcaaatctagtgaagctagatctgcttgaagaaaaggagggctag

SEQ ID NO: 27194 - DNA, 2679 bp, synthetic construct
  misc_feature 1..2679: note = Description of Artificial Sequence: Synthetic coding sequence
  source 1..2679: mol_type = other DNA
atggatcactacgattcacagcagacgaacgactatatgcaaccagaagaagactgggatagggatctgcttctggacccagcttgggagaagcagcagcgtaagaccttcactgcttggtgtaacagtcatctccggaaagcaggtacccagatagaaaacattgaagaagacttcagagatggtctgaagctgatgctgctcctggaggtgatcagcggggagaggctggcaaagcctgagaggggcaagatgcgcgtgcataaaataagtaacgtaaataaggctctggacttcatcgcaagtaagggagtgaaattagtatcgatcggggctgaggaaattgtggatggtaatgtaaagatgacactcgggatgatctggaccatcatccttcggtttgccattcaagatattagcgtggaggaaacgtccgcaaaagagggactgctgctctggtgccaaagaaaaaccgcaccatataaaaatgtcaatatccagaattttcacatctcatggaaggacggattgggattctgtgctctgatccaccgccatcgcccagaactgatcgactatggcaagttaaggaaagacgatcctctcacgaatttgaataccgctttcgatgttgcagaaaagtacttggacatcccaaagatgttagatgctgaagacattgtggggaccgctaggccagacgaaaaagcgatcatgacttacgtatcgtctttttaccatgcattttcaggcgctcagaaagcggagacggctgctaaccggatttgcaaggtgttggcggtaaaccaagagaatgagcagctcatggaggattacgagaagctggcttctgaccttcttgagtggatacggcgaacgatcccctggcttgagaatcgggtacctgagaatactatgcatgccatgcagcaaaagttggaagacttccgcgactacaggcgcctgcacaagccaccaaaagtgcaggagaagtgtcaactcgaaattaattttaacacattacagacaaaattacgtctgtctaatcgacccgctttcatgccttccgaaggacgaatggtaagtgacatcaataatgcttggggatgtctcgagcaagttgagaagggatacgaggaatggctgctgaacgagattagacggttggagagactggaccatctggcagagaagtttaggcagaaggctagtatccacgaagcatggactgacggaaaagaagccatgttgcgccagaaggactacgaaacggcaacactgtctgaaattaaggcgcttctgaagaaacacgaagcttttgagtcggacttagctgcacaccaagaccgggtcgagcaaatcgccgcaattgcacaagagctgaacgaattagattactacgatagtccttcagttaatgctcgctgccagaagatctgtgaccagtgggacaatcttggcgcactaacacagaagcgaagagaagccctcgaaaggacagagaagctattagagactatcgaccagctttacctggagtacgcaaaacgagcagccccatttaacaattggatggagggcgctatggaggatttgcaggatacattcatcgttcacactattgaggaaatacaggggcttactacagcacacgagcagtttaaggccactctcccagatgctgataaggagcggttggctattctggggattcataacgaggtctccaaaatcgttcagacatatcacgtgaacatggccggtaccaacccttacactacaattaccccccaagaaattaacggtaagtgggaccatgttcgtcaactggtgcccagacgggaccaggcactgacagaggagcatgctaggcagcagcacaatgaaagactcaggaaacagtttggtgcccaagcaaatgtcatcggtccttggatccaaactaaaatggaagagattgggaggatctcgatagagatgcacggcacactcgaggatcagttgtcccacctccgccaatatgaaaaaagcattgtgaactataaacccaaaattgaccagctggagggagaccaccaactgattcaggaagccctgatattcgataacaaacacacaaattacacaatggaacacatcagggtcggctgggaacagttattgactaccatagccagaacgatcaatgaggtggagaatcagattctgaccagggatgctaagggcataagtcaggagcagatgaacgagttcagagcttctttcaatcattttgatagagaccacagcggcacactggggccagaagagttcaaggcttgcctgatttctttgggatatgacatcggcaacgacccccagggcgaggctgaatttgccaggattatgagtatcgtagacccgaaccgcctgggggtggtgaccttccaggcgttcatagatttcatgtcccgggagacagcagacacagatacagctgaccaagtcatggcatctttcaagattctcgctggcgacaagaactacatcacgatggatgaacttcgtcgtgagctccccccagatcaggccgagtactgtatcgctcgtatggccccttacaccggcccagactcagtccctggagccctagattatatgagtttctccacagctctttatggggagtctgacctgtag

SEQ ID NO: 27195 - DNA, 2745 bp, synthetic construct
  misc_feature 1..2745: note = Description of Artificial Sequence: Synthetic coding sequence
  source 1..2745: mol_type = other DNA
atggatcattacgattcccaacagacgaatgactacatgcagcctgaggaagattgggacagggatctgcttctcgatcctgcttgggagaaacagcagaggaaaacctttacagcctggtgtaattcccacctgcgcaaagcaggcacccaaattgaaaacatagaggaagacttccgggacggactcaagttgatgctcctgctcgaggttatttctggggaacggttggccaaacctgaacgcggaaagatgagagttcataagatttccaatgtcaataaagctcttgattttattgcttccaagggagtaaaactggttagtattggcgctgaagagatcgttgatgggaacgtgaagatgaccctgggcatgatatggacaatcattctacgtttcgccatccaggacatttccgtagaagagaccagcgccaaggaaggcctgcttctgtggtgccagcggaagacagccccatacaaaaacgttaatattcagaactttcacatcagttggaaagacggcctcggcttctgcgccctgatccaccggcaccgccctgagctgatcgactatggtaagctccggaaagacgacccactcaccaatctcaacacagcattcgatgtggctgaaaaatacttggatattccaaaaatgctggacgcagaagacattgtgggcaccgcccgaccagatgaaaaagccattatgacgtacgtgtcatctttctatcatgccttctccggcgctcagaaagcagagaccgcagcaaatagaatttgcaaggtgctggctgtaaaccaggagaatgaacagctgatggaagactacgagaagctggcctcagacctgctagagtggatccgtcggacaatcccctggttggagaatagggtgcccgagaacacaatgcacgccatgcagcagaaactcgaggactttcgggactatcgaaggttgcacaaaccgcctaaagtccaagaaaaatgtcagctggagatcaactttaatactctgcagaccaaattgcgcctctccaaccgacctgctttcatgccgagcgagggaagaatggtgagcgatatcaataatgcatggggctgcttagaacaggtcgaaaagggctacgaagagtggttactcaacgaaattaggcgtctggagcgccttgaccacctcgccgaaaaattcagacaaaaggcctccatacacgaggcttggacggatggcaaagaagctatgctccggcagaaagactacgagaccgcaaccctgagcgagatcaaagcgctcctcaaaaaacacgaggcctttgaatccgaccttgccgctcaccaggaccgggtggagcagattgccgctattgcgcaggagctgaatgaactagactattacgactctccatccgtcaatgcacgctgtcagaaaatatgcgaccaatgggacaatcttggcgcacttacccaaaagcgccgtgaggcccttgagcggaccgaaaaactgctcgaaacgattgatcagctgtacttggagtatgccaaaagggccgcacccttcaataactggatggagggggctatggaagatctccaggataccttcatcgtccacacgatcgaagaaatccagggacttacgaccgcccacgaacagttcaaagcgactctgcctgatgcagacaaggaacgtttggccattctgggtatccacaacgaagttagcaagattgtccaaacctaccatgttaatatggctggaactaatccttataccactataacgccccaggaaattaacggcaagtgggatcatgtccggcagctggtgccccgtcgagaccaggctctgaccgaagagcatgccagacagcaacataacgagcgtctgagaaaacaattcggtgctcaagcaaacgtgatcggcccatggatacagactaagatggaagaaataggtagaatctctatagagatgcacggaaccctcgaggaccagctcagtcatctgcgccagtatgagaagtctatcgtcaattataaacctaaaattgaccagcttgaaggagaccaccagctgatccaggaggcgctgatttttgacaacaaacacaccaattacaccatggagcacattagggtgggatgggagcagcttctcactactatcgccaggaccatcaatgaagtagagaaccagatcctgacgcgagacgctaaaggcataagccaggagcaaatgaatgaattccgtgcctcctttaatcatttcgatagagatcatagcggaaccctaggtcctgaggagttcaaggcctgtctcatttccttaggctacgacattggcaatgacccccaaaagaagactggcatgatggatactgatgactttagagcatgtctcatctccatggggtataacatgggcgaagcagaatttgccagaatcatgtctatcgttgatcccaacaggctgggcgttgtcacatttcaggccttcatcgacttcatgagcagggagaccgcagacactgacaccgccgatcaggtgatggcctcttttaaaatccttgcaggagacaagaactacatcactatggatgagctgcggagagaactccctcctgatcaggccgagtactgcatcgccagaatggctccctacaccggacctgactccgtcccgggagctcttgattatatgtctttctccacagccctgtacggggagtctgatctttag

SEQ ID NO: 27196 - DNA, 2664 bp, synthetic construct
  misc_feature 1..2664: note = Description of Artificial Sequence: Synthetic coding sequence
  source 1..2664: mol_type = other DNA
atggatcactacgactcacagcaaaccaatgattatatgcagcccgaggaggactgggacagggatctacttctagaccctgcttgggagaagcagcagcgcaaaacatttaccgcatggtgtaatagtcacctacgtaaggctgggacccagattgagaatatcgaggaagatttccgtgacgggctgaaactgatgttgctcctggaggtaatcagcggggagaggctagctaaaccggaacgcggtaagatgcgagtgcacaagatttcaaatgtgaacaaggctcttgatttcatcgccagcaagggtgtcaagcttgtgtcaatcggggctgaggagattgtggacggcaacgtgaagatgacgctggggatgatctggacaatcatactgcgtttcgctattcaggacattagcgtggaagagaccagtgctaaggaggggcttcttctctggtgccagaggaagaccgccccttacaaaaatgtgaacatacagaatttccatatatcatggaaggacgggctgggattctgcgctcttatacatagacatcgccctgaactcatcgattacgggaagctccgaaaggatgacccactcacgaaccttaatactgcctttgacgtcgctgaaaagtatctggatattccaaagatgctggacgcggaggatattgtcggaaccgcccgtcctgatgaaaaggcgataatgacatacgtttcttcattttaccacgccttttcaggtgcccagaaagctgaaaccgcagccaacagaatctgcaaagtgctggctgtgaatcaagaaaatgaacaattaatggaggactatgaaaagctcgcgtccgaccttctagagtggatccgacgaactatcccttggctcgagaatcgggtgcccgagaacacgatgcacgctatgcagcagaagctcgaggactttagagattacagacgattacataagccaccaaaggtgcaggagaagtgtcagctcgagatcaactttaatacgctgcagactaagttgaggctcagtaatagacctgcattcatgccctcagaaggtaggatggtctccgacattaacaacgcctgggggtgcctggagcaggtggagaaaggctacgaggaatggctgctaaacgagatccgtcggttggaacgtctagaccatcttgcggagaagttccgacagaaagcgtccattcacgaagcatggacagacgggaaggaggccatgctcaggcagaaggactatgagacagccacactgagtgagataaaggcccttttgaagaaacatgaggcctttgagtccgatctggccgctcatcaggatcgggttgagcagatcgccgctattgcgcaggaattgaatgaactggactattatgactcaccctctgtgaacgccaggtgccagaaaatttgcgaccagtgggacaacttgggcgctttaacccaaaaacgtcgagaagccctggagcggaccgaaaaactcctggaaacaatcgatcaactctacctcgaatatgccaaacgtgctgctccttttaacaactggatggaaggcgctatggaggaccttcaggatacttttatcgtgcatactatagaggagatccagggtctgacgactgcccacgaacagttcaaagcgacactccccgacgctgacaaggaacggcttgccatactgggtatacacaatgaggtgtctaaaatcgtccagacctaccacgtgaacatggccggtaccaacccttatacaacaataaccccccaggaaattaatggtaaatgggaccacgtgagacaattagttccaaggcgcgaccaggccctcacggaggagcatgcgagacagcagcacaacgagagactgcgaaaacaatttggtgcacaggcgaacgttattgggccatggattcagactaaaatggaagaaatcggtagaatttcaattgaaatgcatgggacgctcgaagaccagctgagccatctgagacagtacgaaaagtcaatagtaaactataaacccaaaatcgaccagctggaaggggatcatcagctgatccaggaagcattaatttttgacaacaagcatacaaattatacgatggaacacatccgagtagggtgggagcagctgctgaccactattgcacggacaattaatgaagtggaaaaccagatcctgactcgggatgccaagggtatcagtcaagaacagatgaatgaattccgggcatccttcaatcactttgatcgcaagaagaccggaatgatggacactgatgacttccgcgcatgcctcatctccatgggctacaacatgggcgaggccgagttcgccaggattatgtccatagtggatcctaaccgactgggggtggtgacattccaggctttcatcgactttatgtcacgcgaaacagcggacacagatacagctgaccaagtgatggcctcctttaagattctcgccggagataaaaactacattaccatggacgagctgaggagggaactcccccctgatcaggctgaatattgcatagcaaggatggctccttacaccggacccgactcagtgcctggggctctagattatatgtccttttcaacggcactgtatggggagagcgatctctag

SEQ ID NO: 27197 - DNA, 2736 bp, synthetic construct
  misc_feature 1..2736: note = Description of Artificial Sequence: Synthetic coding sequence
  source 1..2736: mol_type = other DNA
atggtggactatcatgctgccaaccaaagctaccagtacggaccaagctcagccggaaatggtgcaggaggaggagggtccatgggcgactacatggctcaagaggatgattgggaccgggatctgctcctagatcctgcctgggaaaaacagcagcgcaagacctttaccgcctggtgcaatagccatttgagaaaagccggaacccaaatcgaaaatatcgatgaggattttcgcgacggactgaagctgatgttgctcctggaagtgatatcaggagaacgcctaccaaaaccagaaagaggaaaaatgcgcgttcataaaattaataatgtcaacaaggctctcgacttcatcgctagcaagggtgtgaaactggtttctatcggagcggaagaaatcgtggacggcaacgccaaaatgacacttggaatgatctggaccataatactccggttcgccattcaagacatttccgtcgaagagacaagcgccaaagaggggctcctcttgtggtgtcagcgcaagacggccccttacaaaaatgttaacgtgcagaactttcatataagttggaaagacggcttggcattcaacgcactcatccacaggcatagacccgagctcattgaatacgacaaactgcgaaaggacgaccctgtcacgaacctaaacaatgcttttgaggtggccgagaaatatctggacatcccaaagatgttagatgcagaagacatcgtgaatacggccagacctgatgagaaggccatcatgacttacgtctcatccttctatcacgcgttctcaggagcccagaaggctgagactgctgcaaaccgcatctgcaaggtgctggctgtgaaccaggaaaatgagcacctgatggaggattacgagaagctagccagtgatctcctggaatggattcgacgtacaataccatggctcgaggacagggtcccgcagaagactatccaggagatgcagcagaagctggaagattttcgcgactatcgcagggtccacaaacctccgaaagtacaggaaaagtgccagctggaaatcaacttcaacacactgcagacgaaacttcgcctgtccaatagacctgcattcatgccatcggagggaaagatggtctccgatattaacaatggttggcagcatttggagcaagccgagaaaggatatgaggagtggctgctaaatgagatccggcgactggaaagactggaccatctggcagagaaattccggcaaaaagcatccatacacgaggcatggaccgacggtaaagaggccatgctcaaacatcgagattatgaaacagcgaccttgtctgacataaaggcattgatccgtaagcatgaagcctttgaatccgatctcgcagcacaccaggatagggttgaacagatagccgcaatcgctcaggagttgaacgaacttgactattacgacagccacaacgtgaataccagatgccagaagatttgtgatcagtgggatgctctcggttctctgacccatagtaggcgcgaagccctggaaaagaccgagaagcagctggaagctatagatcagctgcacctggagtacgctaaaagagccgctcctttcaataactggatggaaagcgccatggaagacctgcaggacatgttcattgtgcacactattgaggagatcgaaggcctgatttctgcgcacgatcagtttaagtcgaccctacctgatgccgacagggaacgggaagctatcctggccattcataaagaggcccaacggatcgctgagagcaaccacatcaagctgagcggttccaacccctatacaaccgtaacgccccagattataaacagtaagtgggaaaaggtgcagcaactggtgcccaaaagagatcacgctctcctagaggagcaatctaaacaacagtctaacgaacatctcaggcgccagttcgccagtcaggctaatgtcgtgggtccctggatccagacaaagatggaagagattggacgaatcagcattgaaatgaacggcaccttggaggatcagctttcccacctcaaacagtacgagagaagtatcgtggattacaagccaaacctcgacctcctcgagcagcagcatcagttgatacaggaagccctgatttttgacaacaagcacacaaactacaccatggagcacatacgtgtaggttgggagcagctgctgactaccatcgctaggaccattaatgaggtggagaatcagatcctcacaagagatgcaaaaggtatcagccaggagcagatgcaggagtttagagcttcatttaatcatttcgacaaagaccatggcggagctctcggcccagaggagtttaaagcttgtttgatttcccttgggtacgatgttgaaaatgatagacagggagaggccgaattcaacaggataatgtctctcgtggaccctaaccactcaggattggttaccttccaagcttttatcgacttcatgtctcgagaaactactgacacagacacagccgaccaagtgatagcctcctttaaggtgttggcaggcgataaaaatttcattacagctgaggagcttcgcagggaattgccaccggatcaggccgaatactgtattgccaggatggcaccttaccagggcccagacgctgtgcctggcgcactggactataagtctttttcaacggcactctatggtgaaagtgatctctag

SEQ ID NO: 27198 - DNA, 2079 bp, synthetic construct
  misc_feature 1..2079: note = Description of Artificial Sequence: Synthetic coding sequence
  source 1..2079: mol_type = other DNA
atggtcgattaccacgcagcgaaccagtcgtatcagtatggccctagctcggctggcaatggtgcaggcggtggaggctctatgggcgactatatggcacaggaagatgactgggaccgcgacctccttttagacccggcttgggagaagcagcagcgcaaggcagagaccgctgctaatcggatctgcaaagtgctagccgtcaatcaggagaatgaacacctcatggaagattacgagaagctcgcctccgacctgttggagtggatccgccgaaccatcccctggcttgaggaccgggtgcctcagaagactatccaagaaatgcagcaaaagctggaggatttccgggactacaggagggtgcacaagcctcctaaggtgcaggagaagtgccagctagagatcaatttcaatactttgcaaacaaagcttcgtctttcgaataggcctgcatttatgccgtctgaaggaaagatggtatccgatattaataatggatggcagcatctagaacaagcagagaaggggtatgaagagtggttgctcaatgagatcaggcgccttgagcgactcgaccatctggccgaaaagtttcgacagaaagcatctattcatgaggcttggacggacggcaaggaggcgatgctgaagcatcgggactacgagacagcaactctgtccgacataaaggccctgatccggaagcacgaggcattcgagagcgacctcgcagctcaccaggacagagtggagcagattgctgcaattgcccaggagctgaacgaactcgattactacgacagccataatgtcaacacccgctgtcagaagatatgcgatcaatgggacgcactgggatctctgactcacagtcgcagagaggccctggaaaagactgagaagcaactcgaagcgattgatcagcttcatctcgaatacgccaagagggccgcacctttcaataattggatggaatccgctatggaagaccttcaggacatgtttattgtgcacactatagaggagatagaggggctcatctccgcacacgatcagtttaaatctacattacccgatgccgatcgggaacgggaagccattctggctatacacaaagaggcgcagcggattgccgagagtaaccatatcaagttatctgggtccaacccatataccacagtgacccctcagattatcaattcaaagtgggagaaagtgcagcagctagtgccaaaacgcgatcatgccctgttagaggagcaatcaaagcagcagagcaacgagcacctccggcgacagttcgcctctcaagcaaacgtcgtggggccttggatacagaccaagatggaagaaatagggaggatttccattgaaatgaatgggacactcgaggaccagttgagtcacttgaagcagtacgaacgctccatagtcgactacaagccgaatctggacctgctggagcagcagcatcagctgatccaggaggcccttatcttcgacaacaagcacacaaattacacaatggagcacattcgcgtgggctgggagcagctgctgaccacaatcgcacgtaccatcaatgaggtggaaaatcaaatcttgacaagagatgcaaagggaataagccaagagcaaatgcaggagtttagggcatcctttaaccactttgacaaggaccatggcggagccctgggtcccgaggagttcaaagcatgcctcatctcgctgggttatgatgtggagaacgacaggcagggtgaggccgaattcaaccggattatgagccttgtagaccccaatcattccggcttggtgacgtttcaggcatttatcgactttatgagcagagagaccacggataccgataccgcagatcaggttatcgcatcattcaaggtgctagcaggagataaaaatttcatcaccgctgaggaactcaggcgagaactgccgccagaccaggccgaatattgtatcgccaggatggccccttaccaaggccctgacgcagtgcccggtgcccttgactacaaatccttctccaccgccctgtatggggagagcgatttgtag

SEQ ID NO: 27199 - DNA, 1566 bp, synthetic construct
  misc_feature 1..1566: note = Description of Artificial Sequence: Synthetic coding sequence
  source 1..1566: mol_type = other DNA
atggtcgactatcacgccgcaaaccaatcctaccagtacggaccatccagcgccggtaatggggcaggtggcggtgggagtatgggtgactatatggctcaagaggacgactgggaccgcgacttgcttcttgatcctgcctgggaaaagcaacagcgtaaaacctttaccgcctggtgcaactcgcacctgagaaaggccggtactcagattgaaaatattgatgaagacttcagagatggtctgaagctgatgctgcttctcgaggtgcatgaattggactattatgactcacacaacgtgaacacccgctgtcagaagatctgcgatcagtgggacgctctgggaagcttgacacacagccgccgagaggcccttgagaaaacggagaagcagctcgaagccatcgatcaactccatttggagtacgccaagcgggctgcccctttcaacaactggatggaatcggctatggaagatctgcaagatatgttcattgttcacacaatcgaagagatcgagggcttgatctcagcacacgaccagttcaaatccactcttccagacgcagatcgcgagcgtgaagccatcctagccattcacaaggaagcacagcgcatagccgagtccaaccatatcaagctgagcggaagcaatccttataccaccgtgaccccccagatcatcaatagcaagtgggaaaaggttcagcagctggttcccaagcgggatcacgctttgctggaagagcaatcaaagcaacagagcaatgagcacctcagacggcaatttgcctcacaagcaaatgtggtcgggccatggattcaaaccaagatggaggagatcggtaggatctcaattgaaatgaacgggaccttggaggaccagttatcacatctcaaacaatacgagcgaagcatcgttgattacaagccaaatctggacctgcttgaacagcagcatcagcttattcaggaggctttgatcttcgacaataagcacactaactacaccatggagcatatacgcgtgggatgggagcagctactgactaccattgcgcgaaccatcaacgaagtcgagaatcagatcctcacccgcgatgctaagggaatatcgcaggaacagatgcaagagtttagggcttcgttcaatcatttcgataaagatcacggcggtgcactggggccagaggagttcaaggcttgtctgatttcgctaggctatgacgtggagaacgacagacagggggaggctgagtttaatagaattatgtcgctagtagaccctaatcacagtgggcttgtcacctttcaggcgttcattgacttcatgagccgagagactacagatacggatacagcggaccaggttatcgcaagcttcaaggttttagccggagataagaacttcatcacggccgaggaactgagaagagagcttccacccgatcaggcggagtattgtatcgctcgcatggctccataccaggggcctgatgcagttcctggagccctcgactacaagagcttctccaccgcgctgtacggagaaagcgatctgtag

SEQ ID NO: 27200 - DNA, 1689 bp, synthetic construct
  misc_feature 1..1689: note = Description of Artificial Sequence: Synthetic coding sequence
  source 1..1689: mol_type = other DNA
atggtcgactaccacgcggcaaatcagtcctaccagtatggtcccagctctgcaggcaacggtgctggtggaggtggatcaatgggggactatatggctcaggaagacgactgggatcgggacctgttgctagacccagcctgggagaagcagcagcggaaaacatttactgcctggtgcaacagtcaccttcgaaaagccggtactcagatcgagaacatcgacgaggactttagggatggtttaaagcttatgttacttctggaggtaatatctggcgaaaggttacctaagccggagcggggaaaaatgcgagttcacaaaatcaataatgtgaataaagccctggactttatcgcttccaaaggagtgaaactcgtatccataggcgctgaagagatcgtggacggcaacgccaagatgacacttgggatgatttggactattatacttcgatttgccatacaggatattagcgtggaggagacctcagcaaaagagggactactactctggtgccagcgcaagactgcaccttacaagaacgtgaacgtgcaaaacttccatatcagctggaaagacggcctggccttcaacgccctgattcatcgccaccgccctgagctgatagaatatgacaaactgaggaaagacgatcctgtgacaaacctcaacaatgcctttgaagtggctgaaaaatacttggacatccccaagatgctcgatgccgaagatatcgtgaatacagctcggcctgatgagaaggccatcatgacatatgtcagctctttttaccacgcattttctggagctcagaaggctgaaaccgccgcaaataggatctgtaaggtcctggccgtcaatcaggagaacgagcacctgatggaagactatgagaaactggcctctgatctcttagagtggataagacggaccataccctggctggaggatcgcgttccccagaaaaccatccaagagatgcagcagaagctggaggattttcgcgactaccgtagggtgcataaaccaccaaaggtgcaggaaaagtgccaactagagatcaactttaatacgcttcagactaaactgagactgtcaaacaggcctgcgttcatgccgtctgagggcaagatggtctccgacatcaacaacggctggcagcatctggaacaagccgaaaaggggtacgaggagtggctgctgaatgaaattagaaggctggaaagactggatcacctcgccgagaaattccggcagaaggcctcaatccacgaagcgtggacagatggcaaggaggccatgttgaagcaccgggactacgaaacagccacattgagcgacatcaaagccctgatcagaaagcatgaggcatttgagtccgatctcgcagcccaccaagatagagttgaacagattgcggctatcgcgcaagagctcaacgaattagactattatgattcccacaatgtcaacaccccagatggtctccaagaaggccctggtcaaccccactctcccatacctcccctgtgtatttacgctaaacatagcttgcagtcttctggggtcggaggatgggcgggacggggatggggaaggctgagcccgctgtcactgtgcggactggctcgcaggtttcccaggcccggatggggtgacttgggccctgctctcctcgtgtggtag

SEQ ID NO: 27201 - DNA, 1518 bp, synthetic construct
  misc_feature 1..1518: note = Description of Artificial Sequence: Synthetic coding sequence
  source 1..1518: mol_type = other DNA
atgaaatttaagttgcacgtcaactccgcccgacaatataaagatttgtggaacatgtctgatgacaaacctttcctctgtaccgcccctggatgcggacagaggtttacaaatgaagatcacctggcagtgcataagcacaagcatgagatgacgctcaagtttggccctgcgaggaacgatagtgtaatagtcgcagaccaaacacctacccccacaagatttctaaagaactgtgaagaagtcggcctcttcaacgaattggcttcccctttcgaaaacgagtttaaaaaggccagtgaagatgacattaagaaaatgcccctggacttgtccccacttgctactccaattattagatctaagatcgaggagccctctgtcgtggaaaccacccaccaggattcacctttgccccaccccgaatctaccacgtctgatgaaaaggaggtgccactcgctcagactgcccaacccacctctgctattgtgcggccagccagtttgcaagtaccgaatgttttactgacgtcgagcgattcttccgtcatcattcaacaggccgttccttctcctactagcagtaccgtcattacacaggcgccaagctccaacagaccaatagtcccagtgcccggtccatttccgcttctgttgcatctgcctaatggtcaaacaatgccagtggcaatcccagcttcaattacctcgtcgaacgttcatgtgccagcggctgtgcctttggtacggcctgtcaccatggtccctagcgtgccgggaattcccggaccctcctcaccccagcccgttcagtcagaggccaaaatgagacttaaggccgcactgacccagcaacaccctcctgtcaccaatggtgacacagttaagggtcatgggagtggcctggtccggacgcagagcgaggagtctaggcctcagagcctgcaacagcccgcaacctctactactgagactcccgctagtcctgcacacactactcctcagacccagtccacatcggggcgtagaaggcgcgctgcaaatgaggacccagatgagaaacggaggaaatttttggagcgcaatagagcagccgcatctcggtgtaggcagaagcgtaaggtatgggtgcagtccctcgaaaagaaagcagaggatctttccagtctgaatggtcaactgcaatcagaggttaccctcctgaggaacgaggtggctcagctcaagcaacttttgttggctcataaggattgccctgtcacagccatgcagaaaaagtctggctaccacaccgccgacaaggatgatagttccgaggacatcagcgtcccctcatcaccacacaccgaagccatccagcatagttcagtgtccactagtaacggagtcagcagtacgagcaaagccgaggcagtcgcgacgtccgtccttacgcagatggccgaccagtctacagaaccagctttaagtcaaatcgttatggccccttcttcacagtcccagccttcaggatcgtag

SEQ ID NO: 27202 - DNA, 1344 bp, synthetic construct
  misc_feature 1..1344: note = Description of Artificial Sequence: Synthetic coding sequence
  source 1..1344: mol_type = other DNA
atgtattgcgcgtggatgtggcccgaccagacacccactccaacacgctttctcaaaaattgtgaagaggtagggctttttaatgagctggcgtcaccatttgaaaacgaattcaaaaaagcttcggaagacgacattaagaagatgccattggatcttagcccactggccacgccaattattagaagcaagatcgaagagccatccgtggtcgagacaacgcatcaagatagccctcttccccatcctgagtccaccacatctgacgagaaagaggtacctctggcgcagacggcccagcctacctctgcaatcgtgagacctgccagcttgcaggtgcccaatgtcctgttgacctctagcgactctagcgtgattattcagcaggctgtcccaagcccaacgtcttcaaccgtgataactcaagcaccctcttcgaataggcccattgtgccagtgccaggcccattcccactgctccttcaccttcctaatggccagaccatgcctgtggcgattccagcctctattacctctagtaacgttcacgtccccgcagcagtgcctctcgtccgacccgtcacaatggtaccctctgtccctggtatacccggtccgtcctcaccccagccagtccagtccgaggctaagatgcgtcttaaagccgctctcacccagcagcaccccccagtcacgaatggcgatacggtgaaagggcatggaagcggcctggtgcgcacccagagcgaggagagtaggccacaaagcctgcagcagcctgctactagcacaaccgagactcccgcttctccagcacacactactccgcagacccaaagcacgtctgggaggagaagacgggctgcaaacgaggacccagatgaaaagagacggaagttcctggagcggaacagggccgctgccagtcggtgtaggcagaaacggaaagtttgggtgcaatcgcttgagaagaaggcagaggatctgagctcgctgaatgggcagctccaaagtgaggtcactttactccgcaatgaggtggctcagttaaaacagctcttgctcgcccacaaggactgccccgttactgcaatgcagaaaaagtctgggtatcatacggccgataaagacgactccagtgaagacatctctgtgccaagcagcccacataccgaggcgatccagcacagttccgtcagtacaagcaatggcgtttcatcgactagtaaagccgaggcagtggcgacaagcgtactcacccaaatggctgatcagtctacagagcccgctttgagtcagatcgtgatggcgccttcctctcaaagccagcctagtggaagttag

SEQ ID NO: 27203 - DNA, 381 bp, synthetic construct
  misc_feature 1..381: note = Description of Artificial Sequence: Synthetic coding sequence
  source 1..381: mol_type = other DNA
atgagtgatgataagcccttcttatgcaccgctccaggctgcgggcagagtgaggtcactctcctgcgaaacgaggttgctcaactcaaacaattgcttctcgcccataaggattgtccagtgaccgcgatgcagaagaagtccggctaccacacagcggataaagatgatagctccgaggatattagcgtgcctagctccccccacacagaagctatccagcactcaagtgtatctacatcgaacggggtctcgagcacgagtaaggccgaggccgtagccacctcagtcctgacccagatggctgaccaatcgacggagcctgcccttagccaaattgtgatggccccttcctcccagtcgcagccaagtggttcttag

SEQ ID NO: 27204 - DNA, 1518 bp, synthetic construct
  misc_feature 1..1518: note = Description of Artificial Sequence: Synthetic coding sequence
  source 1..1518: mol_type = other DNA
atgaagttcaaattacatgtgaattccgcacgccagtacaaagatctgtggaacatgtcagacgataagcccttcctgtgtacagcgccagggtgtggccaaaggttcacaaacgaagatcatctggccgtgcataagcacaaacacgaaatgacattaaagttcggtcccgctaggaacgactctgtaatcgtggccgaccaaactccaaccccaaccagattcctcaagaactgtgaggaggtaggattatttaacgaactcgcatccccctttgagaacgagttcaagaaagcatcagaggatgatataaaaaaaatgcccctcgacctcagcccactggccaccccaatcatcagaagcaagatagaggaaccgtccgtcgtggaaacgactcaccaggattccccactgccccatcctgaatctaccactagcgatgagaaggaggttcccttagcccagacagctcagccaacatcagctatcgttcgcccagcgtcattacaggttcccaatgtgctcctgacatcttctgattcatctgtcatcattcaacaggcagtgccatccccaacctcaagcactgtgattacacaagccccatcatctaataggcctatcgtccctgtccccggacccttccctcttcttctgcacctccctaacggacagaccatgcctgtcgctatacccgcaagtattacatcgagcaacgtccatgtcccagcagcggtccctctagtgcgacccgttaccatggtgcccagtgtcccaggtattcccggtccctcttcaccccagcctgtgcagagtgaagctaaaatgcgactgaaagccgcactgactcaacagcatccacctgtaacgaatggggataccgtgaaaggccatgggagtggcctggtacggacacagtcagaggagtctcgacctcagtcattgcagcaaccagccaccagtaccaccgaaaccccggcatccccggcacacacgaccccccagacacagtccacctcagggaggagacgacgggctgctaacgaagaccctgatgaaaaacggaggaagttcttggagcgaaaccgcgcagcggcatctcggtgtcgacagaagagaaaggtgtgggtacagagtcttgaaaagaaggccgaagatctgtcttctctgaatggccagctccagagtgaagtgacgttactgaggaacgaggttgcacaattaaagcagcttctcttagcccacaaggattgtcccgtgacagccatgcaaaagaaatccggctatcacaccgccgacaaggacgattcatctgaggacatttctgtgccttcatcgccgcacacagaggctatccagcactcatcagtgtcaacatctaacggcgtgtcctccactagtaaagccgaagccgtcgcaacatcagtgctaacccagatggcagaccagagtactgaacccgctctgtcgcagatcgtaatggctccttcctcgcagtcccaacccagtggttcttag

SEQ ID NO: 27205 - DNA, 1344 bp, synthetic construct
  misc_feature 1..1344: note = Description of Artificial Sequence: Synthetic coding sequence
  source 1..1344: mol_type = other DNA
atgtattgtgcgtggatgtggccagatcagaccccaactcctacaaggtttctgaagaattgtgaggaggtgggcctttttaatgagctggcctcccccttcgaaaatgagttcaagaaggcaagtgaggatgatattaaaaaaatgcccttggatctcagtcctctcgcaacccccattatccggtcaaaaatcgaggagccatccgtggtagagaccacacatcaagacagcccccttccacatcctgagtcaacaacatcagacgaaaaagaggtacctctggctcagactgctcaaccgacttcagcaatcgtacggccagcaagcctccaagtgcccaatgtgctacttacttccagcgattcttccgttatcattcagcaagctgtgccgtcgcccacctcttccacagtcatcactcaggccccaagttctaataggccaattgtccccgtccccggtccttttcccctgctgttacacctgcccaacgggcagactatgcccgtagcaattccagcttcaattacgagcagtaacgtgcatgtgccggctgccgtgccactggtcagacctgtgaccatggtgcctagcgttcccggaatccccggtccgtcgtctccccaaccggttcagtctgaagccaagatgagactcaaagccgctctcacacagcagcaccccccagtgacaaacggagacacggttaagggccatggctctggactagtccggacccagagcgaggagtctaggccgcagagcttgcagcagcccgcaacatcaaccacagagactcccgctagcccagcccataccaccccgcaaactcagagtacgagtgggagacggcgtcgtgccgcaaacgaggaccccgacgagaagaggaggaagttcttagagagaaatagagcagccgcaagtcgctgcagacagaagcggaaggtctgggtgcagtccctcgagaagaaagcagaggacctgtcctccctgaacggacagttgcaaagtgaggtgaccttactccgtaatgaggttgcccagcttaaacaattgttactggcccacaaagattgtccagtaacagctatgcagaaaaaatcaggctaccacaccgccgataaagatgattcctccgaggatatctccgttccttcttccccccatacggaagcaattcagcactcatccgtgagcacttccaatggcgttagctctaccagtaaagccgaggcagtggctacttccgtgctcacccagatggcagaccagagtacagagcccgctctatcccagatcgtgatggccccttcctctcaatcccaaccatcgggcagctag

SEQ ID NO: 27206 - DNA, 630 bp, synthetic construct
  misc_feature 1..630: note = Description of Artificial Sequence: Synthetic coding sequence
  source 1..630: mol_type = other DNA
atgaaatttaaactgcacgtcaattcagctcgacagtacaaagacctctggaacatgagtgatgataagccatttctttgcaccgccccaggctgcgggcagaggtttacgaacgaagatcacctcgcagtacataaacacaaacatgaaatgaccttgaaatttggaccggctcgcaacgactctgtgattgtcgcagatcaaacacctacccctacccggtttcttaaaaattgtgaagaggtaggcctgttcaatgaattggctagtccttttgagaatgagtttaagaaggccagcgaagatgacatcaaaaaaatgcctttagatctatcacctctcgctaccccaatcatccggtccaaaattgaggagcctagtgtcgtagagacaactcaccaggactccccactgccccaccccgagagtactaccagtgacgaaaaggaagtccctctggcacagacagcccaacctacgtcagcaatcgtccggcctgcttccctgcaggtgccaaatgtgctgttgacctcctcagattccagcgtcattatccagcaagcagtcccttccccaacatcctctacagtcattacacaggcgcctagttccaataggccaatcgtatag

SEQ ID NO: 27207 - DNA, 1188 bp, synthetic construct
  misc_feature 1..1188: note = Description of Artificial Sequence: Synthetic coding sequence
  source 1..1188: mol_type = other DNA
atgaagtttaaattacatgtaaattccgctcggcaatataaggacctctggaatatgagcgacgataagccttttttgtgtaccgcacccggttgtggccaacgttttactaacgaggatcatctggctgtccacaaacacaagcacgagatgacactgaagttcgggcctgcgcgtaatgactccgtaatagtggccgaccagactcctacccctacccgattcctgaaaaactgtgaagaagtggggctctttaacgagctcgcctcaccctttgagaatgaatttaagaaggcctcagaggacgacatcaaaaagatgccgctggatctgtctccactggccacccccataattcggtccaaaatcgaggagccttcagtggtagaaacaacccaccaagacagccccctgccccatcccgaatctaccactagcgacgaaaaagaggtgccactagcgcagactgcacaacctacttctgccatcgtgaggccggctagcctacaggtccctaacgtgctgttaacttcttcagacagctccgtgattattcaacaggccgtcccttctcctacaagctctaccgtgatcacccaagccccttcttccaaccggccaatcgtccctgtacccggaccctttccactccttctacacctccctaacggacagacaatgcctgttgcaataccggctagcattacatcctccaacgtccatgtgcccgcagccgtgccgctggtgagaccagtcacgatggttccaagtgtccctgggataccagggccttcgtcaccgcagcccgtgcagtccgaagccaagatgagactgaaggcggcacttacccagcagcaccctccagtcacaaatggcgatacagtcaaaggtcatgggtcaggcctggtgagaactcaatcggaggagtctagaccgcagtcgctgcagcaacccgcaacttccaccaccgagacccccgcatcccctgctcacactacccctcagacacagagcaccagcggtagaagacgcagagccgcaaacgaagatccggacgaaaaaaggcgaaaatttttggaacgaaacagggccgctgcttctcgctgtcgtcagaaacgcaaagtttgggttcagtcgctggagaagaaggctgaggacttgtcctctttgaatggacaactccagtag

SEQ ID NO: 27208 - DNA, 714 bp, synthetic construct
  misc_feature 1..714: note = Description of Artificial Sequence: Synthetic coding sequence
  source 1..714: mol_type = other DNA
atgaagttcaagttgcacgtgaattccgcccgacagtataaggacctgtggaacatgtccgatgataaaccattcctgtgcaccgcccctggctgtggacagaggttcacaaatgaagaccacctggccgtacacaagcacaagcatgaaatgaccctaaaatttggaccagccagaaatgactctgtgatcgttgcggaccaaacccccactcccacaaggtttttgaagaactgtgaggaggttggacttttcaatgaactggcatctccctttgaaaacgagtttaaaaaggcatcggaggatgacattaagaagatgccacttgacctaagccccctggcaacacctatcattcggtctaagattgaggaaccgagtgtggtggaaaccacacatcaggactccccactcccacatcccgaatctacgacctccgatgagaaagaggtaccgcttgctcagaccgcacagcccactagtgcaatcgttcgcccagcaagcttgcaggtgcccaacgttctcctcacctcgtccgacagttcagtgatcatccagcaagcagtcccatcccccacaagctcaacagtcatcacacaggcaccaagctctaacaggccaatcgtttcctttgaccagagtccctggtgcctggtcttccaggagagccaggtgttgccgttacctaatcagtactcccagaagcagaaatag

SEQ ID NO: 27209 - DNA, 1464 bp, synthetic construct
  misc_feature 1..1464: note = Description of Artificial Sequence: Synthetic coding sequence
  source 1..1464: mol_type = other DNA
atgtctgacgacaaaccgtttctctgcacagcgcctggatgcggccagagatttacaaacgaagaccacctagcagtacataagcacaagcacgagatgaccctgaagttcggtccagctcgcaacgactcagtgattgtggctgaccaaacccctacccctacccggttcttgaagaattgtgaagaggtgggactgtttaatgagttagctagcccattcgaaaacgaattcaaaaaagctagcgaggatgatatcaagaagatgccgctcgacctgagccctctagcaacaccgattatcaggtccaaaatcgaggagcctagcgttgtggagaccacccatcaggatagtccactcccccaccccgagagtactacctctgacgagaaggaggtacctctggctcaaacagcccagccaacctcagctattgtgcgcccagctagcttgcaagtccctaatgtgctgctaaccagctccgattcaagcgtgatcatccagcaggccgtgccctccccgacgtcctctacagtgattactcaggcacctagttccaaccgaccaatcgtgcccgttccaggtcctttcccattgctgctgcacctgcccaacgggcagacaatgccagtcgcaattcctgccagcatcactagctctaacgtacacgtgcctgcggcagttcccctggtgcggcctgtcactatggtgcccagcgtaccaggcattcctggccctagcagtccacaacctgtgcaatccgaggctaaaatgcggttgaaggcagccctaactcagcagcatccaccagtgaccaatggagatacggttaaaggacacgggagtggcctggtgagaacacagagcgaggaatcccgcccacaatctctccagcaaccagcaacatctacaacggagacccctgcttcacctgctcataccaccccgcaaacacagtccacatctgggaggcggagacgcgcagcgaatgaggaccctgacgagaagaggaggaaatttttagagcgcaaccgggctgctgctagtcgctgccgccagaagcgtaaagtttgggttcagtctctggagaagaaagcggaggaccttagctcgctgaacgggcagctgcagtccgaagtcaccctcttgagaaacgaagtcgcccagttgaagcagctcctactggcccacaaggactgtccagtgacggctatgcagaagaagagtgggtaccacactgccgacaaagatgatagcagcgaagatatctcagtcccatcctccccccatacagaggccatccagcattccagcgtgtctacatccaacggagtcagttcaacaagcaaggcagaagctgtggcaacgtcagtcctcactcagatggcagatcagtccaccgaaccggctttaagccagatcgtgatggcaccatcctcacagagccaacccagcggctcctag

SEQ ID NO: 27210 - DNA, 1188 bp, synthetic construct
  misc_feature 1..1188: note = Description of Artificial Sequence: Synthetic coding sequence
  source 1..1188: mol_type = other DNA
atgaagttcaagctccacgtgaactcagccagacagtacaaggacctctggaacatgagtgatgataaaccgttcctgtgcacagctccagggtgtggtcaacgctttacaaatgaagaccatcttgcggtgcacaaacacaaacacgagatgaccttaaagttcggaccagccagaaacgattccgtcatagtggctgatcaaacgcctacaccaacgcgctttcttaagaattgtgaggaggttgggctattcaacgaactcgcgtctccttttgagaacgagttcaaaaaagcctccgaggatgacataaagaagatgcccctcgatcttagtccgctggctacccctatcattcggagtaaaattgaggaaccgtccgttgttgagaccacccaccaggacagtcccctaccacatcctgaaagcacaaccagtgacgagaaggaggtacccctggctcagactgctcagccaacatctgctatagtccgcccagcgagtctgcaggttcctaacgttctcctcacatccagtgatagtagtgtgatcattcagcaggccgtcccaagccctacaagcagtactgtgatcacccaagccccatcctccaataggcctattgtgccggtccctgggccttttccacttcttctgcacttgccgaatggccaaactatgccagtggcaattcctgccagtattacttctagtaacgtgcatgtgcccgcagcagttccccttgttagacctgtcacaatggttccctccgtacctggtattccaggcccaagctctccacagcctgtccagtctgaagccaaaatgaggttgaaagcagccctcacacaacagcatcctcctgtaactaatggggatactgtcaagggccacgggtccggccttgtgcgcacccagtccgaagaatctcggcctcaaagtttgcagcagccagcaacaagcactacagagacgcctgctagcccggctcatacgactccccaaacccaatctaccagtggacgccgaagaagagctgccaacgaggaccccgacgagaaaagaagaaagttcctggagaggaatagagcagccgctagtcgttgccgccaaaagaggaaagtctgggtgcagtcgttagagaaaaaagctgaggatctgtcctccttgaacggccagctccagtag

SEQ ID NO: 27211 - DNA, 1188 bp, synthetic construct
  misc_feature 1..1188: note = Description of Artificial Sequence: Synthetic coding sequence
  source 1..1188: mol_type = other DNA
atgaaatttaagctgcacgtaaacagtgctcgacagtataaggacctttggaatatgtccgacgacaagccattcctttgcactgcaccagggtgcggacagcggttcacaaacgaagatcacctggccgtgcacaaacacaaacacgaaatgaccttaaagtttgggcctgcgaggaatgactccgtgattgtggccgaccagacaccgactcccacacgattcctgaaaaattgcgaggaagttggcttgtttaatgagctggcttcacctttcgaaaacgagtttaaaaaggcatccgaggacgacatcaaaaaaatgcctctagatttgagtcctctcgctacaccaattattagaagtaaaatcgaagaaccatcagtcgtggagacaacgcaccaggacagtccccttccccatccagagagcaccacgtccgatgaaaaagaggtcccactcgcccagaccgcccagccaacctcagctatagtaagaccagccagcctccaggtgcccaacgtgcttctgacatccagtgactcttcagttatcatccagcaggccgtgccaagcccaaccagcagtaccgtcatcacccaggctccttccagcaatcgacccatcgtgcctgtgccaggcccatttcccttgcttctgcacctgcctaatggccagaccatgccagtggccataccggcatcgatcacaagctccaacgttcacgtgcccgctgctgtgccactggtgcgccctgtgaccatggtaccttcagtgccaggcattcccggaccaagctcgccccagccagtgcagtctgaggccaaaatgagacttaaagctgctcttacccaacaacaccctccggtgaccaacggggatactgttaaagggcatggctcgggattggtcaggactcagagtgaagagagccgaccccagtcattgcagcagcctgcaacaagcaccactgaaactcccgcaagccctgcccacacaaccccccagacccaatccacatccggaaggagaagacgggcagccaatgaagatcccgatgagaagcggcgaaaattccttgagagaaatcgagccgcagcctcacgatgtcgacagaagaggaaggtgtgggtccaatccctggaaaaaaaggccgaagatctttcgagtctgaatggccaactgcaatag

SEQ ID NO: 27212 - DNA, 660 bp, synthetic construct
  misc_feature 1..660: note = Description of Artificial Sequence: Synthetic coding sequence
  source 1..660: mol_type = other DNA
atgagtgatgataaaccttttctctgtaccgccccaggatgcgggcagcgatttactaacgaggaccatctggcagtacacaaacacaagcacgagatgaccctgaagtttggaccagccaggaacgacagcgttatcgtcgcagaccagacgccaacccctacaagattcttgaaaaattgcgaagaggtgggcttgtttaacgagttggcctcacccttcgagaacgagtttaaaaaagcttcagaggatgacataaagaaaatgcccttagatttaagcccgctggccacccctattattcgatccaaaattgaggagcctagcgtggtggaaacgacacatcaggattcgcccttgcctcatcctgagtctactaccagcgatgagaaagaagtccccttagcacagaccgcgcaacccacctcggcaatcgtgcgcccagccagtctgcaggttcccaacgtactcctgacttcatctgactcgagcgtgattatccagcaagcggtgcccagccccacgagcagcactgtaataacccaggctccctcctctaacaggccaattgtctcgttcgatcagtctccttggtgtctcgtgttccaagagtctcaggtgctgccgctgcccaatcagtattctcagaagcagaagtag

SEQ ID NO: 27213 - DNA, 1134 bp, synthetic construct
  misc_feature 1..1134: note = Description of Artificial Sequence: Synthetic coding sequence
  source 1..1134: mol_type = other DNA
atgagcgacgacaaacccttcctctgtaccgctcccggatgtggccagcgcttcacgaacgaagatcatctggcagtacacaagcataagcatgaaatgactctgaaatttggcccagccaggaacgacagcgtgatcgtagcagatcagactccaaccccgacacggtttttaaagaattgtgaggaagttgggctcttcaacgagctggcctctccatttgaaaatgagtttaaaaaagccagcgaagatgacattaaaaagatgccgctggatctcagtcctctggcgacgcctattatcagaagtaaaatagaagagccttcagtggtagaaaccacacaccaggattctcccttgcctcaccccgagagtaccacttcagacgaaaaagaagtgcctctggcacaaaccgcgcagccaacttcagccatcgtccgacctgcctcactccaggtgcctaatgtactgctgacttctagcgactcctcagttatcatccagcaggccgtaccaagtccgaccagttccacagtgattactcaggcccctagctccaaccgccctatcgtgcctgtgccaggcccattccctctcctgctacacctgccgaatggtcagaccatgccagtggctatccccgcatcaattacctcctctaacgtgcacgtgcccgctgcggtcccactggtcagaccggtgacaatggtgcctagtgtccctggcatccctggcccatcctcacctcaaccagtccagagtgaggccaagatgaggttgaaggccgctctgacacaacagcatcctccagtaactaatggcgatacagtcaagggacatggctcgggattggttcgcacacagagcgaggagtcaaggccacaaagcctgcagcagcccgctaccagcaccacagaaacacctgcctcccctgcccataccactccccagacccagtccacaagtgggagaagacgcagagctgctaatgaggatccagacgaaaagaggagaaagtttctggaacgcaacagagccgctgcgagccgctgtaggcagaagcgaaaagtgtgggtgcagtccctggaaaagaaggccgaagatctgagcagcttgaatggccagctgcagtag

SEQ ID NO: 27214 - DNA, 1449 bp, synthetic construct
  misc_feature 1..1449: note = Description of Artificial Sequence: Synthetic coding sequence
  source 1..1449: mol_type = other DNA
atgaagttcaagctgcatgtgaactcagcccgacagtataaagacctttggaatatgtccgatgacaagccatttctttgcaccgcaccgggttgtggtcagcggttcactaatgaagaccaccttgccgaccagactcctactcctactcgtttcctcaagaattgtgaggaggttggtttgttcaatgagttggcctcccccttcgagaacgaattcaagaaagcgagcgaagacgacataaaaaagatgccgcttgatttatccccacttgccactccgatcatccgctcgaagattgaagagcctagcgtggttgagaccacgcatcaagacagccctctccctcaccctgagagtacaacgtccgacgaaaaagaagtaccgctagctcagaccgcacagccgacgtccgccatcgttcggcctgctagcctgcaggtgccaaacgttctgctcacatcatccgactcttccgtcatcatccagcaggctgtgcccagccccacatctagtactgtcataacacaagccccttcatcaaatagaccaatagtgcctgtcccaggcccatttccgttacttctgcatctgcctaacggccaaacaatgcccgtcgccatccccgcttccatcacatcctctaatgtgcatgtgccagcggctgtacctttggtgcggccagttacaatggtcccgtccgtcccaggcatcccaggaccctcctccccccagcccgtgcagagtgaagccaaaatgagacttaaagctgccctcacacagcagcacccgccagtgactaacggtgacaccgttaagggacacgggagcggcttggtgcgtacccaatctgaggaatctcggccacagagccttcagcagcccgctacatcaaccactgagactccagcctctcccgcacatacaacacctcaaactcagtcaacctcagggagaagaagaagggccgcaaatgaggaccccgatgagaaacgcagaaagtttctcgagcgcaatcgcgcagccgcttcaaggtgtagacaaaagcggaaagtgtgggtgcagtcacttgagaagaaagctgaggacctgagcagcctgaacggccagttgcagagcgaggtcacactgttgcgcaacgaggtcgcacagcttaagcaattattacttgcgcataaggattgtcctgtgaccgctatgcagaagaagtctggctaccacaccgcggacaaggacgactctagtgaagatatatccgttccatcatcaccccacaccgaagcaattcaacattcctccgtgagtacatcaaacggagtgtcaagtaccagtaaagccgaggctgtggctacgtctgtcctgacccagatggcggatcagtcaacggagccagctctgagccagattgttatggcaccaagctctcagagtcagcctagtggcagctag

SEQ ID NO: 27215 - DNA, 2136 bp, synthetic construct
  misc_feature 1..2136: note = Description of Artificial Sequence: Synthetic coding sequence
  source 1..2136: mol_type = other DNA
atgaagttgaaactcaacgtgctcacaatcatcctcctgccggtgcatctgctcattactatatattctgctctcatttttattccctggtactttctgaccaacgccaaaaaaaaaaacgctatggctaagcggatcaaagccaaacccacttctgataagccaggttccccctatagatctgtaacccatttcgatagcctcgcagttatagatatccccggtgcagatacactggataagctcttcgatcatgccgtttcgaaatttgggaagaaggattccctcggaactcgggagatcctcagtgaggagaatgaaatgcagcccaacggaaaggtgttcaaaaaactgatcctcggcaattataagtggatgaactacctggaagtgaaccggagagttaataattttggaagcggcctgactgcactgggtctcaagccgaagaacaccattgccatcttttgtgagacgagagctgaatggatgattgctgcacagacctgtttcaagtacaacttcccactggtcacactatacgccacactcggcaaggaggcggtggttcatggcctcaatgagtcagaggcatcctatttgatcacctccgtggaactgctggaatctaagctgaagacggcccttttagacatatcctgcgttaaacacattatctatgtggataacaaggctattaataaggctgagtacccggaaggttttgagatccactcaatgcagagtgtggaagaattggggtccaatccagagaacctggggattcccccatccaggccaactccaagtgacatggctatagtcatgtatacatctggatccaccggccgtccaaaaggtgtgatgatgcatcatagtaacttgatcgctggtatgacggggcagtgcgagagaataccaggactagggcctaaagacacatatatcgggtacctgccactggcacatgtccttgagctgaccgccgaaatatcctgttttacctacggttgtcgtattggctactctagccccttgacactgagtgatcaatccagcaaaatcaagaagggcagtaaaggagattgcactgtgctgaagcctacactgatggcagccgtgcctgaaattatggacagaatctacaagaacgtcatgagcaaggtccaggaaatgaactacatccagaaaacactcttcaagatcggatacgactacaagcttgagcaaatcaaaaagggctatgatgcccctttatgtaatctcttgttgtttaagaaggtaaaagccctgctggggggtaacgtgagaatgatgctgtcggggggagcccctctgagcccacagacacaccgattcatgaacgtctgcttttgctgtcctatcggccaaggctacggactgacagaaagctgtggcgctggcaccgtgacagaggtaaccgattacacgactgggagagtaggtgctcccttaatctgctgtgaaatcaaattgaaagattggcaggaaggcggatacaccattaatgacaagccgaaccctcgcggagagattgtcatcggcggtcaaaatatttccatgggatattttaaaaatgaggaaaaaactgcagaagattactccgtggacgaaaacggccagcgctggttctgcaccggggatatcggcgagtttcatccagatgggtgtctccagattatagaccgaaagaaagatttggtgaagcttcaggccggagagtacgtgtcattgggaaaggtcgaggccgctctgaagaattgtcctcttatcgataacatttgtgcatttgccaagagtgatcagtcctatgtaatctcatttgtggtgccaaatcagaagagactgaccctactcgctcagcagaagggagtggaaggtacctgggtagacatttgcaacaaccctgccatggaggccgagattctgaaagagattagggaagctgccaacgccatgaaactggagcggtttgagataccaatcaaggtgcggcttagcccggaaccttggacacctgaaacgggcctcgtgactgatgcatttaaactaaagagaaaggagttgcgtaaccactatctcaaggatatcgagaggatgtatggcggtaaatag

SEQ ID NO: 27216 - DNA, 2013 bp, synthetic construct
  misc_feature 1..2013: note = Description of Artificial Sequence: Synthetic coding sequence
  source 1..2013: mol_type = other DNA
atggccaagcgcataaaggccaagccaactagtgataagcctggatctccttaccggagtgtgacacatttcgattctctggccgtgatcgatattccaggcgcagataccctcgataaactcttcgaccatgcggtgagtaaatttggcaagaaggacagtctcggcacaagagagattttatcagaggaaaacgaaatgcagcctaacggaaaggtgttcaagaagttgatcctggggaactataaatggatgaactacctcgaggttaatcgcagggtgaataattttggcagcgggctaactgcgttgggccttaaaccaaaaaatacaatagctatcttctgcgaaacccgcgcagaatggatgatcgcggctcagacatgctttaagtataatttcccactggtcaccctgtacgcaaccctgggcaaggaggctgtagtccacggtctgaacgagagcgaagctagttacttgatcacctcagtggagcttcttgaatctaagctcaaaaccgccttattagatattagctgtgtgaaacatatcatctatgtagacaataaagccattaataaagcagagtatcctgaagggttcgagatccattcaatgcagtcagtggaagaactagggagcaacccggagaatctaggcattcccccaagccgcccaaccccatctgacatggccatcgtcatgtacacgtctggttcaactggcagaccaaagggggtgatgatgcaccacagcaatcttattgccggtatgacgggccagtgcgagcgaatcccaggactcggtcccaaggatacctatattggatatctaccgttagcacacgtactggaattgacagcggagattagctgctttacctatggctgtcggattggttactcctccccacttacattgtcagaccagagttccaaaatcaaaaagggctccaaaggggactgcactgtcctgaagcccactcttatggccgcagtgccagagatcatggatcgtatttataaaaatgtaatgtcaaaggtgcaggaaatgaattacatccagaagacactgttcaagattggatacgactacaagttggagcagataaagaagggatatgacgctccattgtgtaacttgcttctgttcaaaaaggtcaaagccctgcttggcggaaacgtgaggatgatgctatccggtggagcacccctttcccctcagacacatcggttcatgaatgtgtgtttttgctgtcctataggtcagggctacgggttaacagaaagctgcggggcagggacggtgactgaggtgactgattatacaaccgggagagttggcgcaccactgatctgctgcgaaattaagttgaaagattggcaagaagggggttataccatcaacgacaaaccaaacccacggggagagatcgtgataggaggccagaatatttctatgggttatttcaaaaatgaggaaaaaacagcagaggactactctgtagacgaaaatggacagagatggttttgtacaggggatatcggtgagttccaccccgatggatgcctgcagatcatagatcggaaaaaggatcttgttaagctccaggccggagagtatgtgagtcttggaaaggtggaagccgcactaaagaactgcccactcatagataatatctgtgcttttgccaaatctgatcagtcctacgttatctccttcgtggtgcctaaccagaagaggctaaccctgttggcccagcagaaaggcgtggagggcacctgggtagacatctgtaataaccctgccatggaggcggaaatccttaaagaaatacgggaggccgcaaacgcgatgaagctagagcgttttgagatccccattaaagtgcggctcagtcctgaaccatggacccctgagaccgggttagtgaccgatgcctttaagttgaaacgcaaagagctgaggaatcactatctaaaggatattgagcgcatgtacggcggaaaatag

SEQ ID NO: 27217 - DNA, 2136 bp, synthetic construct
  misc_feature 1..2136: note = Description of Artificial Sequence: Synthetic coding sequence
  source 1..2136: mol_type = other DNA
atgaaactaaaactgaatgtgttaacaatcatactgctgccagtccacctccttatcacaatttacagcgcactgatttttattccatggtattttttaactaacgccaaaaagaaaaatgcaatggccaagagaatcaaggcgaagcctaccagtgataagccaggatccccttatagatcagttacccattttgattccctcgcagtcatagatatcccaggggctgacacattagacaagctgttcgatcatgccgtaagcaaattcgggaaaaaggatagtttgggaacaagggagattctgagtgaagagaacgaaatgcaaccaaatgggaaagtgttcaaaaagttaattttaggcaactacaagtggatgaattacctggaagtcaatcgcagggtgaataatttcggtagcgggctcaccgccttgggtctaaaacccaagaacaccatcgctatcttctgcgaaacacgggcagaatggatgatcgctgcccagacatgctttaaatataatttccctcttgttacgctctatgctacattgggcaaggaggccgtagttcatggcctcaacgagtccgaggcttcttatcttattaccagtgtagaactgctggagagcaagctcaagactgctctgctggacattagttgtgtgaagcacatcatctacgtggacaacaaggccatcaataaggccgagtatcctgaagggttcgagatccacagcatgcagtctgtcgaggagctcggatcgaaccccgaaaatttaggcattcccccatcaagaccgacacccagcgatatggccatcgtcatgtatacttctgggagcaccggaaggccaaaaggggtgatgatgcaccacagcaacctcattgccggaatgactgggcagtgtgagaggatcccaggactggggcctaaagacacgtacattggctacctgcctctggctcatgtcctagagttgacggcggaaattagctgttttacttatggctgccggattggctatagttctcctttaacactcagcgaccaatcaagtaagatcaagaaagggagtaagggtgattgtactgttctaaagcccactcttatggccgcagtgcctgaaattatggatagaatttacaagaatgtgatgtccaaggtgcaggagatgaactatatccagaaaacactgttcaaaattggttatgattacaagctagaacaaattaaaaagggttatgacgcaccattatgcaatttgcttctctttaagaaggtgaaggcacttctgggcggaaacgtacgaatgatgttatctggaggggcaccactaagccctcagacacaccgtttcatgaacgtctgcttctgctgccctatcggacaaggttacggcttgaccgaaagctgtggagcgggaactgtgactgaggtgaccgattataccacgggtagagtcggcgctccacttatttgctgcgaaatcaagcttaaggactggcaagaggggggatacactattaatgataagcctaatcccaggggagagattgtcatagggggtcagaacatttccatgggctacttcaagaacgaagaaaaaaccgccgaggattattcagtcgacgagaatggccagcggtggttctgcaccggcgatatcggtgaattccaccctgacggctgtctccagatcatcgaccgaaagaaggacctggtgaaattgcaagcaggggagtacgtgagtttgggaaaggtcgaagctgctctaaaaaattgccccttgatagacaacatttgcgcctttgcaaaatccgatcagagctacgtgatcagcttcgtggtcccaaatcagaagaggctcactctgctggcgcagcaaaagggagtggaaggcacctgggtcgacatctgcaataatcctgctatggaggccgagatccttaaggagatccgagaggccgctaatgcgatgaaattagagagatttgaaatccccatcaaggtgcgtctgagtcccgagccctggacccctgaaacagggcttgtaactgacgccttcaagttgaagaggaaagagcttagaaatcactacctgaaggatatcgagagaatgtacggaggaaagtag

SEQ ID NO: 27218 - DNA, 165 bp, synthetic construct
  misc_feature 1..165: note = Description of Artificial Sequence: Synthetic coding sequence
  source 1..165: mol_type = other DNA
atgaagctcaagctcaatgttctgactatcatccttctccctgttcacctcttgataaccatttattcggcattgatattcattccatggtacttcttgactaacgctaaaaagaagaacgccatggctaagcgaatcaaagccaagccaacatccgacaagtag

SEQ ID NO: 27219 - DNA, 438 bp, synthetic construct
  misc_feature 1..438: note = Description of Artificial Sequence: Synthetic coding sequence
  source 1..438: mol_type = other DNA
atgaaactgaagcttaacgtgctaacaataatcctcctccctgtgcatctcctgatcacaatatattccgccctcatttttattccttggtacttcttgactaacgctaagaagaaaaatgctatggcaaaacgcataaaggcaaagccgacgagcgataagccaggttccccgtaccgttccgtgacccacttcgactcactggctgtgatcgatatccccggtgctgacaccctggacaagctgtttgatcacgccgtaagtaagttcggaaaaaaggatagcctgggaacgcgggaaatactaagtgaggagaacgaaatgcaacccaatggcaaggtatttaagaagttaatcttgggcaattataaatggatgaattacctcgaggtcaatcggagagttaataattttggcagcgggttgaccgctctctag

SEQ ID NO: 27220 - DNA, 381 bp, synthetic construct
  misc_feature 1..381: note = Description of Artificial Sequence: Synthetic coding sequence
  source 1..381: mol_type = other DNA
atgaaactcaaactcaatgtactgactatcatacttctgccggtccatctccttatcaccatctactccgcgctgatctttatcccctggtatttcctgaccaacgcaaaaaaaaagaatgcaatggcgaaacgaataaaggctaaaccaacttccgataaacctggctctccctaccgttccgtcacccattttgacagccttgccgttatagatattcccggagctgacaccttggacaaactgttcgaccacgctgtgagtaaatttgggaagaaggacagtctcggaacccgtgaaattctttcagaggagaacgaaatgcagcctaatggcaaggtgtttaaaaagctgattctgggaaattacaaatggatgtag

SEQ ID NO: 27221 - DNA, 465 bp, synthetic construct
  misc_feature 1..465: note = Description of Artificial Sequence: Synthetic coding sequence
  source 1..465: mol_type = other DNA
atggcgaagcgaatcaaggctaaaccaacctctgataaacccggttcaccttatagatctgtcacacacttcgattctctcgcagtgatagacatacccggtgcagatacacttgataaactctttgaccatgccgtctcaaagtttgggaagaaagactcacttggaacacgggaaatccttagtgaagaaaatgagatgcagcccaatggaaaagtgtttaaaaaactgatattaggcaactacaagtggatgaattatttggaggtgaaccgtcgtgtgaacaatttcggaagtggccttaccgctctcgggcttaagcccaaaaacactatcgcgatattctgcgagacacgtgccgagtggatgattgccgcacaaacctgttttaaatacaatttccctctggtgacgctttacgccacattgggcaaagaggcggttgtgcacggactgaatgagtag

SEQ ID NO: 27222 - DNA, 387 bp, synthetic construct
  misc_feature 1..387: note = Description of Artificial Sequence: Synthetic coding sequence
  source 1..387: mol_type = other DNA
atgaaactcaaacttaatgtactgactatcatcctgctgcctgttcacttgctgattactatctacagtgctttgatattcatcccctggtacttcctgaccaatgccaagaagaagaatgctatggcgaagcgaattaaagcaaaacccacctcggacaaaccaggaagcccttatcgctccgtcactcatttcgactccctggctgtcatcgatattcctggagcagataccctggacaaactcttcgaccacgcagtgagtaaatttggcaagaaagacagcctcggcacgcgcgaaatcctgtcggaggagaacgaaatgcagcctaatggcaaagtgttcaagaagttgatccttggcaattacaaatggatgaattattag

SEQ ID NO: 27223 - DNA, 2475 bp, synthetic construct
  misc_feature 1..2475: note = Description of Artificial Sequence: Synthetic coding sequence
  source 1..2475: mol_type = other DNA
atgcgtcagagcttactctttctcacttcagtcgtccctttcgtgctggccccacgccctcccgacgacccaggctttggacctcaccagaggttggaaaaactggacagtttgctgtccgactacgacattctctccctatctaatatccagcaacactccgtgcggaagagagatctgcagactagcacacacgtcgagacactcttaaccttcagtgcactaaagcgtcacttcaagctttacctcacatcatctacggaaaggttctctcagaattttaaagtggtggttgtagatggcaaaaacgagtccgagtatacggttaagtggcaggacttttttaccggacacgtcgttggcgaacctgactcacgcgtactggcccatatccgggatgatgacgtgataatcaggatcaatacggatggagccgagtataacatcgagccactctggaggttcgtgaacgatactaaagataagcgcatgctggtgtataagtctgaggatatcaaaaacgtgtcgcgtctgcagtcacctaaagtctgcggctatctcaaagttgacaacgaggaactgctcccaaaagggctcgtcgatcgggagcccccagaggagcttgtccaccgtgtgaagaggagggcagacccagaccctatgaaaaacacctgtaagctattggtcgtggcagatcataggttctatcgctacatgggtcgcggagaggagtcaaccaccactaattacctgatcgagctgatcgatcgcgtcgacgatatttacaggaacacaagctgggacaacgccggattcaagggttatggaattcagatcgagcagatccgaattctcaaatccccacaggaagtgaaacccggagaaaagcactataacatggccaagtcgtacccgaacgaggagaaagacgcctgggatgtcaagatgttgctcgagcagtttagctttgatatcgccgaggaggcaagcaaggtatgcctggcccatctcttcacataccaagacttcgatatgggcacccttggactcgcctacgtaggctcgccaagagcgaattcccatgggggagtctgtcctaaagcctattactcaccggtagggaagaaaaacatttacctcaactcgggactgacctccacaaagaattacggtaagaccatactgacaaaagaggcagacttggtgaccacacacgagttaggtcacaacttcggtgcggaacacgatccggacggtctggctgaatgtgcgcctaatgaggatcagggtggcaaatatgtcatgtatcccattgctgtcagcggcgaccatgaaaataacaagatgttctccaattgtagtaagcaatccatctataaaactattgaaagtaaggcccaggagtgcttccaagagaggtcgaataaagtatgcgggaattccagggtggacgaaggtgaggaatgtgacccagggatcatgtatttgaacaacgatacctgctgtaattccgattgtactcttaaagagggggtgcagtgctccgatcggaacagcccatgctgcaagaattgccagttcgagaccgcccagaagaagtgccaggaggccatcaacgccacctgcaaaggagtgtcatactgcacagggaattcatccgaatgccccccacccggaaatgctgaagacgataccgtatgcctcgacctcgggaagtgcaaggacgggaagtgtattcccttctgcgaacgggagcaacagcttgagagctgcgcctgcaacgagacagacaacagctgcaaggtgtgttgtcgcgacctcagcggacggtgtgtcccatatgtcgacgcagagcagaaaaaccttttcttacgtaaaggaaaaccttgcactgtcggattttgtgacatgaacggcaaatgtgagaaacgggtacaagatgtcattgagagattctgggactttatagatcagctttctatcaacacttttggtaagttcctggcagacaacatcgttggttccgttctggtattctcccttatcttctggatcccgttctccattctcgtgcactgtgtggataagaaactggacaagcagtatgagtcactgtcgttattccatccctcaaatgtggaaatgctcagttcgatggattcagcttctgtgcgaattattaaaccctttccagcacctcaaacccccggacgcctgcaacccgctcccgtgatccctagcgcacccgcagctccaaaactggaccaccagagaatggatacaattcaggaagatccgagtacagacagccacatggacgaagatggattcgaaaaagatccgtttcctaattcttccacagcagccaagtcattcgaagatttgactgatcatccagtgactcggtccgagaaggccgcttcttttaagttacagaggcagaatcgggttgactccaaagagacggagtgctag

SEQ ID NO: 27224 - DNA, 777 bp, synthetic construct
  misc_feature 1..777: note = Description of Artificial Sequence: Synthetic coding sequence
  source 1..777: mol_type = other DNA
atgagacagtctctgttatttttgacatccgtagtccctttcgtcctggctccaaggcccccagatgaccccggattcgggcctcaccagcgtcttgaaaagctagattccctactctcagattacgatattctaagccttagtaacatccagcagcattctgtaagaaagagggacctccaaacatcaactcatgtggaaaccctactcacattttcagccctgaagaggcactttaagctgtacctgacctcatccacggagagattttctcaaaatttcaaagtcgtcgttgttgacggcaagaacgaatcagaatacactgttaaatggcaggattttttcacgggtcacgtcgtgggcgagccagacagcagggttttggcccacataagggatgacgatgtgattattcgaatcaacaccgatggcgctgagtataatattgagcccctttggcggtttgtgaatgacaccaaggataaaaggatgctggtttacaaatctgaagatatcaagaacgttagccgtcttcagagtcctaaagtctgcggctatttaaaagttgataacgaggagttgctgccaaaagggctggtggatcgggagcccccagaggagctcgtgcatcgggtgaagcggagggcggaccccgaccctatgaagaacacctgcaaactgctggtcgtggccgaccatcgcttttatcggtacatgggtcgcggagaggagtctactaccaccaactatttgatccatacagatagggccaactag

SEQ ID NO: 27225 - DNA, 2499 bp, synthetic construct
  misc_feature 1..2499: note = Description of Artificial Sequence: Synthetic coding sequence
  source 1..2499: mol_type = other DNA
atgaagccccctggcagctcctcaaggcagcctccattggctggttgctcattagcaggcgcttcatgcggcccacaaagagggcctgcaggctccgtgcctgcttccgcgccagcaagaacgcccccatgccgacttctgctggttctgttgctattgccaccactggccgcaagctcacgaccacgtgcgtggggcgctgctgcaccaagcgcaccacactggaatgagacagccgaaaaaaatttgggagtattagcggacgaggacaataccttacaacaaaatagcagttctaacatctcctactccaacgccatgcagaaagaaattacgttacccagccggctcatctactacatcaatcaggactcagaatctccatatcacgtgctggacacaaaagcgagacaccaacagaagcacaacaaagcagtccatctggcccaagcttctttccagatagaggcattcggatccaaattcattctcgatttaatcctgaataatggcctcctctcatctgactatgtcgagatccactacgagaacggaaaacctcaatatagcaagggcggagaacactgttattatcacgggtcaatcaggggtgtgaaggactcaaaagtggccctttcaacctgcaatggcttacatggcatgtttgaggatgatacattcgtctacatgattgaaccactggagctagtccacgatgagaagagtaccggacggccacatatcatccagaaaacactggcgggtcagtattctaagcaaatgaagaacctgaccatggaaagaggagaccaatggccatttctgagcgagctgcaatggcttaaacgtaggaagcgggctgtgaatcccagcaggggtatttttgaagagatgaagtacctggaattgatgatcgtcaatgaccacaaaacctacaaaaagcaccgctcttcacatgctcatacaaataacttcgcaaaaagcgtggtcaacctggtggacagtatctataaagaacagctgaacacacgggttgtgctggttgccgttgagacctggacagaaaaagaccagatagatattactaccaacccagtgcagatgctccatgaattttcaaagtatagacaacgcataaaacagcacgccgacgccgtccacctgattagccgagtaaccttccactataaacggtcctcactgtcatactttggtggagtatgttcccgtactcgcggagtgggggtgaacgagtatggactccccatggcagtagcacaggttttatcccaatccctcgcacaaaatctgggcattcagtgggaaccgtcaagccgcaaacccaagtgcgattgcacagaatcatggggaggatgtattatggaggaaaccggggtaagccattcaaggaaatttagcaaatgctctattcttgaatatagggatttcctgcagaggggaggaggggcatgcctgttcaaccgacctactaaattgttcgagccaacggagtgcgggaacgggtacgtggaagctggtgaggagtgcgactgtggttttcacgtcgagtgctacggtctctgctgcaagaaatgcagtctaagcaatggtgcacactgtagcgatggcccatgttgtaacaacaccagctgtctgttccaacccagagggtacgagtgcagagatgcagtaaatgaatgtgacatcaccgagtactgtactggtgatagcggacagtgtccacctaacctccacaaacaggatgggtatgcctgcaatcaaaatcagggacgctgctataacggcgagtgtaagactcgggataaccaatgccagtatatctggggtacaaaggcggcagggagcgacaaattctgctacgagaagttgaatacggagggaacggaaaaggggaattgtgggaaggacggcgatcgatggatccaatgctccaagcacgatgtcttctgtggattcctgctttgtaccaacctgaccagggctcctaggattggccagctccaaggagaaataattccaacctctttctaccaccagggcagagtgatcgactgcagtggcgctcacgtcgtcctcgacgacgataccgatgttggctatgtggaggacggcactccttgtggaccaagtatgatgtgcctggacaggaaatgcctgcagattcaggctctgaacatgtctagctgtccacttgactccaaagggaaagtctgctccgggcacggcgtgtgcagtaacgaagctacttgtatatgcgacttcacttgggccggaactgattgctccatccgagatcctgtgcgaaacctccacccaccaaaggacgagggaccgaagggaccatcggcaacaaacttgatcattggcagtattgctggcgctattcttgtggccgctatagtccttggaggtaccgggtgggggttcaagaacgttaagaagagacgcttcgaccccacccagcagggcccaatttag

SEQ ID NO: 27226 - DNA, 2499 bp, synthetic construct
  misc_feature 1..2499: note = Description of Artificial Sequence: Synthetic coding sequence
  source 1..2499: mol_type = other DNA
atgaagcccccaggatcttcgtctaggcagccaccgctggcgggatgttcacttgccggtgcgtcatgtggacctcaaaggggccctgccggatctgtccccgcatctgctccagctcgcacacctccgtgcaggcttctgctcgtcttgctgctgcttcctccactggccgctagttcgcgccctcgcgcttggggggcagctgccccttctgctccccactggaatgaaaccgcagagaagaacctgggggtcctcgccgacgaggataacacactgcagcagaatagctctagtaacatttcctatagtaacgctatgcagaaggaaatcaccttaccttccagacttatttactatattaatcaggacagcgagtcgccctatcatgtgttagatacgaaggctcgacatcagcaaaagcataacaaggctgtccatctcgcccaagcaagcttccagattgaagcatttggctcaaaatttattctggatctgatcctgaacaatggcttgctgagttcggactatgtagaaatccactacgagaatggcaagccccagtactccaaaggcggtgaacactgctattaccacggatcaattagaggagtcaaggattccaaggtggcactgtctacttgtaacggtctgcatgggatgtttgaggacgataccttcgtgtacatgatagagccactggaactagtccacgacgagaaaagcacagggcgtccacatatcattcaaaagacactagccggacagtattctaagcagatgaagaatcttacaatggagcggggtgaccagtggccctttttgagtgaattgcagtggcttaaacggagaaagagagccgtcaacccatctaggggcatattcgaagagatgaagtacctggagctcatgatcgtgaatgatcacaagacctataagaagcacagatcttcccatgcacatacaaacaacttcgcaaagagcgtggtgaacttggtggattcaatctacaaagagcagctaaacacgcgcgtcgttctggtggctgttgagacttggacagaaaaggaccagattgatattactacaaatcctgtgcagatgctacacgaattcagcaaatatagacagcgtatcaagcagcacgctgacgccgtgcacttgatcagccgggtgaccttccattacaaaagaagcagcctgtcttattttgggggtgtgtgtagtcgcacacgtggggtgggagtcaatgaatatggtcttccaatggcagtggcccaagtcttatcccaatctctcgctcagaatctgggcattcagtgggagccatcgagcaggaagcccaagtgcgactgcacagagagctggggcggttgtatcatggaggaaactggggtctcccactcaagaaagttttcaaagtgctccatcttagagtacagggactttctgcaaagagggggtggggcatgtctgttcaaccggcctacgaagctgttcgaaccaaccgaatgcgggaatggatacgtcgaggcaggtgaagaatgtgattgcggattccacgtcgaatgctacggtttgtgctgtaagaagtgtagcctttctaatggagcacattgctctgatggtccatgctgtaataatacctcgtgtctgtttcagcccaggggctatgagtgccgagatgctgtcaacgaatgcgacataaccgaatactgtactggagacagtggacagtgcccaccaaacctgcacaagcaagacggttacgcgtgcaaccagaatcaggggcgttgctataacggtgaatgcaagaccagagacaaccagtgtcagtacatctgggggaccaaggccgcagggtctgacaagttctgttacgagaaacttaacaccgagggcaccgagaagggaaattgtggaaaggatggggatcggtggatccagtgctctaagcacgatgtgttttgtggtttcctgctgtgtacaaaccttaccagggcgcctagaatcggccagttgcagggcgaaattattcccacgtcattctaccaccagggcagggtgatcgattgctctggagcccatgtcgtccttgacgacgacacagacgtgggatacgtcgaagacggaaccccatgtggcccaagcatgatgtgtctagatagaaagtgcctgcagattcaggcgctgaatatgtcctcatgcccactggacagcaaggggaaagtttgcagcgggcacggtgtgtgcagcaacgaggccacatgcatctgtgactttacatgggccggaacagattgctccataagagaccctgttcgcaatctgcatccccctaaagacgaaggcccaaaggtcaacatggcaacctccaggttgataggagccgtagccggtactattcttgctctcggggtgatattcggcggaacgggttggggcatcgagaatgtaaagaagcggagatttgatccaacccagcaggggcctatttag

SEQ ID NO: 27227 - DNA, 2499 bp, synthetic construct
  misc_feature 1..2499: note = Description of Artificial Sequence: Synthetic coding sequence
  source 1..2499: mol_type = other DNA
atgaaacctcccggaagttcaagtcggcaaccccctttggcaggatgcagtctggccggagctagctgtggtccccagcgcggtcccgctggttccgtgccagcgtcagcgccagcacgtactccaccttgtaggttgcttctggtgctccttcttctgccaccccttgcggcaagctctaggcccagggcctggggcgctgccgcaccgagtgcccctcattggaatgaaaccgccgagaaaaaccttggggtattagctgacgaggacaacacactccaacaaaactcaagctctaacatctcatattccaacgctatgcagaaagagatcacccttccgtccaggctgatctactacatcaatcaggactccgaaagcccctaccatgtgctggatacgaaagctcgccaccagcaaaagcacaacaaagccgtacatctggctcaggcctcatttcagattgaagcatttggttctaagttcattcttgatctaatactgaacaacgggttactgtccagtgattatgtcgaaatccattatgagaacggtaagccccagtactctaaagggggtgaacactgctactatcacggttccatcagaggggtgaaagacagtaaggttgctttgtcaacatgcaatggcctgcacggaatgtttgaggatgacacattcgtgtatatgattgagcctctggagctggtacacgacgagaagtctactggcaggcctcacatcatacaaaagactctggctggtcagtactctaagcagatgaagaacttaactatggagcggggagatcagtggccctttctgtccgagctgcaatggctgaagagacgaaagcgagccgtcaacccttcccggggaatttttgaagaaatgaagtacctcgaattaatgatcgtgaatgaccataagacctataaaaagcaccggagctcccacgcacacacgaataattttgccaagtcagtggtcaatcttgtcgattcaatatataaggagcaattgaacacaagagttgtactggtagccgttgagacgtggaccgagaaagaccagatcgacatcactaccaaccccgttcagatgttgcacgaattcagtaagtaccgtcaaagaataaaacagcacgcagacgctgtgcacctgatttctcgcgtcacctttcactataagcggtcaagcctctcttatttcggtggcgtgtgctcaagaaccagaggggtcggagtcaacgaatatgggctaccaatggcagtcgctcaggtgctcagtcaatcactcgctcaaaacctaggcatccagtgggagccctcatcacgcaaacccaaatgcgattgtaccgagtcctggggtggctgcatcatggaggagacaggagtgagtcattcccgcaagttttccaaatgttcaatcctggaatacagggacttcctccagagaggcggtggggcttgtttatttaatcgaccgacaaaactgtttgaacccacagaatgcgggaatggatatgtggaggcaggcgaagagtgcgactgcggcttccacgtcgaatgctatgggctgtgttgtaaaaagtgctcactctctaatggcgctcactgtagcgacggaccctgttgcaacaacacatcttgtctcttccagcctaggggatatgaatgcagagacgcagtgaacgaatgcgacattaccgagtattgtaccggggatagcggccagtgtcccccaaaccttcataaacaggacggctacgcttgtaatcagaatcaggggagatgctacaacggtgagtgtaagacccgcgacaaccagtgtcagtatatatggggtactaaggcggcaggctctgacaagttctgttacgagaaactcaatactgaggggaccgaaaagggaaactgcggaaaagacggtgaccgctggattcagtgtagtaaacacgacgtgttctgcgggtttctgctctgcactaaccttacacgcgctccacggattggccagctgcagggagaaataatcccgactagcttttaccaccagggtcgggttattgattgtagtggagcccacgtcgttctggatgatgatacggatgttggctacgtagaggatggaactccttgtggccctagtatgatgtgcctcgacaggaaatgtctacagatacaggcactgaacatgagttcttgtcctttagactcgaagggtaaggtgtgctctggccatggcgtgtgttctaacgaagctacatgcatatgcgatttcacatgggccggaactgactgctccattcgggacccagtccgtaatctacatccgccaaaggacgaagggcctaaggagatgtcccggcgagaagggtccattctcttaagtaaagccccttctgagagcgccgcactggacggccacaggctagcactgctagacagcggatacgacatcctcgccgcagtgctgctggagctgttatccctgtag

SEQ ID NO: 27228 - DNA, 2100 bp, synthetic construct
  misc_feature 1..2100: note = Description of Artificial Sequence: Synthetic coding sequence
  source 1..2100: mol_type = other DNA
atgcagaaggaaatcaccctgccatctcgactcatctattatatcaaccaggattccgagtctccatatcacgttctagacactaaggccaggcatcagcagaaacacaacaaagccgtgcacctagcccaggcttctttccaaattgaagcatttggatctaagttcattcttgacctcatcttaaacaacggtcttcttagctctgactacgtggaaattcattatgagaatggaaagccccagtattcaaaaggcggagagcattgctattaccacggatcaatccggggagtcaaggatagtaaagttgctctctctacatgcaatggccttcatggtatgttcgaagacgatacattcgtgtatatgatcgagcccctagagctagtccacgacgagaaatccaccggccgacctcacataattcaaaaaacgctggcgggacagtatagcaagcagatgaagaacctcacaatggagagaggggatcaatggccctttctttccgagctgcagtggctaaagagacggaagagggccgtcaatccttcccgaggcatctttgaagagatgaagtatctggagctgatgattgtgaatgatcataaaacttacaagaagcatcgttcaagtcacgcacacaccaataactttgcgaagtcggtagttaacctcgtggacagcatttacaaagagcagctaaacacaagggtggtcttggtggccgtagagacctggacagaaaaagatcaaatcgacatcacgactaaccctgtccaaatgctccacgagtttagtaaataccggcaacgcatcaagcagcacgccgacgctgtgcacctgatttccagagtcacatttcattacaagaggtcctcgttgagctactttggaggagtctgctctcgtacccgaggtgtgggggtaaatgagtatggactgcccatggccgtggcacaagtgctcagccagagtctcgcacagaacctgggcatccaatgggagccgtcctctagaaagccaaaatgcgactgcactgagagctggggaggttgtattatggaagaaactggtgtgtctcactccagaaagttttccaaatgtagcattttagaatatcgggactttctgcagcgcggtgggggtgcctgcctctttaatagacccaccaagctgttcgaacctacagagtgcggaaacggctacgtggaggctggtgaagagtgtgactgcggcttccacgtcgaatgctatggcttatgttgtaagaagtgctccctgtctaacggagcccactgttcagatgggccttgttgtaacaatacgtcgtgtctgttccagcccagagggtacgaatgtcgggatgcagttaatgaatgcgatatcactgagtattgtaccggcgattccggtcagtgtcccccaaacctgcataaacaggatggctacgcttgcaatcaaaaccagggcagatgttacaatggggaatgcaagacgcgcgacaatcagtgtcaatatatatggggcaccaaagccgctggctctgataaattctgctatgagaagctgaacaccgaaggcactgaaaagggtaactgcgggaaagatggcgaccgatggatccaatgcagcaaacacgatgttttctgtggttttttattgtgtactaacctgacccgggcaccaagaatcggccagctacagggggaaattatacccacatcattttaccaccagggccgtgtgattgactgttccggcgctcacgttgttctggatgacgacactgatgttggttatgttgaggacggcaccccgtgtggacccagcatgatgtgcctggacagaaaatgcctacagatccaggctctcaatatgtcttcgtgccctttagattcaaaggacgagggccctaaagcctgttttctaaagcgaactaagtgtaaatcttatcctaaacataggaagtgccaggaggaaaaggtcagatcttatagtgcacgccctcacctcaatcagttacggtggatggacacagctctgcattgttggatcttgggcatgacgtattcccagcagtgctattggaactattag

SEQ ID NO: 27229 - DNA, 324 bp, synthetic construct
  misc_feature 1..324: note = Description of Artificial Sequence: Synthetic coding sequence
  source 1..324: mol_type = other DNA
taacagatccaggccctgaacatgtcctcctgcccactggacagtaagggaaaagtgtgctccggccatggcgtatgttctaatgaggccacatgcatttgcgattttacttgggccggaactgattgttccattcgggacccagtccgcaaccttcaccctcccaaggacgaggggcctaaggaaatgagcaggcgggagggatccattcttctttccaaagcgccttcagagagtgccgcactggacggacacagattagctctgttagatagtggatatgatattctggccgcagtgcttttggaactgctctctctgtag

SEQ ID NO: 27230 - DNA, 8532 bp, synthetic construct
  misc_feature 1..8532: note = Description of Artificial Sequence: Synthetic coding sequence
  source 1..8532: mol_type = other DNA
atggctgcagcctcatatgatcagttgctgaagcaggtggaagcactgaagatggagaacagtaatttgcgccaagaactggaggataactcaaaccacttgaccaaactcgagacagaagccagtaacatgaaggaagtacttaaacaacttcagggttccatcgaggatgaggctatggccagtagcggccagatcgacctccttgaaaggctcaaggagctgaatctggattctagtaattttccaggggtaaagttaaggagcaaaatgagtctgagatcgtacgggagcagagagggctcggtttcatcgcgctcaggcgagtgttcaccagtgccaatgggatcttttccccgaagggggtttgtgaacggctctagagaatccaccggctacctcgaggaattagagaaagaaagatcactgctgctggcagacctagataaggaggaaaaggaaaaagactggtactacgcccagttgcagaatctcaccaaaagaatcgactctttgcctcttaccgagaatttcagcctacaaactgacatgaccaggaggcaacttgagtatgaagccaggcaaattagggttgcgatggaagagcagctgggtacttgccaggatatggagaagcgagcccagcgtaggatcgcaaggatacagcaaatagaaaaggacatccttcggatcaggcagcttttgcagtcgcaagcaacagaagcggaacgaagctcacagaacaagcacgagacaggcagccatgatgcggagcgacagaatgaaggccagggagtgggcgagataaacatggccacctcgggcaatggccagggtagcacaacaagaatggatcacgaaacagcgtcagtgttatcatcgagttccactcacagcgctcctcgtaggttaacctctcatctaggaacaaaagtcgaaatggtctacagtctacttagcatgctggggacacatgataaagacgacatgagcagaacgctattggcaatgagttcctcacaggatagctgcatttccatgagacagtccggttgtctccctttactgatccagttactgcacggcaatgataaggattccgtgttactaggtaacagtagaggatccaaagaggctagggcaagagcaagcgccgctcttcacaacataattcattcacagccggacgacaaaaggggcagaagggagatccgggtacttcatctactggagcagatacgggcttactgcgagacctgctgggagtggcaggaggcacatgaacctgggatggaccaggacaagaaccctatgcccgctcccgtagagcatcagatatgtccggcagtctgcgtgcttatgaagctgtcattcgatgaagagcaccggcatgctatgaatgagctgggcggtctccaggcaatagccgagttgttgcaggtggattgtgagatgtacggtctgaccaatgatcactatagcatcaccctgcgcagatatgccggaatggctttaacgaatctcaccttcggggacgttgcaaacaaagccaccctgtgctcgatgaaagggtgtatgcgagcgctggttgcccagctcaagtctgaatccgaagatctgcagcaggtcatagcttctgttctgaggaacctttcttggcgggctgatgtcaactcaaaaaagaccctgcgtgaggtgggtagcgtcaaagctcttatggagtgcgcgttagaggtcaagaaagagagtaccttgaagagcgtcctgtctgcgctgtggaacctcagcgctcactgtactgaaaataaggcagacatttgcgcagtagatggcgcactcgcgttccttgttggcaccctcacttataggagccagacaaacaccttggccattattgaatctggcggaggaatcctaaggaatgtgtcctccctgatcgccacaaacgaggatcacaggcagatcttgcgagagaataattgtctccaaactctcctgcaacatttaaaatcccactcgctcaccatagtgtccaatgcatgtggcacactgtggaatcttagcgctagaaatccaaaggaccaagaagcattatgggacatgggcgctgtcagtatgctcaaaaacttgattcactccaagcacaagatgattgctatgggctctgccgctgccctgagaaacttgatggcaaaccgtcccgctaagtacaaggacgcaaatattatgtcccccggaagctcactgccgtcacttcacgttaggaagcaaaaggcactcgaagccgagttggacgctcagcacctcagcgagacgttcgataacatcgacaacctgtcgcccaaggcttcccatagatcaaaacagcgccataaacagtccctgtacggagactatgtgttcgataccaatcgacacgatgataaccgcagcgataattttaacaccggtaacatgactgtcttgagtccgtatctcaacaccacagtactgccgtcctcttcatcgtctcggggatcccttgactcttcccgaagtgagaaggacagaagccttgagcgggagagggggattggtctgggcaattatcaccccgcaaccgaaaatccagggacaagtagtaagaggggcctgcagataagcacaactgctgcccaaatcgctaaggttatggaggaagtgtccgccattcatacttcgcaggaggatcgctccagcggtagtacaactgaattgcactgtgtcaccgacgagcgcaatgctctccgtaggtctagtgccgcacacactcactctaatacatataacttcaccaagtccgagaacagtaaccgaacgtgttctatgccttatgcaaaactagagtataagaggtcgtcgaacgattccttgaattctgtttctagcagtgacggctacggcaagcgtggacagatgaagccatccattgagagttacagcgaagacgacgaatcaaagttttgtagctatggccaataccctgccgacctggcccataagatccattcagccaatcacatggacgataatgatggcgagctcgatactcctattaactattccctcaagtatagtgatgagcagctcaacagcggtaggcaatccccttcccagaacgaacgatgggctagacccaaacacattatagaggacgagattaaacagagtgaacagcgccagtcccgcaaccagagcactacttatccagtctatacagagtcaaccgacgacaagcacctaaagttccagcctcactttggacaacaggagtgcgtgtccccctataggagccgaggtgccaacggctcagaaactaatagagtgggcagcaaccacgggatcaatcagaacgttagtcagagcctttgccaggaagatgattatgaggacgacaaacccactaactattccgagcggtattctgaagaggagcagcacgaggaggaggagcggccaaccaactactcaattaagtataacgaagagaagcgacatgtcgaccagccaatcgactacagtcttaaatacgccacagacattccaagtagccagaaacaaagttttagctttagcaagagcagctccggtcaatcgtcaaaaaccgaacatatgtcaagctcttcagagaatacgtccacccccagcagtaatgccaagagacagaaccaactgcatccttcgtctgctcagagccgttcaggacagcctcagaaagccgctacatgcaaagtttcatccatcaaccaagagactattcagacctattgcgtcgaggacacccccatttgtttcagccgctgtagctctctgagctcactgtcatctgccgaggacgaaataggatgtaaccagacgacccaggaggccgactcggccaatactttgcagatcgccgaaatcaaggaaaaaataggcacgcgctcggcagaggaccccgtgagcgaagttcccgcagtttctcaacatccaagaaccaagtcttcacgcctacaggggagttccctgtcatcagaatccgcacggcataaagccgtcgagttctctagtggtgcaaagtctcccagtaagtcaggggcacagactccaaagtcccctcccgaacattacgtgcaggagacgccactgatgttttctcgatgtacgtcagtgagcagcctggattcctttgagtccaggagcatcgccagcagtgtgcaaagcgagccctgtagcggaatggtgtccgggatcattagcccttcggaccttcccgactcgccagggcaaaccatgcctccttcccgctcgaaaacacctcctcctccacctcagaccgcacagaccaaacgcgaggttcctaaaaataaggctccgaccgcagagaagcgtgaaagcggccctaagcaggccgctgtaaacgctgctgtgcagcgtgtgcaagtgcttccggatgccgatacgctcttacatttcgctacagagagtacccccgatgggttctcttgcagctcgtctctgtccgccctctcactggatgagccgtttattcagaaagatgtggaactaaggatcatgccgcctgtgcaggagaacgacaacggcaatgagaccgaatcagaacagccaaaagagagtaatgaaaatcaggagaaagaagccgagaagacgattgatagtgagaaggacctgctggatgactcggacgatgatgacatagagatactggaagagtgcatcatcagcgctatgccaaccaaatcctctaggaaggccaaaaagccagcacagacagcatcgaaattgcccccacctgtggcacggaaaccaagccagctgccagtgtacaagttgcttccttcccagaacaggctccaaccacagaagcatgtgagcttcacgccaggagacgacatgccacgggtgtactgcgttgaaggcactccaattaatttttcaacagccacttctctctcggacctgactattgagtccccccctaatgaactggctgcaggcgagggcgtccgcggaggcgcacagtctggcgaatttgagaagcgtgatacaattcccacggaagggagatctaccgacgaggcgcagggcggaaagacaagttcagtgaccattcccgaactcgacgataataaggcagaggaaggagacatcctcgcagaatgcattaacagcgctatgcccaaggggaagagccacaaaccattccgagtaaagaaaatcatggaccaggtgcaacaagccagcgcctcctcctctgcccctaacaaaaaccagctcgacggaaagaaaaagaagcccacctccccagtcaagccaattccccagaacaccgaataccgaacacgcgttaggaagaacgccgacagtaaaaataatttgaatgccgagcgcgtgttctccgacaataaggattccaagaagcagaaccttaagaataacagcaaagtctttaatgataagctgccgaataatgaggacagagtgcggggtagcttcgcgttcgatagcccgcatcactacactcccatagaaggcacaccttactgtttctcacgtaatgattccctgtcttccttggattttgacgacgatgacgtggacctgtccagagagaaagccgagctgagaaaggccaaggaaaataaggagagcgaagccaaggtaacaagtcacacagagttgacatcgaatcaacaatccgcaaacaaaacccaggcaatcgctaagcaacccataaatagggggcagcctaaaccaattctgcaaaagcagagtactttcccccagtcctctaaagatatacccgaccgcggtgccgcaactgatgagaaacttcagaatttcgccattgagaacaccccagtctgtttctcccacaattcatccctatcaagcctcagtgatatcgaccaggagaataataataaagaaaatgagccaattaaggaaacggagccaccggatagtcagggcgaacccagtaaaccacaggccagtgggtacgcccctaaatcatttcacgtggaagataccccagtgtgttttagtaggaatagctccctctcatccctcagcatcgactcagaggacgacttgctgcaggaatgcatcagtagcgcaatgcccaagaagaagaagccatcaagattgaagggcgataacgagaaacatagtcccagaaacatgggcggaatactgggcgaagatctcaccctcgacctgaaggatatccaacgcccagacagtgagcatggacttagccccgattctgaaaattttgattggaaggccatccaagagggtgccaattcaattgtttcttcacttcaccaggctgcagcagctgcctgtctatcacgacaggcctcatcggacagcgactcgatcctgtcccttaagagcggcattagcttaggctcgccttttcacctcactccagatcaggaggaaaaacccttcacaagcaacaagggcccacgtattctaaaaccaggtgaaaagtccacattggaaaccaagaagatcgagtcagagagtaaggggattaaggggggaaaaaaggtttataagtccttgattactggcaaagttcgctcaaactcagaaatttcgggccagatgaagcagcctttacaggcaaacatgccatcaatttctcggggaagaacaatgatacacatcccgggtgtgcggaacagctcctctagcacctctccagtgagcaagaagggaccacctctgaagaccccggctagtaagtccccttctgaggggcagaccgccacaacctcaccaagaggggcaaagccctctgttaagtccgagctctcccccgtggccagacaaaccagccagattggcggttcctcaaaagctccctccaggagtggcagcagggacagcactccaagccggccagcgcaacagcctctcagccgccctatccaatcacccggaagaaactccatcagtcctgggagaaacgggatttctcctcctaacaagctctcacagctgcctaggaccagtagtccatcgaccgcttccacaaagtcctcgggcagtggcaaaatgagttataccagcccaggacgccaaatgtcacaacaaaatctgactaagcagaccgggcttagtaaaaatgcgagctcgatcccccgttccgaatccgcctccaaagggctcaatcagatgaacaacggcaacggggcaaataagaaggtggaactttcccggatgtcatctaccaagtcctctggcagcgaaagcgaccgatcagaacgtcctgtgcttgttcgccagtctacatttataaaagaggctccttctccgacgcttcgcagaaagcttgaggagtcagcctcatttgaatcgctgtctccgagttccaggccagccagccccactcgttctcaggctcagactcccgttctgagcccatccctgcccgatatgtcactaagtacccacagctccgtccaggccggtgggtggagaaaacttccacctaatttgtcccccacaatcgagtataacgatggcagacctgcaaaacgccacgatatcgcacggtcgcactccgagtcgcccagtcgcctgcccattaataggagcgggacttggaagcgcgagcacagcaagcactccagctccttaccgagggtgtccacgtggcggcgtaccggatcttcatcctctattctctccgccagctcagaatctagcgaaaaggcaaagtccgaggatgaaaagcacgtgaatagcatcagtggaactaagcagtccaaagagaaccaagtctcagctaaggggacttggcggaagattaaggaaaatgaattcagtcctacaaattccacctcacaaacagtgagctctggcgcaaccaacggcgctgaatccaaaacccttatctatcagatggcccctgccgtgtcgaagacagaggacgtgtgggtgagaatagaagattgccccataaacaatcctaggtccggacgcagcccaactgggaacactcctcctgtgattgacagtgtgagcgagaaggccaaccctaacataaaagacagtaaggataatcaggccaagcagaatgtaggtaacgggtctgtccccatgcgcaccgtaggactggagaatagactcaactcatttattcaggtggacgcccctgaccagaagggaactgagataaagcccggacagaacaatccagttccagtctctgaaacaaacgagagcagcatcgtggagcgaacgccatttagcagttcatccagtagcaaacactcttcaccttccggtactgtggccgctcgcgtgaccccattcaactacaatccatccccaaggaagtccagtgctgactcgacgtctgcaaggccctctcaaattcccacacccgtgaataacaacaccaaaaaaagggatagtaaaaccgactccacagagagttcaggcactcaaagcccaaagaggcacagcggttcatacttggtgacctcagtctaa

SEQ ID NO: 27231 - DNA, 8531 bp, synthetic construct
  misc_feature 1..8531: note = Description of Artificial Sequence: Synthetic coding sequence
  source 1..8531: mol_type = other DNA
atggccgctgctagctatgatcagctgctgaagcaggtagaggcgttgaagatggagaatagtaacctacgccaagaacttgaagataattccaaccatctcaccaaactggagaccgaggctagtaacatgaaggaggttctaaagcagctacagggttcgatcgaggatgaagcaatggcctcttcagggcaaattgatcttctcgaacggctcaaggagttaaatcttgatagttctaactttcccggtgtgaagctgaggtcgaagatgtctctgcgatcatacggttccagggaaggatctgtctcctctcgctccggtgagtgcagcccggtgcccatgggctcatttccaaggaggggatttgttaacggtagccgggaatctactggctacctggaagagttggagaaagaaaggagtctgttactggccgacctagacaaggaggagaaggagaaagattggtattacgcgcagctccagaatctgacaaaacgcatcgactcactccccttaaccgagaatttcagtctgcagaccgatatgactcggaggcagctggaatatgaggcccgtcagatccgggtcgccatggaggagcagctggggacatgccaagacatggagaaacgagctcagcggcgaattgccaggattcaacagattgagaaggatatcctgcggatccgacagttgttgcagtcccaggccaccgaagcagagcggagctctcagaataaacacgagactggaagccatgatgcggagaggcagaatgaaggccaaggggttggggagatcaacatggccacatcagggaatggccagggaagcacaaccagaatggatcacgaaaccgccagcgtgttgtccagcagctctacacatagtgcacctcgaagattaacaagccacttgggaacaaaagtcgagatggtgtactcattactgagcatgctaggcacacatgacaaggatgatatgtcaaggacgctgttggcgatgtcttctagccaagactcatgcattagcatgcgacagtctggctgccttcctttactgatccaactgttgcatggcaacgacaaagattcagttctcttgggaaattctagggggagtaaggaagcaagagcacgtgcttccgctgcactgcataacatcatccacagtcagcccgacgacaagaggggcaggcgggaaattcgggtcttgcatctgcttgaacagataagggcttactgtgagacctgctgggagtggcaggaggctcatgaaccaggtatggaccaggacaagaatccaatgccagctcctgtggagcatcagatatgtccagctgtgtgcgtgctgatgaaactgtctttcgatgaagaacaccggcatgcaatgaatgagctgggcggactccaggctatcgcggaactgttacaggttgactgcgagatgtacggactgaccaatgaccactattccatcaccttacgacggtacgcgggaatggctctcacaaatctgacgttcggagacgtcgctaataaagccaccctgtgtagcatgaagggatgtatgcgcgctctggtggcccagctgaagtccgaaagcgaggatctccaacaggtcatcgcctcagtactccggaacttatcttggagggcagatgttaactccaagaagactctccgggaagtagggtctgtgaaggccctgatggaatgcgcactggaggtcaagaaggagtccactctcaagtcagttttgagcgcactatggaacctatcggcgcactgtactgagaacaaagctgatatttgcgcagtggacggtgccctcgcttttttggtgggcacgttgacctaccggagccaaaccaatacactggccatcatcgagtcagggggaggaatcctgaggaacgtgtccagcctaattgcaaccaacgaagaccaccggcagatcctgagggaaaacaattgtctacaaaccctcctccagcatctgaagtcacacagtctgacaattgtgtctaacgcgtgtgggactttgtggaacctgtctgccagaaatcccaaagaccaggaagcactgtgggacatgggagctgtgtcaatgctaaagaacctgatccacagcaagcacaagatgattgccatgggctccgctgccgctctgagaaacctgatggctaacaggcccgctaaatataaggacgcgaatataatgagtcccggttccagcctccctagcctgcatgtgagaaagcaaaaggccctggaggctgaactggacgcacaacatctgagcgaaacatttgacaacatagataacctctcccccaaagctagccatagatccaaacagcgacataagcagagcttatatggcgattatgtgttcgatacaaaccgacacgatgacaacaggagtgataattttaatactgggaacatgaccgtactttccccatatctcaatacaacagtgctgccctctagtagtagctcacgaggctcccttgacagttcccgctcagaaaaagataggtcactggagcgagagaggggaattgggctgggcaactatcaccccgctaccgaaaatccagggacatctagtaaacggggtttgcagatctctaccactgccgctcaaattgcaaaagtaatggaagaggtgtctgctattcatacctcacaggaggatcggtcttccggctccaccacggaactgcactgcgtcacggatgaacggaacgctctgagaaggtcttccgcggcacacacacacagtaacacatataatttcacaaagagcgagaattcaaacagaacttgttctatgccatatgcaaagctcgaatataaaagatcgtccaatgatagtcttaattctgtatcgtcatctgacgggtatggaaaacgcggacagatgaaaccttccatagagtcctattctgaggacgatgagtctaagttctgtagttacggccagtatcctgcagaccttgcccacaaaatccactcagctaatcatatggacgataacgacggggaactagacactcctatcaactattcactgaagtactctgacgaacagctcaattccggtcggcagagcccatcccagaacgagagatgggcgagaccaaaacacatcatcgaggacgaaatcaagcagtcagagcagcggcagagccggaatcagagcacgacataccccgtgtacactgaatctacagatgataaacaccttaaattccaaccacatttcggtcagcaggagtgtgtgtctccgtaccgatctcgcggtgcgaacgggtctgaaacgaatagggtgggctctaatcacggcatcaaccagaatgtctcacagagcctctgccaggaggacgactatgaagatgacaagccgacaaattatagtgagaggtacagcgaggaagaacagcacgaagaagaagaaagaccaaccaactatagtatcaagtataatgaagaaaagcgccacgtcgaccagcctatcgactattctctcaaatatgccaccgacattccgagctcccagaaacaaagttttagttttagtaaatccagttccgggcagagcagcaagactgagcacatgtcgtcgtcttccgaaaacacatctacacccagtagcaacgccaagagacaaaaccagttgcatccctccagcgcgcagtcgcgctcaggtcagccacaaaaagctgcgacttgcaaggtctcaagcatcaatcaggagaccatccaaacctactgtgtcgaggacactcctatttgtttctcaagatgttccagcctctccagcctctctagtgctgaggacgagatcggttgcaaccagaccacgcaggaagccgactctgcaaacaccttgcagatagcagagatcaaagagaagatcgggacacgctccgcggaggatcccgtgagcgaagtgccggcagttagtcagcatcctcgcactaaatcttcccgattgcagggttcttccctgtcctcagaatcagcacgccacaaagcggtcgagttttcctccggcgctaagagtccttctaagtctggggctcaaactccaaaaagcccgccagagcattacgtccaggagactccattaatgttttcccgctgtacaagcgtttctagcctagacagcttcgagtccaggtcaattgcttcttcggtccaatccgagccctgctccggaatggtctcaggaattatcagtccttccgacttaccagattcacccggacagaccatgcccccatcacgctctaagactcctccccctccccctcagacagcccagactaaacgcgaggtgcctaaaaacaaagcaccaactgcggagaagcgagagagtggacccaagcaagccgcagtgaacgctgccgtgcagagagtccaagttctgcccgacgccgacacgctgctgcactttgccacagagtcaacccctgacggattttcgtgctctagctccctgtccgcattatctttggatgaaccatttattcagaaggacgttgagttaaggataatgcctcctgtgcaggagaatgataatggcaacgagacagagagcgagcagccaaaagagtcaaatgagaatcaggaaaaggaggcagaaaaaacaattgatagtgagaaggacctgctggacgattccgacgatgacgatattgagatcttggaggagtgcataatatccgccatgcccactaaatcttccagaaaggcaaaaaagcccgctcaaaccgcctccaaactgccaccacctgtggcaagaaagcctagtcaattgccggtttataagctgctgccttcacagaatcgcttgcaaccgcagaagcatgtctcgtttacaccaggtgatgatatgcccagggtttattgtgtggagggtacgcccataaacttcagtacagccacttctctgagtgatctgaccattgaatctcctcctaatgagcttgcggctggggagggggtcaggggaggagcccagtccggtgaattcgagaaacgagatacaatcccaacggagggacgatcgactgatgaggcacagggcggaaagacttcatcagtaaccatcccggagctcgacgacaacaaggccgaggagggcgatatcttggcagaatgcatcaacagcgccatgccaaaaggtaagtctcacaagccctttcgggtgaagaaaatcatggatcaagtgcagcaagcttccgccagctcgtccgcgccaaataaaaaccaactggatggcaagaaaaaaaagccaacctcacccgtcaaaccgattccacagaatacagagtatcgtaccagagtacgcaagaatgccgactccaaaaataacttaaacgccgagagagttttttcagataacaaagattccaagaaacaaaatttgaagaacaacagtaaagtgtttaatgacaaactgcctaacaacgaagatcgagtccgcggatcattcgctttcgattcaccccaccactataccccaatagagggtacgccctattgcttcagtcgcaatgacagtttgagtagtttagatttcgatgatgacgacgtggacctgagcagagagaaggcagagcttcggaaagccaaggagaacaaggaatccgaagcaaaggttaccagtcacaccgaactgacatccaaccagcaatctgcaaacaagactcaggctatagccaagcagcccatcaaccgagggcagcctaagcccattctccagaagcagagtaccttcccacagtcgagtaaggatataccagaccggggtgctgcaaccgatgaaaagctgcagaatttcgcgatcgaaaatacgccagtctgtttctcccataatagttccctctcctccttatcggatatcgatcaggagaacaataacaaggaaaacgagcccatcaaggaaaccgagccccctgattctcagggcgaaccaagtaagccccaggccagcgggtatgcacccaagtccttccacgttgaggacacgcctgtttgcttctcgcgcaactcctcacttagctccctaagtattgacagtgaagatgacctactgcaggaatgtatttccagcgccatgcccaagaagaagaaaccttcccgtcttaagggtgacaatgagaagcactcccctagaaatatggggggaattttgggcgaggacttgactttggatttgaaagacattcagcgccctgactctgagcatgggctgagccctgactccgaaaacttcgattggaaagccattcaggaaggagctaactcaatcgtgagcagtctgcaccaggcggctgccgcagcatgtctgtcacgccaggcctccagcgatagcgactctatcctgagcctcaaatcagggatctcactcggttccccttttcatcttaccccggaccaggaggagaagcccttcacatccaataaaggcccacgaatcttgaaaccaggagagaaatcaactcttgagactaagaagattgaatcagaaagcaagggcataaaagggggtaagaaagtgtacaaaagtttaatcacaggcaaagtgcggtccaattcagagatctctggtcaaatgaagcagccattgcaggccaatatgccttcaatctctaggggcaggactatgattcatatcccaggagtgcgaaactcgagcagttctacttcgccagtgtcaaaaaaaggcccacctttgaaaactcctgcctctaagtctccttccgaaggacagaccgcaacaacctctccgagaggcgctaagccctccgtcaagtcagagctatctcctgtggctcgccagacctcccagatcggtgggagcagtaaggcaccatctcgcagcggcagccgagactcaaccccgtctaggcctgcgcagcagccccttagcaggccaattcagtcgcccggaagaaattcaatctcgccaggcagaaatgggatcagccctccaaataaactcagccaactgccaagaacatcatctccgagcaccgcctctactaagtccagcggtagtgggaagatgagctacacttctcccggaagacaaatgtcgcagcagaatttaaccaaacaaacaggactctcaaagaacgcttcctcaatccctcgaagcgagagcgcctctaagggcttgaaccagatgaataacggaaacggggctaataaaaaggtggagctgtctcggatgagttctacgaagtcaagcggaagtgaatctgacaggtctgagcggccagttttggttagacaatccacattcatcaaggaagcaccatcccccacactacgaaggaagctcgaggaatcagccagcttcgaaagcctgtccccttctagccgacctgcgagcccaacacggtcccaagcgcagacccccgttctgagtccttccctgcctgatatgtcactctccacccattcttcggtgcaagccggaggctggcggaagttgccacccaacttatcccctaccattgagtataacgacggtcggccagcaaagcgccatgacatagccaggtcccacagcgagtctcctagcagactccccatcaatcgaagtggaacctggaagcgtgagcactctaagcattctagtagtctcccaagagtttcaacgtggaggcgaactggcagcagcagctcaattctgagtgcctccagtgaaagctcagaaaaggcgaagtcagaggatgagaagcacgtgaactcaattagcggcaccaaacagtccaaggaaaaccaggtgtccgcgaagggtacttggcggaagattaaggagaacgagttcagtcctacaaatagcacctctcagacagtgtcaagtggagcaactaacggggcagagagcaagacgcttatatatcagatggcacctgctgtctcaaagactgaggatgtctgggtcagaattgaggactgtcccattaacaatcctcgctcagggcgatctcctaccggcaacacgcctcctgtgatcgattcagtgtctgaaaaggctaaccccaacatcaaagactccaaggacaatcaggccaaacagaacgtgggaaacggcagcgtccccatgcgcacagtcgggctggagaaccgtctgaacagttttatacaggtggacgcccctgatcagaagggcacagagatcaagccaggtcagaacaatcccgtcccagtgtcagagactaacgagtcgagtatcgtggaacgcacacctttttcatcgagctcaagctccaaacattcttctccctccggaactgtggctgccagagtaacgccttttaattataacccatctcctaggaagagtagcgctgattctacttcagctagacccagccagattccaactcccgtgaacaataacactaagaagcgggatagtaaaaccgattctacggagtccagcggcactcagagtcccaagcgacacagtggaagctacctagttaccagtgttta

SEQ ID NO: 27232 - DNA, 8531 bp, synthetic construct
  misc_feature 1..8531: note = Description of Artificial Sequence: Synthetic coding sequence
  source 1..8531: mol_type = other DNA
atggccgctgcctcctacgaccagcttctcaagcaggtggaggctttaaaaatggaaaatagcaacttgaggcaggagctggaagacaacagcaatcacctaaccaagctggaaaccgaggcctcaaacatgaaagaggtgctaaaacagctccaaggctcaattgaggacgaggccatggctagttctggccaaatcgatctcctggagcgcttgaaagaactgaatctcgacagctcaaatttccctggcgttaagctgcggtcaaagatgtcattgcgcagctatgggagtcgggaaggcagcgtgagttctcgaagtggggaatgttcacctgtgcctatggggtcattcccgcgtcgcggattcgtcaatggcagccgtgagagtactggttatctagaggagttagagaaagagagatctctcctcctagccgacttggacaaggaggaaaaagagaaggactggtattacgcccagctccagaatttgaccaagcgcatagacagtctccctctgaccgaaaatttcagcctccagaccgacatgacaaggaggcagctggagtacgaagcgaggcagattcgggttgccatggaggaacagctgggcacgtgtcaggatatggaaaaacgcgcacaaaggagaatcgcaaggattcagcaaatcgaaaaggacattcttcgaatcagacagttgctacagagtcaggcaacagaggcggaacggtcctctcagaataagcacgaaactggcagccacgatgccgaacgtcagaacgaagggcagggagtcggcgagataaatatggccaccagcggaaatgggcaggggagcacaacgcgtatggatcatgagacagcctcagtcctgtctagcagctcaacacattcagcacctcggagacttacgagtcatcttggcacgaaggtggaaatggtgtacagtctactgtctatgctgggcacccatgacaaggatgacatgagcagaactctgttagcaatgagcagttctcaggacagctgtattagcatgaggcagtcgggctgtcttcccttgctcattcagctcttgcatggcaacgacaaagatagtgttttgttaggaaacagccggggatcgaaggaagccagggcccgtgcaagcgcagcgctgcataatatcattcactcacaaccagacgacaaacgaggtaggcgagaaattagagtccttcacctcctcgagcagatcagggcctactgcgaaacttgctgggagtggcaggaggctcacgagcctggcatggaccaggataaaaacccaatgcccgcacctgtggaacaccagatctgcccggcagtgtgtgtgctgatgaaactctcctttgacgaagaacatagacacgcaatgaatgagttaggaggactccaggcgatagctgagctcctgcaggtcgattgtgagatgtacgggctcaccaacgatcattacagtattacactgagaagatacgcgggtatggcactcacaaacctcaccttcggcgacgtggccaataaagcgaccctttgcagtatgaaggggtgcatgcgtgcactcgttgctcaattgaagagcgagtccgaagatctccagcaggtaatcgcatcagtgttaaggaatctttcctggcgtgctgatgtcaactccaagaagacgctgagggaagtgggttcagttaaagccttgatggaatgtgccctggaggtcaagaaggaaagtaccctgaaatccgtgttgagtgccctgtggaatctttctgctcactgcaccgaaaataaagcagacatttgcgcagtggatggggctctggctttcctggttggcacccttacatacagatctcagacaaatacactggccatcattgaaagtggcggtggcattctccgtaatgtgagctctctgatagccaccaacgaagatcataggcagatcttgagagagaataattgcctgcagacattgctccagcacctgaaatcacatagtctcactatcgtatccaatgcttgtggcacactttggaacttgtccgcccgtaaccccaaggatcaagaggcactctgggacatgggggcagtgtccatgctgaaaaatctgatccattccaagcataaaatgatcgcaatgggttcagccgctgcactgaggaatctgatggctaatcggccagctaaatacaaagatgctaatatcatgagcccgggatcttcgttaccatctttgcatgtccgaaaacagaaagccctggaggcagaactggacgctcagcacctgtctgagactttcgataacatcgacaacctgtccccgaaggcaagccaccggtccaagcagcgccacaaacaatccctttatggcgactacgtgtttgacaccaaccgtcatgacgacaatcgctctgataattttaacactggaaatatgacagtcctgtccccgtatctgaacactactgtcctccccagcagctcatcatcccgaggctcactcgatagctcaaggtcagagaaagaccgaagcctcgagcgagagaggggcatcggcctcggcaactaccatcccgctaccgaaaatccgggaaccagtagtaagagagggttacaaatctcaacaactgcggcacaaatagcaaaggtaatggaagaggtaagtgctattcacaccagccaggaggatcgctcaagcggatcaacaacagagctacactgcgtaacggacgagagaaacgccctgagacgctcaagcgcagctcacactcattccaatacatataattttaccaagagtgagaatagtaatcgtacttgcagcatgccctatgccaagctggagtataagcggtcaagtaatgacagcctgaattctgtgtcaagctctgatggatatggtaaacggggacagatgaaaccaagtattgaatcatattccgaggacgatgagtccaagttttgttcgtacgggcagtacccggctgatctggcccataaaattcattccgccaatcatatggatgataacgacggtgaactcgataccccaattaactactctttgaagtacagcgatgagcagctgaacagcggacgccaatcaccatctcagaacgagaggtgggcaagacccaagcatattatcgaagacgagattaagcagagcgagcagagacagagtagaaatcaaagcacaacctatcctgtctatacagagtccacagatgataagcatctgaagtttcaacctcattttggccaacaagagtgcgtgagtccctataggtctcggggagctaacggtagtgagaccaacagggtgggctctaaccacggcatcaaccaaaacgtcagccagtccctgtgtcaagaggatgattatgaggacgacaagcccaccaattatagcgagaggtattcggaggaggagcaacatgaggaagaagagcgtcctacaaattactctattaaatacaatgaagagaaaaggcatgttgatcagcccatcgactatagtttgaaatacgccacagacattccatcgagccaaaagcagtcattctccttctccaagtcatcgagcgggcagtcctcaaaaactgagcacatgtcgtccagcagtgagaatacatctaccccatcatctaacgccaaacgccagaaccaactgcatccaagctccgcacagtcccggtcaggtcagcctcagaaggcggcaacatgtaaagtctcatctattaaccaggagacaattcagacctattgcgttgaggacacccctatctgtttttctaggtgttcttctctgtcctccctctccagtgcagaggatgagatcggctgcaatcaaacaacacaggaagccgactctgccaacaccctgcaaatcgccgagataaaggagaagatcggaacgagatctgccgaggatccggtgtcagaagtgccagcagtctcccagcaccctaggaccaagtcgtcaaggctgcaagggtcatcactgtcttccgagtccgcccgacacaaagcagttgagttctcatccggggctaaatcaccctccaaatctggagcgcaaacaccaaaatcacctccagaacattacgtgcaggagactcccctaatgttttctcggtgtacctccgtgtctagcctggactctttcgaaagccggagtattgcgagctcagtgcagtccgagccctgtagcggcatggtatctgggatcataagcccctctgatctcccagattcacccggacagaccatgccgccttcaagatctaaaacaccacctcccccacctcagacagcacaaactaaacgcgaggtgcccaagaataaggcaccaacggctgaaaagagggagtccggcccaaagcaggccgcagtgaacgccgctgtgcagcgcgtgcaggttctgcccgacgcagatactctgctccacttcgccacagagagcacgcctgatggcttttcttgctcgtcctcgctgtctgccctttctctggacgagccttttatacaaaaagatgtcgagctacgaattatgccacctgttcaggagaacgacaacgggaacgagactgagagcgaacagcccaaggaatcaaatgaaaatcaagagaaggaggcggagaagacaatcgactccgagaaggacctcctggatgacagtgacgacgacgatattgaaatactcgaagaatgcatcatttccgccatgccaaccaagagctcgcggaaagcgaagaaacccgctcagacagcctctaagcttcctccccctgtggccagaaagccatctcagctaccagtctataaacttctgccgtcgcaaaaccggctacagccacaaaagcacgtgagcttcacccccggtgacgatatgcctcgggtttactgcgtggagggtacaccaatcaacttctctacagctacgtctctctccgatctcactatcgagtcaccgccaaacgagttggctgcaggtgagggtgtccgaggcggtgcacagtccggagaattcgaaaaaagagacacaatccctaccgaaggacggtccactgatgaagctcagggtggcaagaccagttcggttacaatccctgagctggacgacaataaagcagaggagggggatatcctcgctgaatgcataaattctgccatgcccaagggtaagagccataagcctttcagagtgaaaaagatcatggaccaggtgcaacaagcctcagcctcaagttcagcacctaacaaaaatcaattggacggtaaaaagaagaagccaacttcacctgtcaaaccgatcccgcagaatactgaatatcggactagagttcgcaagaacgcagacagcaaaaacaatctgaacgcagagcgagttttttccgacaacaaagattctaaaaaacagaacctcaagaacaatagcaaggtctttaatgacaagttgccgaacaacgaggatcgagttcgaggatcgttcgcattcgactcccctcaccattacacacctatcgaagggactccttactgctttagccgcaacgacagtctctcctccctggacttcgatgacgacgatgtcgacttgtcccgcgaaaaagccgagctgcgcaaagccaaggagaataaggagtctgaagcaaaggtgactagtcatacagaactgacatcaaatcaacagagcgctaacaagacacaggcaattgcaaagcagcccatcaatcgtggccagcccaaaccaatcctgcagaaacagagcacgtttccccagtccagtaaagacattccggaccggggagccgctaccgacgagaagctgcaaaacttcgctatagagaatacgcccgtgtgcttcagccacaattcctcactttcttccctcagtgatatcgaccaggagaataataacaaggagaacgagcccattaaggagactgaaccccctgattcgcaaggggaaccctctaaaccacaagcaagcgggtacgctccaaagtcatttcatgttgaagacacccccgtgtgcttcagcagaaactcatccctatcctctctcagcatcgacagcgaggacgacctacttcaagagtgcatctcctcggcaatgcccaagaagaaaaaaccatctcggctgaaaggagacaacgagaagcattctcctagaaatatggggggaattcttggtgaggacctgacgttggacttgaaagacattcagagacctgattcagaacacgggctaagtcctgattccgaaaacttcgactggaaggcaatccaggagggtgccaattctatcgtgagctctctacaccaggccgcagctgcagcctgtctgtcacgccaggccagttctgatagtgatagtattttgagtctgaagtctggtatctcattgggttctccttttcatctgactcccgatcaagaggagaagccgtttacctcaaacaaggggcctcggatcctcaagcccggtgaaaagagtaccctggaaacaaagaagatagagagcgagagcaagggcattaagggtgggaaaaaggtctataagagcttgataaccggtaaagtgcgaagtaactctgagatatctggccagatgaagcaaccactgcaggccaatatgcccagcatctcccgaggcaggacgatgatacatatacccggtgttcggaatagttccagcagtaccagccctgtctcgaagaaaggtcctccattgaagactcccgcatcgaaatccccatccgaggggcagacagctactactagtccacgcggagccaagccaagtgtgaaatcagagctgagtcctgtggcgagacaaacttcacagattgggggttcgagcaaggccccaagtaggtctggatctagagatagtacaccaagccgccctgcccagcagccattgagtcggccaattcagagccctgggcgtaactccatctcccctgggcgtaacgggatctcccccccaaataaattatcccagctgccaagaacctcatcccccagcacggccagtacgaagtcatccggaagtggcaagatgtcatatacaagccctggccgacagatgagccaacaaaatttgacaaagcagacgggactgagcaagaatgcatccagtatccccaggtccgagagtgcctccaagggtctgaaccagatgaacaacggcaacggagctaacaagaaagtggagctctcccgcatgagcagcacaaaatcatctggatctgaatctgatcgcagtgagcgtcccgtcctcgtccggcaaagcacatttattaaggaggctccctctcctaccctccgcaggaagctagaagagtcagcctcctttgaatccctgtccccatcaagccgcccagcaagccccacacgctctcaggcccagactccagttctcagtccctctctcccggacatgtcattgagcacacactctagcgttcaagctggtggttggcggaagttgcctcctaacctcagcccgacaatcgagtacaatgatgggcgacctgcaaagagacatgatatcgcgcgttcacactccgagtcaccatctcgcttgcctattaataggagtggcacatggaaacgagagcattcaaaacacagttcatcgctgcctcgcgtgagcacctggaggcgaacaggctccagctcctccattttgtctgcatccagtgaatcctctgagaaggcaaaaagcgaagatgagaagcatgtgaatagcatctcggggaccaaacagtccaaagagaaccaggtctcagccaaggggacatggcgaaagatcaaagagaatgaattcagccccacaaactcaacatcccaaacagtgagcagcggtgcgaccaacggtgccgaatcaaagacattgatttaccagatggcgcctgctgtatctaagaccgaggacgtatgggttaggatcgaagactgccctatcaataaccccagatcagggagaagccctaccggcaatacacctcctgtcattgatagtgtctccgaaaaggcgaatccaaacattaaggattctaaagataatcaggccaaacagaatgtcggcaacgggagtgttcctatgcgaacggttggcctggagaataggttgaatagcttcatccaggtggacgcgccagaccagaagggtactgagataaaacccggacagaataatcccgtgcctgtctccgagaccaatgagagctccattgtcgaacggacaccatttagctcctcaagttcctctaagcactccagcccttcaggaacagtcgcagccagggtgacgccttttaactataatccgtcaccaaggaaatctagcgctgatagcacatcggccaggccaagtcagattcccacacccgttaacaataacactaagaagagggatagcaaaaccgatagcacggagtccagtgggacacagagtcctaagcgccattcggggtcgtatctagttacatcggtgta

SEQ ID NO: 27233 - DNA, 864 bp, synthetic construct
  misc_feature 1..864: note = Description of Artificial Sequence: Synthetic coding sequence
  source 1..864: mol_type = other DNA
atggccgcagcctcctatgatcagcttttgaaacaggtagaggctctcaaaatggagaattcgaacctgcgacaggagctggaagacaatagcaatcaccttacgaaacttgagactgaagcaagcaatatgaaggaggtgctgaaacagcttcaaggatcaatcgaggatgaggctatggcatcaagcggacagattgaccttcttgagcgactgaaagaattgaatttagactccagtaattttcccggagttaagttgagatctaaaatgagcctcaggtcttatggatcccgcgagggctcagtgagtagccgcagcggcgagtgcagccctgtgcccatgggctccttcccaagacgcggattcgtgaacggctcaagagaatcaaccggttacctggaagagttggagaaggagcggagccttctcctcgctgacctggacaaagaggagaaagaaaaggactggtattatgcgcaactccagaacctgacaaagagaatcgactctctgcctcttacagagaatttcagccttcagacggacatgacacgcaggcaactcgagtatgaagcaaggcagattcgtgtggccatggaggagcagctggggacgtgccaagacatggaaaaaagagcccagaggaggattgcacgaatccagcagattgagaaagatatcttaagaatccgccagctattgcagtctcaggctaccgaagctgagcggagtagccagaacaaacacgagaccggatcccatgacgcagagcgccagaacgaggggcagggcgtgggcgaaatcaacatggctacctccggaaacggacaaatagagaagatgcgcatgttcgaatgttag

SEQ ID NO: 27234 - DNA, 357 bp, synthetic construct
  misc_feature 1..357: note = Description of Artificial Sequence: Synthetic coding sequence
  source 1..357: mol_type = other DNA
atggcagctgcttcctatgatcagctcttaaaacaagtcgaggcattaaaaatggagaattctaatcttcgccaggagctcgaggacaacagcaaccatctcacaaaactcgagaccgaagcctcaaacatgaaggaggtactgaagcagctgcaaggaagcatcgaggacgaggccatggcaagctctgggcaaatcgatctgctggagaggctcaaggaactcaatttagattccagcaacttccctggagtgaagttgcgttctaagatgtccctgaggtcttacggatctcgtgagggatctgtaagctcacggagtggcgaatgcagccccgtgcctatggggagcttctag

SEQ ID NO: 27235 - DNA, 3918 bp, synthetic construct
  misc_feature 1..3918: note = Description of Artificial Sequence: Synthetic coding sequence
  source 1..3918: mol_type = other DNA
atggccgcagcttcttacgatcaacttctgaaacaagtcgaagcgctcaagatggaaaactctaacctcaggcaagagctagaagacaacagtaaccaccttactaaactggagaccgaagcttcaaacatgaaggaagttctcaagcagcttcaaggatccatcgaagacgaggccatggcctcctcgggccaaatcgacttactggaacgcttgaaagagctgaacctggactcatctaatttcccaggcgtgaaactgcggtccaaaatgagtctgcggagttacggatcccgcgaagggagcgtgtcttccaggtctggggagtgttccccagtccctatgggatctttcccaaggagagggttcgtgaacgggagccgcgagtccaccgggtacctcgaggaacttgaaaaggagaggagcctcctattggctgacctggacaaggaagaaaaggaaaaagattggtattatgcacaactgcaaaatctgaccaagagaatagactcactccccctgaccgaaaatttctctctccagactgatatgaccagacgccagctggagtacgaggctcggcagatcagagttgccatggaggagcagctggggacttgtcaggacatggagaagcgagcccaacgcaggatcgcaaggatccagcagatcgagaaagacatcctgcggattcgccagctgttacaatcccaagcaacagaagccgagagatcttcgcagaacaagcatgaaactggcagccatgacgctgagcgccagaacgagggacagggggtcggggagatcaatatggctacgtcagggaatggtcaggggtcgacaacgcggatggaccatgagaccgccagcgttctcagctcatctagcactcatagtgctccacggagacttacatcccacctcgggacaaaggttgagatggtgtattcactgctttccatgttgggcacccacgacaaagatgacatgagtagaactctgcttgccatgtcctcctcacaggacagctgtatctcaatgagacagtctgggtgcctacccttgctgatacaactgctgcatggcaacgataaggactcagtgttgcttggcaactccagaggtagtaaggaggcgagggcgcgagcatcagctgccctgcacaacattatccactctcagcccgacgataagagagggaggcgcgagatcagggtcctgcatctgctggaacagatccgcgcttactgcgaaacttgttgggagtggcaggaagcacatgagcccggaatggaccaggataaaaaccccatgcccgctcccgtcgagcatcagatctgccctgctgtgtgcgttttgatgaagctgagctttgatgaggaacaccggcatgctatgaacgaactgggtggtctgcaggcaattgcagagctactccaggtggattgtgagatgtatggtcttactaatgaccactattccatcacactaaggcgttatgctggaatggcacttaccaacctcacgtttggcgatgtggccaataaggccacgctatgcagtatgaaagggtgtatgcgggcacttgtcgcacagctcaagagtgagtctgaggatcttcagcaggtgatagcaagcgtgttgagaaatctgagctggagggccgatgtgaactcgaagaagaccctgcgcgaagtgggtagcgtcaaggcccttatggagtgtgcactggaggttaaaaaagagagtactctcaagtccgttctttcagctctctggaacctgtccgctcactgcacagaaaacaaagcggatatctgcgccgtggacggggcacttgccttcctggtgggaactctgacataccgttctcagactaatacactggccattatagagagtggaggagggattctgaggaacgtgagtagcctcatagcaacaaacgaagaccatcggcaaatcttgcgcgagaacaactgtctgcagaccctccttcagcacttgaaatctcactctttgacaatcgttagcaacgcatgtggaaccctctggaatttgtcagcccgaaacccaaaggaccaggaggccttgtgggacatgggcgctgtttctatgctcaagaacctgattcattcgaagcacaagatgatagctatgggaagtgctgcggctttgcgcaatctgatggcaaaccgccctgccaagtacaaagatgcaaacatcatgtcaccaggtagtagcctaccttccttacacgtgagaaagcagaaagcgctggaggctgagcttgatgcgcagcatctgagcgaaaccttcgacaatatcgataacctcagccccaaggcatcgcaccgctcgaaacaacgccataaacagagcttatacggcgactacgtttttgatacaaatcggcatgacgacaaccgctccgataacttcaacacaggtaacatgactgtgctgtccccatatttgaatacaaccgtactccctagtagcagctcgtcacgtggcagtctcgactcatctaggtctgagaaggatcgaagcctggaaagagaaaggggaattggactgggaaactatcaccctgccacagaaaacccagggacatctagcaagcgcggactgcagattagcactaccgccgcacaaattgccaaagtgatggaagaggttagcgccatccacacaagtcaggaagaccggtcctctggatctaccactgaactgcattgcgtcaccgatgagcggaatgcactgcggagaagctccgcggcacacacccatagcaacacctataacttcactaagtccgaaaactctaataggacctgtagtatgccatacgccaagctcgagtataaacggagttccaacgattccctgaattccgttagtagctctgacggatacggaaagagggggcaaatgaaacctagtatcgagagttactccgaagacgatgagtctaaattctgttcatacggccaatatccagcggacctggctcacaagattcacagcgccaatcatatggatgataacgacggggaactggacactcccattaactattcactcaaatattcagatgaacaacttaatagcggcagacagtccccttcacagaatgagcgctgggcacgaccaaagcacattattgaagatgaaattaagcagagtgaacagaggcagtcgcgtaaccagtcgacaacttaccctgtgtacacggagagtaccgacgacaaacacctgaaatttcaacctcacttcggccagcaagagtgtgtttcaccttacagatcaaggggtgccaacggttccgagacgaatcgggtgggcagtaatcacgggattaaccagaatgtttcgcagtccctgtgtcaagaagacgattatgaagatgacaagcccacgaactactcggaaagatatagtgaggaagagcagcatgaagaggaggagcgtccgactaattacagcattaaatataacgaagaaaaacgccacgtggaccagcctattgactactccctgaaatatgctacggatataccaagctctcagaagcagtctttctcatttagcaagagcagtagtgggcagagtagcaaaactgagcatatgagtagttcgagtgaaaacacctctactccgtcttcaaatgctaaaaggcagaaccagttgcatccaagtagcgctcagtctcgttccggacaaccacaaaaggccgctacgtgtaaagtgagttcaattaatcaagagaccattcagacatactgcgtcgaagatacccccatctgcttctccagatgtagctcactgtcctctctgtcaagcgctgaggacgaaatcggctgcaaccaaacaacgcaggaggcagactctgccaacacacttcaaatcgcctag

SEQ ID NO: 27236 - DNA, 2796 bp, synthetic construct
  misc_feature 1..2796: note = Description of Artificial Sequence: Synthetic coding sequence
  source 1..2796: mol_type = other DNA
atggccgagatcaaggagaagatctgtgactacctgttcaatgtgtctgactcctctgctttgaatctcgcaaagaatatcggccttacaaaggcccgtgatatcaacgccgtgctgatcgatatggagcggcaaggtgatgtgtatcgacagggaacaacacctcctatttggcacctgactgacaagaaacgggaacggatgcagatcaagaggaacactaatagtgtgcccgaaacggcccctgcggctatcccggaaactaaacgaaacgctgagttcctgacctgcaacatccctacctccaacgcctccaataacatggtcactaccgaaaaggtagaaaatggtcaagaacctgtgatcaagctggagaatcgccaggaggcccgtccggaacccgcaagactcaagccccctgtgcactataacggaccctctaaagccggatacgtcgattttgagaacggacagtgggctacagatgatatcccggacgacctgaactccattagggctgcccctggggaattcagggccataatggagatgccatccttttattcacatggacttccacgctgtagcccgtacaagaagcttacggagtgtcagttgaagaaccccattagtggcctgctcgaatatgctcagttcgcaagccagacgtgtgaatttaacatgatcgaacaaagtggccctccccacgaacctagattcaagtttcaagtcgtgattaacggtcgagaattccctccagccgaggccggttctaagaaagtggcaaagcaggacgcagcaatgaaggccatgacaattctcctggaggaagctaaggcaaaggattctggcaagagcgaagagtcttctcactactccactgagaaggagtctgagaagaccgccgaatcacagacaccgactccgagtgctacctcattcttttcgggcaagtctcctgtgaccacacttcttgaatgcatgcataagctaggcaattcctgcgagttcaggttgctgagtaaagaaggccctgctcacgagccgaagttccagtactgcgttgctgtaggagcacagacttttcccagcgtgagtgccccaagtaaaaaggtggcaaagcagatggctgctgaggaagccatgaaagcgttacatggcgaagcgactaatagcatggcaagcgacaaccaaccggaaggcatgatcagcgagagcctcgataacctcgaaagtatgatgcctaacaaagtgagaaaaatcggcgagctcgttcgctacctcaataccaatccagtcgggggacttctcgagtacgcccgatcacacgggtttgccgctgagttcaagctggtcgatcagtcaggcccaccacacgaacccaagtttgtgtaccaagccaaggtcggagggagatggtttcccgctgtgtgcgcccactctaaaaagcaaggaaagcaggaggcagcggatgctgcattacgtgtacttatcggggagaacgaaaaagcagagcgcatgggcttcaccgaggtcacccctgtgacaggcgcttcgctgagaaggaccatgctcctgcttagcagaagtccggaagcccagcccaagacactccctctcacggggtccaccttccatgaccagatcgccatgctgtctcatcgttgctttaataccctaactaattcctttcaaccatccttactggggagaaagatcttagccgcaatcataatgaaaaaggactctgaagacatgggcgttgtggttagcttgggcacgggcaatagatgcgttaagggagattccctgagccttaagggcgagactgtcaacgattgccacgctgagataatcagccgtcggggatttattaggtttctttacagcgaactgatgaaatacaactcgcaaaccgctaaagatagtattttcgagccagccaaagggggtgaaaagctccagatcaagaaaaccgtgagcttccatctctatatttccacagcgccatgtggagatggcgctcttttcgacaaaagctgctcagacagagctatggagagcacagaaagcagacactaccctgtgtttgagaacccaaaacaagggaagctgcgcaccaaggtggagaacggtgaggggaccatacccgtggagagttccgacatagttcccacttgggacggcattagactgggggagcggttaaggaccatgagttgctcagacaaaatccttagatggaacgtgctgggcctacagggagcactactgacacatttcttgcagccaatttatctgaaatcagtgaccctgggttatctcttctcccaggggcatctgactcgagctatttgctgccgtgtgacacgagatggctcagcttttgaggacggcctgaggcatccgttcattgtgaaccatccaaaggtggggagggtctcaatatatgatagcaaacggcaaagtggcaaaacgaaggaaacatctgtcaactggtgcctagcagatggctatgacctcgagattttagatggtacacggggaacagtagacgggccaaggaatgaactgagcagagtgagcaagaagaatatctttctgctgttcaagaagttgtgttcattccggtataggcgcgatctgcttaggctctcctacggcgaggcgaagaaggccgcaagagactatgaaactgctaagaactatttcaagaaggggctaaaagatatgggttacggaaactggataagcaagccacaggaggaaaagaatttttacctctgccctgtatag

SEQ ID NO: 27237 - DNA, 3681 bp, synthetic construct
  misc_feature 1..3681: note = Description of Artificial Sequence: Synthetic coding sequence
  source 1..3681: mol_type = other DNA
atgaacccacgccagggatactcgctgtcaggatattacacgcatcctttccagggatatgaacatcggcagttgcgttatcagcagcccggtccaggctctagcccctccagcttcctgctaaaacagatagaattcttaaaggggcagttacccgaggctcccgtgattggtaagcagactcccagcctgccccctagtctgcccggacttaggcctcgatttcccgtgctccttgcatccagcacccggggtcgacaggtggacatccgcggtgtcccgaggggcgtgcacttaagaagccagggcctgcagcggggatttcagcacccatcccctagaggcaggtctcttcctcagcgtggcgttgattgcctctcgtcgcatttccaagagctttccatctatcaggaccaggaacaacggatccttaaatttctggaggaactgggagaaggcaaggccactactgcccacgacctgagtggtaaactgggcaccccaaagaaggagattaatcgcgtcctgtactcgctggctaagaaggggaagcttcagaaggaggccggaactccccctctgtggaaaattgctgtgtcaacacaggcctggaaccagcactccggcgtagttagaccagacgggcacagtcaaggcgctccaaatagcgatccgtccctggaacctgaagaccggaactcgacctccgtctccgaggacctcctggagcctttcatagcggtctcagcacaggcatggaaccagcactccggagtcgtgcgtccagattcccactcacagggctctcctaatagtgacccgggtttggagcccgaggactcaaactctacctcagcactggaggaccctttggagtttttagacatggccgagattaaagagaagatctgcgattacctgtttaacgtgtccgattcttctgccctgaacctagcgaagaatattggcctgactaaggccagggatattaatgccgtactgatcgacatggagcgacagggggacgtgtatcgccagggaacgactccacccatttggcaccttacggacaaaaagagagaacgaatgcagattaagcgcaacaccaattcagtccccgagaccgctcccgctgcaattcccgagaccaagcgcaacgccgaattcctgacctgcaacattccgacgagcaacgcatcaaacaatatggtgacaactgagaaagttgaaaacgggcaggaacccgtgatcaaactagagaatcgtcaggaggcacggcctgagcccgctcgtttaaagcccccagtccactacaacggtccttctaaggcaggctacgtggattttgagaatggccagtgggccacagacgatattcccgatgaccttaactcaattagagctgcgccaggcgaattccgtgcgatcatggagatgccttccttttacagccatggtttgcctagatgttccccttacaagaagctgactgagtgccagcttaaaaaccctatctctggcttacttgaatatgcacaattcgcttcccagacttgtgagttcaatatgattgagcagtcagggccacctcatgaacccaggtttaaattccaggttgtcataaacgggagagaattcccccctgccgaggccggtagcaaaaaagtggccaaacaggacgcagctatgaaagcaatgacaattctgctggaagaggctaaagctaaggacagcggcaagagtgaggaaagcagccattatagcacagagaaagagagcgaaaagacagcagagagtcagacgcctacaccctcagccacttcgttcttttccggcaaatcgccagtgaccactctgctcgaatgcatgcacaaactgggcaactcctgcgagtttcggctcttgagcaaagaaggacccgctcacgagcccaaattccagtactgcgttgcagtgggcgctcagacattccctagtgtgtctgccccttccaagaaggtggcaaagcaaatggcagcggaggaagccatgaaggcactccacggcgaggctacaaacagcatggcctccgataatcagccagagggtatgatctcggagagcctggacaatctcgagtcaatgatgccaaacaaagttcgcaaaatcggtgagctggttaggtacctcaacaccaatcctgtgggcggactactggagtatgcaaggagtcatggattcgccgctgaattcaagttggttgatcagtctgggcctccccatgaacccaagttcgtgtatcaggcaaaggtgggcggtagatggttccctgccgtgtgtgctcatagtaagaaacagggcaaacaggaagccgcagacgcggctttgcgggtgttgattggggagaacgaaaaagcagaaagaatggggttcacagaagtcactcctgttaccggcgcatccctgaggagaaccatgttgttattgtctcggagcccagaggcccagccgaagacactgccactcactggctcaacgtttcacgaccaaatcgctatgctgtcccaccgctgttttaacaccttgactaactcctttcagccgtccttattgggcaggaagatcctggccgctatcataatgaaaaaagattctgaagacatgggtgtggtagtgtctctgggtactgggaatagatgtgtcaagggggactcgctctctctcaagggcgagaccgtaaatgactgccacgcagaaatcattagccgtcgaggttttattaggttcttatattcagaactgatgaagtacaatagccaaaccgccaaagacagtatctttgagccagcgaaggggggagaaaaactgcagataaagaagacggtctcatttcatttgtatatttctaccgcaccctgtggggacggggcattatttgacaagtcttgttcagaccgggcaatggagtcaactgaatctaggcactatcctgtgtttgagaatcccaaacagggaaagcttaggactaaagtggaaaacggtgaaggcactatccccgtagaaagttctgatatagttccaacctgggatgggattaggctcggagaacgcctgcggaccatgagttgctccgacaagatccttcggtggaatgttctaggattgcagggcgcattgctcactcacttcttgcaacctatatacttgaaatccgtaactttgggctacctattcagtcaaggccatttgaccagggccatctgttgtcgggtgactcgcgatggaagcgcgtttgaggacggcctcagacacccattcatcgtcaatcaccccaaggtgggacgcgttagtatttacgattctaaacgacagtctggcaagactaaagaaacctcagtcaattggtgcctcgccgatggatatgaccttgagatactggacggtacccggggaactgttgatggcccacgcaacgagttatcacgggtctctaaaaagaatatttttctgctttttaagaagctgtgctcgttcagataccgacgggatctgttgcgcctgagctacggagaggctaaaaaagccgcaagggattacgaaaccgctaagaactacttcaagaagggcctcaaagatatggggtacggaaactggataagcaagcctcaagaagagaagaatttttacctgtgccctgtttag

SEQ ID NO: 27238 - DNA, 3588 bp, synthetic construct
  misc_feature 1..3588: note = Description of Artificial Sequence: Synthetic coding sequence
  source 1..3588: mol_type = other DNA
gggtactctctgtctgggtattatacccacccatttcaagggtacgagcatagacagcttcggtatcagcagcctgggcctgggtctagtcccagctctttcctgctgaagcagattgagtttttgaaaggtcagctgcctgaggccccagtcataggaaaacagacaccaagtctgcccccatcgctacccggacttcgcccacggtttccagtcctgcttgcaagctcaacccgcggtcgccaagtggatattagaggtgtaccccgtggggtccatctgcgcagccagggcctgcaaagagggttccaacacccaagccccaggggtcgcagtttgccacagcgcggtgtggattgcctatctagtcactttcaggagctttccatatatcaagatcaggagcagcggatcctgaagttcttagaggagctaggggagggtaaggcaaccaccgcccacgatttgtccggcaaactggggactccaaagaaggaaatcaatcgggtgctctatagtctggcaaaaaagggaaagctccagaaagaagcaggaacacctcccctgtggaagatcgccgtcagcacgcaagcgtggaaccagcactcaggcgtcgtgcggccagacggccacagccagggcgctccaaatagtgatcccagcctcgagccagaggaccgcaactcaacctccgtgtctgaagacttactcgagcctttcatagcggtcagcgcccaggcttggaaccagcattcgggggtcgtgcggccagacagccatagtcagggttctcccaactccgacccaggtctagaacccgaggactctaactcaacttctgctctggaggatcccctagagtttttagacatggccgaaatcaaagagaagatatgtgactatcttttcaatgtgtcagattccagcgctttaaatctcgcgaagaatataggtctgacgaaggctcgcgatatcaacgccgtcctgatcgacatggagaggcaaggtgacgtgtatagacagggaacgactccccctatctggcacctcaccgacaaaaagagggaacgcatgcagatcaagcggaatactaattctgtaccagagactgcccctgccgctatccccgaaactaagagaaacgccgagtttctcacatgcaacattccaacttcaaacgcatccaataatatggtgacaactgagaaggtggaaaatggacaagagcccgtcatcaaactggaaaacaggcaggaggccaggcctgagccagcacgcctgaagccaccggtgcattacaatgggcctagcaaggcaggctacgtggactttgaaaacggacaatgggctacggacgacattcccgacgaccttaattcaattcgggctgcccctggcgaattcagggctatcatggagatgccttctttctacagtcatggactcccccgttgctctccttacaagaaactcactgagtgccagctaaagaaccctatcagcggactcctcgaatatgcacagttcgcttctcagacttgtgagttcaatatgattgagcagagtggcccaccgcatgagcctcgcttcaagttccaagtggtgattaatggcagggaattccccccagccgaggccggaagcaagaaagtggcaaagcaggatgccgcaatgaaggccatgactatcctgttggaggaggccaaggccaaggactcgggtaaatccgaagagtcctcacattattcaactgaaaaggagagtgaaaagacagcagagagtcaaaccccaacccccagtgctacgtcgttctttagcggcaagtcccccgtcacgacgctgctcgagtgcatgcataaactgggaaattcctgtgaatttcgtttgctgtctaaggagggccctgcgcatgaacctaaatttcagtactgtgtcgcggtgggtgcccagaccttccctagcgtttccgcaccaagtaagaaggtcgcgaagcagatggctgccgaggaagcaatgaaggctttgcatggcgaagctacaaactccatggcaagtgataatcaacccgaaggcatgatatccgaaagcctcgacaacctcgagtctatgatgccaaacaaggtgaggaagatcggcgagctggtgaggtacctcaatacaaacccagtcgggggactgcttgagtatgctaggtcccacggatttgccgcagaatttaagctggtagatcagagcggtccgcctcacgaaccaaagttcgtatatcaggcaaaagtgggaggacgctggttcccggctgtgtgcgcacacagcaaaaaacaggggaagcaggaagccgctgacgctgccctgagggtgctgatcggagagaacgaaaaggccgaacgcatgggatttacagaactgcccctgactggatcgactttccacgatcagatcgcaatgctgtcacatcggtgcttcaatacactaaccaattctttccagccttcgctccttggcagaaagatactggccgctattattatgaaaaaggactcagaagacatgggcgtggtggtgagcctgggcactggaaacagatgcgttaagggcgacagcctcagtttaaagggtgaaaccgtgaatgactgtcacgcagagatcatctctagacgtggtttcataaggttcctgtattctgaactcatgaagtacaatagccagacagcaaaagattccattttcgagccagccaaagggggagagaagctccagattaagaaaaccgtctcatttcacctatatatcagcaccgctccatgtggtgacggtgcactgttcgataagtcatgttccgacagagctatggaaagtacagagagcaggcattatcccgtgttcgaaaaccctaagcagggtaagctcaggaccaaagtggagaacggggaaggaacaattccagtcgaaagctctgatatcgttccaacatgggacgggattcgactcggcgaacgcctacgcactatgtcatgtagcgacaagattctgcgctggaatgttctcggcctacagggcgcattactgacacacttcctgcagcctatctacctgaaatcagtgaccttgggctacctgttcagccaggggcacctgacgagggctatatgctgtcgcgtgacacgggatggcagcgctttcgaggacggacttaggcatccgttcatcgttaaccaccctaaggttggaagagtttccatttatgattcgaaacggcagagtggaaaaactaaggagactagcgtgaattggtgcctggctgacggttacgatctggagatcctggacggcacaaggggaaccgtggacggtccacgcaatgagctaagccgggtgtctaaaaaaaatatctttctgttatttaaaaaactgtgtagctttagataccggagagatctgctgagactgtcctacggggaggccaagaaagcagctagagattatgagaccgctaaaaactactttaaaaagggcctaaaagatatgggatacggtaactggataagtaagccacaggaagaaaaaaatttttatctgtgtccggtgtag

SEQ ID NO: 27239 - DNA, 528 bp, synthetic construct
  misc_feature 1..528: note = Description of Artificial Sequence: Synthetic coding sequence
  source 1..528: mol_type = other DNA
atgggcaaagtgctgagcaaaatttttggtaataaggagatgcggatcctgatgttaggtctggacgccgctggcaagacaacgattttatacaaactcaaactcggccagagtgtgaccacaatccctacagtaggatttaacgtcgagaccgttacctataagaatgtgaaattcaacgtgtgggacgttggaggccaggataagatacgaccgctttggaggcactactatactggaacacaggggctcattttcgtcgtcgattgcgccgatcgtgacagaatagatgaggcgagacaggagctgcatagaattataaacgacagggaaatgagggacgcgattatcctcatcttcgccaacaagcaggacttgcctgacgcaatgaagccacacgagatacaggagaagctgggattaacccgaatccgagacaggaattggtacgtacagccatcatgcgccaccagcggtgatggtttgtatgagggactgacctggctgacctcaaactacaaatcctag

SEQ ID NO: 27240 - DNA, 1398 bp, synthetic construct
  misc_feature 1..1398: note = Description of Artificial Sequence: Synthetic coding sequence
  source 1..1398: mol_type = other DNA
atgtttaggcaagagcagccactggcggagggctcttttgctccaatgggaagcctacaaccggacgccggtaacgcctcatggaacggcactgaagcccctgggggaggagcccgtgccaccccttacagtctacaggtgactctcacccttgtctgtctcgctggcctgctcatgttgctaacagtgtttggcaacgttttagtcataatcgccgtatttacctctcgggctcttaaagcgccacagaacttatttttggtatccctcgcctccgctgacattctagttgctacactggtaatcccttttagtctcgctaatgaggtgatgggatattggtactttggtaaggcttggtgtgagatctaccttgctctagatgtgctcttttgtacgtcatctatcgtacacctatgcgccatttcactagataggtattggtcaatcacacaggccattgagtacaacctgaagagaaccccccgtaggataaaggctataatcataacggtttgggttatctctgctgtcatcagttttccaccactcattagcatcgaaaagaagggtgggggtggcggaccccagcctgctgagcctcgttgcgaaatcaacgaccagaagtggtacgtgatctcatcctgtataggatccttcttcgccccatgcctgatcatgatcctggtctacgtgcggatctaccaaatcgctaaacggcgtacaagggtgccgcctagtcgcagaggaccagacgctgtggcggcacctccaggtggcacagagaggagacccaatggcctgggccctgaaagatcggccggacccggtggagccgaggcagaacccctgcccacccaactcaacggggctcctggagaacccgctcctgcaggccctcgtgatacagatgcccttgatctcgaagagtcctctagttccgaccacgccgaacggcctcctggaccacggaggcctgagcgaggccctcgagggaagggtaaagcacgggctagccaggtgaagccgggagactctctgccacgcagaggaccaggagcgaccggaattggaacacccgctgctggaccaggggaggagcgagtgggcgctgcaaaggctagtaggtggcgaggcaggcagaacagggaaaagcgattcacatttgtgttggccgtggtgattggtgtcttcgtcgtctgctggtttccttttttcttcacatacaccctcacagccgtcgggtgtagtgtaccccgtaccctttttaagttctttttctggtttggttactgtaacagcagcctgaatccagtgatctacaccattttcaatcacgattttagacgtgcctttaaaaagattctttgccggggagaccgcaagcgcattgtttag

SEQ ID NO: 27241 - DNA, 285 bp, synthetic construct
  misc_feature 1..285: note = Description of Artificial Sequence: Synthetic coding sequence
  source 1..285: mol_type = other DNA
atggccccactgaagatgcttgctcttgtgacccttctcttgggagcaagtctacagcatattcatgcggctcggggtaccaacgttggcagggaatgctgtttggaatatttcaagggtgctattccactacgcaaattgaaaacttggtaccagactagcgaggattgttctcgagatgcaattgtctttgtgactgtccagggaagagccatatgctctgatcccaataacaaacgcgtaaaaaatgcagtgaaatatctgcagtcacttgaaagatcctag

SEQ ID NO: 27242 - DNA, 1635 bp, synthetic construct
  misc_feature 1..1635: note = Description of Artificial Sequence: Synthetic coding sequence
  source 1..1635: mol_type = other DNA
atgccaggccgttgtcagtccgatgccgcaatgagggtaaacggtccagcaagccgggctccagcgggatggacttcggggagcttgcacacagggccaagggctgggagaccacgagcacaggcgaggggcgttcgaggcaggggcttactactgaggcctcggcctgccaaggaactccctctgccccgtaagggaggcgcttgggcacccgctggaaatccaggacctttacatcccctgggggttgcggtcggaatggcgggaagcggacggttagtgctgagaccctggatcagggaactgattctggggtccgagacaccatcttcacctcgtgctggccagctgctggaagtgcttcaggacgctgaggccgcagtcgcagggccatcacacgccccagataccagtgacgttggggctactctactggtgagtgacggcacccacagcgtgcggtgtctggtaaccagggaagctttggacacatcagactgggaagaaaaggagttcggctttagggggacagagggcaggctgctactccttcaggactgcggagttcatgtgcaggtcgcagaaggcggagcgcctgccgagttttacctgcaggtcgatcggttcagtctgcttccgaccgaacagcccaggcttcgggtgccaggctgtaaccaggatttggacgtgcagaaaaagctgtatgattgtctagaagagcacctctcagagtcaacatctagtaatgccggactgagcctgtcccagcttctcgatgaaatgcgtgaagatcaagagcatcaaggtgctctggtctgcctcgcggagagctgcctgaccctagaagggccttgtaccgcacctcccgtcacgcattgggcagcctctcggtgtaaagcgaccggtgaagctgtgtataccgtgccttcatccatgttatgcatctcggagaacgaccaactgatcctctcgagtctcgggccttgccagcgcacccaaggtccagaactcccacccccagaccctgccctccaggatcttagtctcaccctaattgcctcccccccttcttcccccagctcctccggaactcctgccttgccaggccatatgagtagtgaggaatcagggaccagtattagtttgctccccgcactcagcctggccgcaccggacccaggtcagaggagcagcagccagccctcccctgctatttgctccgcgccagctaccctcacaccaagatctccacacgcttctcgcacacccagttcccctctgcagtcatgtacaccttcactgtccccccgtagtcacgtccctagtccacatcaggcactggtcaccaggccccagaaaccctctttggaattcaaggagttcgtcggcctcccttgtaagaatcgacctccattcccaaggacaggtgccacccgtggagcacaagaaccgtgctcggtgtgggaaccaccaaaacggcacagagacggtagcgcctttcagtatgaatatgagcctccctgtacaagcctatgcgcgcgtgttcaagccgtgcgactgccaccccagttgatggcatgggcactgcacttcctgatggatgcccaacctggctccgagccaacccccatgtag

SEQ ID NO: 27243 - DNA, 558 bp, synthetic construct
  misc_feature 1..558: note = Description of Artificial Sequence: Synthetic coding sequence
  source 1..558: mol_type = other DNA
atgaaactcgtgtctgtggccctgatgtatctaggttcactcgcttttttgggggctgatactgcacgcttggatgtcgcctctgaatttaggaagaagtggaataaatgggctctgagcagagggaaaagagagctcaggatgagctcaagctatccaactggactggccgatgtgaaagcgggacccgcacagaccctcatccgcccacaggatatgaagggagcgagccgttctccagaagacagctcaccagacgcagcccgaattagagtcaagagataccggcaatccatgaacaactttcagggactgcgctcctttggctgcagatttggaacctgcaccgtgcagaaacttgctcaccagatctaccagtttacggacaaggataaggataatgtggcgcctaggtctaagatctcacctcagggatacggccgacgtaggagacggagcctgcccgaggctggcccaggccgaaccctggtcagcagtaagccacaggctcacggcgctcctgcccctccttctgggagtgccccacatttcctgtag

SEQ ID NO: 27244 - DNA, 558 bp, synthetic construct
  misc_feature 1..558: note = Description of Artificial Sequence: Synthetic coding sequence
  source 1..558: mol_type = other DNA
atgaagttggtgtcagtcgccttaatgtacctggggtctctggctttcttaggtgcagacacagcacgattggacgttgccagtgagttcagaaaaaaatggaacaaatgggctctgagcagggggaagagagaactgcgtatgtctagctcttaccctactggattagctgacgtcaaagccggacccgcacaaacccttattcgcccacaagacatgaagggggcatctagatccccagaggattctagtcccgacgccgcacggatccgggtcaaaagataccgacagtctatgaacaattttcagggattaaggtcgttcggttgccggtttggcacatgcaccgtccagaagctggcacaccagatatatcagttcactgacaaggacaaagacaacgtagctcctcggagtaagatctccccccaaggatatggtaggagaaggaggcgaagtctcccagaggcaggtcccggaagaacactggtttcttctaaacctcaggctcatggcgctcctgccccaccctctggctccgctcctcatttcctgtag

SEQ ID NO: 27245 - DNA, 558 bp, synthetic construct
  misc_feature 1..558: note = Description of Artificial Sequence: Synthetic coding sequence
  source 1..558: mol_type = other DNA
atgaaactggtgtctgtggccctaatgtatctgggcagcctagccttcttgggggctgacaccgcaagattagacgtggctagtgagttccgcaaaaaatggaacaagtgggctctgtctaggggaaagagagaattacgaatgagttcatcctaccccaccggcctggcggatgtgaaggccggaccggcacagaccttgatccgacctcaagatatgaagggcgcaagtcggtcccctgaggactcatcccccgacgccgctcggatcagggtcaaacgctatcgccagtccatgaataattttcaggggttacgctcttttggctgccgttttggcacctgtacggttcagaaattagctcaccagatctaccagtttacagacaaagataaagacaatgttgccccacggtctaaaattagcccacaaggctatggacgaagaaggcggaggtctctgcccgaagccggtccaggcaggactctggtgtctagcaagccgcaggcacatggcgcaccagccccaccctctggtagcgcccctcactttttgtag

SEQ ID NO: 27246 - DNA, 702 bp, synthetic construct
  misc_feature 1..702: note = Description of Artificial Sequence: Synthetic coding sequence
  source 1..702: mol_type = other DNA
atggccgcaggtactgcagtaggtgcctgggtgctggtgctgagcctgtggggggctgtcgtgggtgcccaaaatattactgcaaggataggcgagcctttggtgctgaagtgcaaaggtgcaccgaaaaaacctccacaacgcctcgagtggaagttgaatacgggtaggactgaggcctggaaggtcttgtctccgcaggggggaggcccatgggacagtgtcgccagggttttgccaaattcctccctgtttctaccggcagttggtatccaggatgagggcatcttccgatgtcaggcaatgaaccggaacggcaaagaaacaaagtccaactaccgcgtccgagtgtaccagataccaggaaaacccgagattgtcgatagcgcttctgagctcactgcgggagtcccaaacaaagtcgtggaggaatctcgacgaagccgaaagaggccttgtgagcaggaagtggggacctgtgtgtctgaggggagctatccagccggaacactgtcgtggcacctagatggtaagccgctagtgccgaacgagaagggcgttagcgtgaaagagcagactcgaagacatcctgagacaggccttttcaccctacagagcgaacttatggtgaccccagccagaggtggcgatccgagaccaactttttcttgctcttttagtccaggcctacctaggcattag

SEQ ID NO: 27247 - DNA, 1029 bp, synthetic construct
  misc_feature 1..1029: note = Description of Artificial Sequence: Synthetic coding sequence
  source 1..1029: mol_type = other DNA
atggcggctggcaccgccgtgggagcgtgggtcctggtactttccttgtggggggcagtggtcggcgcacagaatattacggcgaggattggcgaacccctcgtcttgaaatgcaaaggcgctcccaaaaaaccccctcagcggctggagtggaaactcggcggtggaccctgggacagcgtggcccgtgttctgcctaactcttccctgtttctgcctgccgtcgggattcaagacgaaggtatatttaggtgtcaagccatgaacagaaacggtaaagagaccaaaagcaattaccgagtccgagtgtaccagatacccggtaagccagaaatcgtcgacagcgcttcggagttgacggctggagtgccaaataaggtggggacctgcgtgagcgagggctcataccctgctggaactctgagctggcaccttgacggcaaacctctggttcccaatgagaaaggtgttagcgtcaaggagcagacaagaagacatcccgagaccggactgtttactttacagagcgaactcatggttacaccggcaagagggggtgatcccagacctacatttagttgctccttctcccccggattgccccgtcacagagccctccgtaccgccccaatccagccaagagtctgggaaccagtacctcttgaggaagtccagcttgtcgtggaacccgaggggggagccgtggcgcctggagggaccgtaactcttacctgcgaggtacccgctcagcccagcccacagatccattggatgaaagacgtctcggatctggagaggggcgcaggccgaacacgcaggggtggcgcaaattgccgtctctgtggccgtatcagggcaggaaactccagtcccggtcccggagatcctggtaggcccggtgatagtaggccagcacactggggacatttggtggcaaaggcggctactcctagacgaggggaagaaggccctagaaaacccggaggccgagggggtgcttgtaggacggaaagcgtgggtggtacctag

SEQ ID NO: 27248 - DNA, 1044 bp, synthetic construct
  misc_feature 1..1044: note = Description of Artificial Sequence: Synthetic coding sequence
  source 1..1044: mol_type = other DNA
atggccgcagggactgctgtcggagcctgggtgctggtcctgtcactgtggggggcagtcgtcggagcacaaaatatcacagccagaattggggaacctctggtgttaaaatgcaaaggggcaccgaagaaaccccctcagagactcgaatggaaactcaataccggcagaacggaggcatggaaggtcctgtccccccagggagggggaccctgggattccgttgcacgtgtgttgccaaacagcagcctctttctgcctgccgttggtatccaagacgagggtatcttcaggtgccaggccatgaaccgtaacggtaaggagaccaagagcaattatcgggttcgagtttatcagattccagggaaaccagaaattgtagactctgcatccgagctgactgctggcgttccaaataaggtgggcacctgtgtgtcagagggaagctatccagctggaacactctcatggcatcttgacggcaaacctctcgttccaaacgagaagggcgtttctgtcaaggaacagacgcgtcgccacccagaaaccggtttgttcacattacagtcggagctgatggtaactcccgctcgaggcggagacccgcgacccacctttagttgcagtttttccccgggtctgccacggcatagagccctgcgtacggccccaatccagccaagggtctgggagccagtccccctagaggaagttcaactcgtagtggagcccgagggcggagcagtcgctccgggaggtaccgtgactctgacctgtgaagttcctgcccaaccttctccccagatccactggatgaaggatggtgtgccattgcctctgccccctagccccgtcctgattctccctgaaatcggacctcaggaccagggtacttactcttgtgtggctactcattcctcccatggaccgcaagagtctagggctgtgtcaatttcaattatcgaaccaggagaggagggcccaactgcaggtgagggatttgacaaagtgcgagaggccgaggatagccctcagcatatgtag

SEQ ID NO: 27249 - DNA, 1215 bp, synthetic construct
  misc_feature 1..1215: note = Description of Artificial Sequence: Synthetic coding sequence
  source 1..1215: mol_type = other DNA
atggcagctggaaccgcagtcggggcttgggtgctagtgctcagtctgtggggcgcagtcgttggggctcagaatattactgccaggatcggggagccgctggtcctgaagtgtaagggcgcaccgaaaaagccccctcagcggctcgaatggaagcttaacactggcagaaccgaagcatggaaggtactatccccacagggcggtgggccatgggattctgttgctcgcgtgctgcccaattcctccctgttcctccctgctgtgggcattcaagacgagggtatcttcaggtgccaagctatgaaccgtaacggtaaagagactaagtccaactatagggttcgcgtctaccagattccaggcaaacccgagatagtggactccgcttcggagttgaccgccggagttcccaataaggtgggaacatgcgtctcagaaggttcatatccagctggcaccctctcctggcacctagacggaaaaccactcgtccctaacgaaaaaggagtcagtgtaaaagaacaaacacgcaggcacccagaaacgggcctgttcacattgcaatcagagctgatggtgacgccggctcggggaggggaccctcgacccacattctcctgcagctttagccctgggctgccaagacaccgggcattgcggacagctccaatacagcccagggtgtgggagccagtccctttggaggaggtccaactggtagttgaaccggaaggcggtgcagtggcccctggcggtaccgtaaccctcacctgtgaggtccccgctcagccctctccacagatccattggatgaaggatggagtgcctttgcctctgccgccaagccccgtgctgatcttgccagaaatcggcccacaggaccaaggcacctatagctgtgtcgcgacacacagctcccacgggccacaagagtcccgcgctgtgagcatctcgatcattgagccaggcgaggagggcccaaccgctggaagcgtgggtggctcaggcctcgggaccctagctcttgcactggggattctaggagggctcggcactgctgccttgctcatcggcgttatactatggcagcgtcgccagaggaggggtgaagaaagaaaagcgcctgagaaccaggaggaagaggaggaacgagccgagctgaaccagagtgaggaacctgaagctggggagagctctacggggggaccctag

SEQ ID NO: 27250 - DNA, 705 bp, synthetic construct
  misc_feature 1..705: note = Description of Artificial Sequence: Synthetic coding sequence
  source 1..705: mol_type = other DNA
atggcagccggtactgctgtgggcgcttgggtgctcgttctctccctgtggggggctgtagtgggtgcgcagaatattacagctcggattggggaaccgctggtcctgaagtgcaaaggcgcacctaaaaaaccacctcaaagactcgagtggaagctgaacaccggtcgcactgaggcttggaaagtgctgtcgccccagggaggtgggccttgggattccgtcgccagagtgctccccaatagcagcctgttcctaccagcagtggggatccaagacgagggtatctttagatgtcaggcaatgaaccggaatgggaaagaaacaaagtcaaattacaggagcctccgaacatttacaatcaccgcctcggattggatattccccccatctgaaatccctggaaaaccggaaattgtggactctgcgagcgaactcacagcgggtgtgcccaacaaggtggggacctgtgtgtccgagggtagctacccagcaggcacactgagctggcatctggacgggaagcccctggtgcctaacgaaaagggcgtttccgtgaaagaacagactcgcagacatcctgagacgggactgtttaccctccagtcagagcttatggtgactcctgcacgtggcggagaccccaggccaacctttagctgtagcttttctccaggcctcccacgccacagggcacttcgctag

SEQ ID NO: 27251 - DNA, 402 bp, synthetic construct
  misc_feature 1..402: note = Description of Artificial Sequence: Synthetic coding sequence
  source 1..402: mol_type = other DNA
atgaaggacggcgtccctctgcccctgcccccatcacccgttctgatcctgccagagattgggccacaggaccaggggacctacagctgtgtcgcaacccacagctcacatggcccacaggagagtcgcgctgtctctatctccatcattgaacccggagaagaagggcctactgcaggcagcgtcggaggatctggccttgggactctggccctggccctcggcatcctgggcggacttggaactgccgcattgctcattggtgtcatactgtggcagcgcaggcagcgacgtggcgaagagcgcaaagcccctgagaatcaagaagaagaagaggagagggcagagctaaaccagagcgaagaacccgaggcgggtgaatcctctaccggcggtccctag

SEQ ID NO: 27252 - DNA, 1308 bp, synthetic construct
  misc_feature 1..1308: note = Description of Artificial Sequence: Synthetic coding sequence
  source 1..1308: mol_type = other DNA
atgggagccggtgagagggttcaggcccctccgagagctgaggctacagccggacggggtgccgacagggctcgcaccctggaggggtcccgtatggctgcaggcactgccgtcggcgcatgggtactcgtgctgagtctgtggggggctgtggtgggagctcagaacattactgctcgaataggtgaaccgctggtattgaagtgcaaaggtgccccaaaaaaaccaccacagcggttggagtggaaacttaacacaggacggaccgaggcctggaaagtgctgtccccacagggaggtggtccatgggactcggtggctcgcgtgttgcccaacagtagtctgttcctgcccgcagttggcatccaggatgagggtatcttccggtgccaggccatgaaccgaaacggcaaggaaacaaagtctaattaccgagtgcgggtgtatcagatacccggaaagccggagattgtggacagcgcttccgaattgaccgccggagttccaaacaaagtcggcacgtgcgtctccgaggggtcataccccgctggtaccctgtcttggcacctggacggaaagccactcgtccccaatgagaaaggcgtcagtgtcaaagaacagacccgaagacatccagaaaccggactcttcacccttcagtccgagctgatggtaacccccgctagaggtggtgaccctcgccctaccttttcttgttcattcagtcctggcctgccacgccatagagcgctgcggaccgcacccattcagccaagggtttgggaaccagtgcccttggaggaggtgcagttagttgtcgaacccgagggtggcgcagtggcgcctggcggaaccgttacactgacatgcgaggtgcctgcgcagccttctcctcagattcattggatgaaagacggtgtccccctgcctctccctccaagcccagtcctgatcctcccagagatcggcccacaggatcaggggacctattcatgcgtggctactcactcatcgcatgggccacaagaaagccgagccgtctcaattagcatcatagagcccggtgaggaaggccctactgccggtagcgtgggcggatccggcctcggcactctggcactggcgctcgggattctgggaggtttaggaacagcagcactgctgatcggagtgatactgtggcagagacggcagagaagaggtgaggagagaaaagcaccggaaaatcaggaggaagaagaggagcgtgccgagctgaaccagagtgaggagcccgaggcaggggaatccagcaccggcggaccctag

SEQ ID NO: 27253 - DNA, 387 bp, synthetic construct
  misc_feature 1..387: note = Description of Artificial Sequence: Synthetic coding sequence
  source 1..387: mol_type = other DNA
atggctgcgggaacagcagtgggtgcatgggtgttagtcctgagcctttggggtgcagtggttggggctcagaatattaccgcccgtatcggtgagccccttgtgctgaaatgcaaaggagcccctaagaagccacctcagaggctggagtggaaactgaacactggtaggaccgaggcatggaaagtactcagtcctcaggggggtgggccatgggactctgtagctagggttttgcccaatagtagcctgtttctgccggctgttgggattcaggacgaaggaatatttagatgtcaggccatgaaccggaacgggaaggaaacgaaaagcaattatcgtgttagggtatatcaatttgagaacctgcacaactatagcctttag

SEQ ID NO: 27254 - DNA, 462 bp, synthetic construct
  misc_feature 1..462: note = Description of Artificial Sequence: Synthetic coding sequence
  source 1..462: mol_type = other DNA
atggcagctgggaccgcagtaggcgcatgggtgcttgtgctaagtctgtggggggcagtggtaggagcacagaatataacggccagaatcggggagccactagtgttgaagtgtaagggggctcctaaaaagcctccgcagagactcgaatggaagctgaataccggacgcacagaggcctggaaagttttgtctccccaggggggaggaccctgggactccgtggcacgggtcctgccaaactcctccctgttcttgcctgcggtcggtattcaggatgaaggtatcttgggtggcctcggcacagcagcactgcttatcggcgtgattctttggcagagaaggcagaggcggggtgaagagcggaaagcaccagagaaccaggaggaggaggaggaacgggctgaattgaatcagagcgaagagcccgaggcaggggaatccagcacgggagggccatag

SEQ ID NO: 27255 - DNA, 885 bp, synthetic construct
  misc_feature 1..885: note = Description of Artificial Sequence: Synthetic coding sequence
  source 1..885: mol_type = other DNA
atgaacagaaacgggaaggaaacaaagagcaactatcgtgtgcgcgtttaccaaattcccggtaaacccgagatcgttgacagcgccagcgaacttactgctggcgttcctaacaaggtgggcacctgtgtaagtgagggcagctaccccgctggtacactctcctggcaccttgacggcaagccactcgtgcctaatgagaagggggtgtcagtgaaagagcagactagaagacatcccgagaccggcctatttactctccagagtgaactgatggtgacacccgcacgaggcggagacccccgaccaactttctcttgttcctttagtccgggactaccacgccacagagcccttcggaccgccccaatccagcccagagtctgggagccagtgcctctggaggaggtacagctggtcgtggaacccgaggggggtgcagtggcacctggcggaactgtgactctgacatgcgaggtgcctgcccagccctctccacaaatccactggatgaaggacggggtccccctgcccctcccaccctcacctgtgctcattctgcccgagattgggcctcaggaccagggcacctactcctgtgtggccactcatagctctcatggccctcaggagagccgggcagtttccattagcatcattggaagcgtggggggaagcgggttgggcactctggccctggcgttgggaatactggggggactagggactgccgctctgctgatcggcgtcattctctggcagcggagacagcggcgaggcgaagagcggaaagcccctgagaatcaggaagaggaggaggagcgggcagagctaaaccaaagcgaagaaccagaggccggagagtcctctactggcggaccgtag

SEQ ID NO: 27256 - DNA, 366 bp, synthetic construct
  misc_feature 1..366: note = Description of Artificial Sequence: Synthetic coding sequence
  source 1..366: mol_type = other DNA
atggccgcaggcaccgcggtgggcgcttgggtcctcgtgctgagcttgtggggggcagttgtaggagctcagaatatcaccgccagaatcggcgaacctcttgtgttgaagtgtaaaggagctcccaagaaacctccccagcgactcgagtggaaattaaataccggtcggaccgaggcctggaaggtgctcagccctcagggcggtggcccatgggacagtgtagcacgggttttgcccaacagtagcttgttccttcctgccgtgggtatccaggacgagggcatcttccggtgtcaagcaatgaatcgtaacggcaaggaaacaaaatcaaattggtggtggtcacagaaggttgagcagtag

SEQ ID NO: 27257 - DNA, 1092 bp, synthetic construct
  misc_feature 1..1092: note = Description of Artificial Sequence: Synthetic coding sequence
  source 1..1092: mol_type = other DNA
atggcagccggaaccgcagtgggagcatgggttttggtcctctcactctggggtgcagtggttggcgcacagaatattaccgcaagaatcggcgaacccctggtcctgaagtgcaagggagcaccaaagaaaccaccgcagaggctcgaatggaagttaaatactggcagaacggaagcttggaaggtgctgagtccgcagggagggggaccgtgggatagtgtcgcacgcgttctgcccaattcttctctgtttcttccagccgttggcatccaggatgaaggaattttcaggtgccaagctatgaaccgaaacggcaaggagactaaatctaactaccgggtgcgtgtataccaaattcctggaaagcccgagattgttgactccgcatctgaactcaccgctggcgttcccaataaggttgttgaagaaagcaggcgtagtcgaaagcgcccatgcgaacaagaggtgggtacatgtgtgtcggaggggagctaccctgcaggtaccttgtcatggcatcttgacgggaagcccctggttcccaacgagaaaggggtgtcagtaaaagaacagacaagacgccacccagaaactggcctgttcacgctccagtcagagctgatggtaactcctgcacggggtggcgaccccaggcctacgttcagctgttctttcagccccggactcccccgacaccgggcactgagaacggcgccaatccagccgcgagtctgggagccggtgccactggaggaagtccagctagtcgtggaacctgagggaggcgcagtggcccctggcggtacagttaccctgacctgcgaggtgccagcccagccgagcccgcaaatccattggatgaaggatggtgtgccgctgcccttaccgccttctcccgtgctaattctgcctgagattggccctcaggaccagggaacctactcgtgtgttgcaacccacagctcacatggccctcaggaaagccgggcagttagcatcagcatcatcgagccgggtgaggagggaccaaccgctggggaagggtttgataaggtccgggaggctgaggatagtccacaacatatgtag

SEQ ID NO: 27258 - DNA, 3633 bp, synthetic construct
  misc_feature 1..3633: note = Description of Artificial Sequence: Synthetic coding sequence
  source 1..3633: mol_type = other DNA
atggccgctcaaagttccctttataacgatgacagaaatctcctgagaatccgggaaaaggaaagacgaaaccaggaggcccatcaggaaaaagaggcatttccggaaaagattcccctgttcggtgaaccctataagaccgctaagggtgatgagttgagtagccgaattcagaacatgctcgggaactacgaggaggtaaaggagtttttatcgacgaagagccatactcataggctggacgcaagtgagaaccgactgggaaagcccaaataccctctgatcccggacaaggggtcgtcgatcccatcctcttcatttcacacatctgtacaccaccagagtatccatacccccgctagtggacctctgtccgttggcaatattagccacaatcctaagatggcacagcccaggacagaaccaatgccctccctccatgccaaatcttgcgggccaccagactcccagcatctgacacaggaccggctagggcaggaagggttcgggtctagccaccacaagaagggggatcggagggcagacggagaccattgtgcatctgtcacagacagtgcccctgagagggaactttcccccctcatctctttgccttccccagtgccacctttaagccctatccatagcaaccagcagactttgccaaggacccaggggagcagcaaagtgcacggatccagcaataactccaaaggttactgcccagccaaaagcccaaaggatttggctgtgaaggttcacgacaaggaaaccccccaggattcgcttgtcgctccagcccagcctccctcccagaccttcccccctccctcgctacctagtaagagtgtagccatgcagcagaagccgaccgcttacgttagacccatggatggacaggaccaggcgccatcagagagccctgagttgaaacctctcccagaagattatcggcaacagacattcgagaagacggatttaaaggttccagcgaaggccaagttgactaagctcaagatgccttcacagtctgtggagcaaacgtatagcaacgaagtgcactgtgtagaggaaattctcaaagaaatgacccacagctggcccccaccgcttaccgctatccacaccccctcaactgctgagccttcgaagtttccctttccgaccaaagatagtcagcacgtgtcgagtgtcacccagaatcagaaacagtatgatacaagcagcaaaactcacagtaatagccagcaaggtacctcctccatgctggaggatgatttgcagttgtctgatagcgaggatagcgattccgagcagacacctgagaaacctccctcctcgtccgctcctccatccgccccacaatctttgccagagcctgttgcttctgcgcactccagtagtgctgaaagcgaaagcacatccgatagcgatagttcatctgatagtgagtcagagtcttcaagctcagacagcgaggagaacgaaccactcgagaccccagccccagagcctgaaccgcctacaactaacaaatggcagctggataattggttaacaaaggtctcccagcccgcagcgccacctgaggggcctaggtccacggaaccccctcgaagacatcccgagagtaaaggttctagcgacagtgcaaccagtcaagaacacagcgagagcaaggatccaccgcctaagtcctcttccaaagcaccacgagcccctccagaggcacctcacccaggaaaaagatcttgtcaaaaaagcccggcacagcaggaacctccacagcgacaaactgtcggcacaaagcagccgaaaaagcctgttaaagcctccgctagagcaggtagtcgcacttcactgcagggagagcgcgaaccgggactcctgccatacggatctcgtgaccagacttcaaaggacaaacctaaggtgaaaactaagggacggcctagagcggcagcatcaaacgagccaaaaccagccgttcccccatcatcggaaaagaagaagcataaatcctctctgcctgccccttctaaagcactaagtggccctgagccagccaaggacaacgtcgaagatagaacccctgagcatttcgcgcttgtgcctctgacggaatcccagggaccccctcacagcggatccggcagtcgcaccagtggctgtcgccaggctgtggttgtccaggaggatagccggaaagatcgactgccactgcctttgcgtgacacaaaactcctatccccactgcgggatactcctccaccccagagtttgatggtaaagattaccctggaccttcttagcaggatacctcagccccctgggaaagggtcgagacaaaggaaagctgaagataagcagccgcctgccggtaagaagcactccagtgagaaacgttcctccgatagcagcagtaaattagccaagaaaaggaagggcgaagccgaacgagattgcgacaataagaaaattcgattggaaaaggaaattaagagccagagctcctcctcttcatccagccacaaggagagctcaaagaccaagccatcacgaccaagcagccagtcatcgaagaaggagatgctgccccctcccccagtttcatcttcatcccaaaaaccagcaaaacctgccctgaaacgctctaggagagaggctgacacttgcggtcaagatccgccaaaatcagcctccagcacgaaatcaaaccataaggattccagtattccaaagcagaggagggttgagggcaaagggtctagaagctcatctgagcataagggttcatccggtgatactgccaatccctttcccgttccttcattacccaatgggaacagcaaaccaggtaagccccaagtcaagttcgataaacagcaggctgatctccacatgcgcgaggcgaagaaaatgaagcagaaggcggagctcatgacagatcgcgtcggtaaggccttcaaatatttggaggcggtccttagcttcatcgagtgtggcattgcaacagagagcgaatcacagagtagtaagagtgcttactccgtgtatagcgaaaccgtcgacttgattaagttcataatgtccttaaaatccttttccgacgctaccgcccctacacaggagaagatattcgctgtcctgtgcatgcggtgtcaaagtatcctgaatatggctatgttccgctgcaaaaaggacatcgccatcaagtatagccggacccttaataaacactttgagtccagcagtaaagtggcccaggccccaagcccctgcattgccagcaccggaacaccatcccctctttcacccatgcccagccctgcttcctccgttgggtcacagtccagcgccggttcagtcggctcgagtggggtagccgctaccatatccacccccgttaccattcagaatatgaccagctcgtatgtcacaatcaccagtcatgtcttaacggccttcgatctgtgggagcaggccgaagcactcactaggaagaataaggagttcttcgcacgtctgtccaccaatgtgtgtaccttggcactgaactcatcccttgtcgacctggtacattacacaaggcagggcttccagcagctgcaggaactaaccaaaaccccatag

SEQ ID NO: 27259 - DNA, 1266 bp, synthetic construct
  misc_feature 1..1266: note = Description of Artificial Sequence: Synthetic coding sequence
  source 1..1266: mol_type = other DNA
atggcctttacagaacgggtcaacagctcagggaatagcctgtataacgacgatcggaaccttttgagaattcgggagaaagagagacgtaatcaggaggctcaccaggaaaaagaagcgtttccagagaagatccctctctttggcgaaccttacaagaccgcaaagggcgatgaactaagcagcagaatccagaatatgttaggtaactacgaggaggttaaagagtttctgagcacgaagagccacacacacagactggacgccagcgagaaccgcctgggaaagcctaaataccccctaatcccggataaggggagctccatcccttcttcctctttccacacatctgttcaccaccaatcgatccatacccccgctagtggaccactcagcgtcggaaatatcagtcataatcccaaaatggcccagccacgcacggagccaatgccctcactgcacgctaagagttgtggacccccagattctcagcatctcacacaggaccggctggggcaagaaggttttgggagcagccatcataaaaagggcgatcgcagggctgacggggaccactgcgcaagcgtgaccgattcggcccctgagagggaactgagtcccttgataagcctaccctcccctgttcccccactgtcccctattcatagcaaccagcagactcttcctagaactcaagggagttccaaggtgcacggaagcagtaataacagcaaggggtattgtccagctaaaagcccgaaggaccttgcagttaaagttcatgataaggaaaccccccaggactccctcgtcgcgcctgcacagcctccgtcgcaaacgtttcccccacctagcctacccagcaagtcggtcgcaatgcagcagaagccaaccgcatatgtcaggccgatggacggacaggaccaggcaccctccgagagtccagagctaaaacccttacctgaggattatcgccagcaaactttcgagaagacagatttaaaagtgccggcaaaggctaaactgaccaaactgaagatgccttctcagtctgtggagcagacctactccaacgaagtgcactgcgtggaggaaattttgaaagacagccagcatgtctccagcgtgacacaaaatcagaagcagtacgatacctctagtaagactcatagcaattcccaacaaggcacaagttccatgctggaagacgatctgcagctgtctgactcagaagactcagattccgaacagacacctgcgccttag

SEQ ID NO: 27260 - DNA, 3657 bp, synthetic construct
  misc_feature 1..3657: note = Description of Artificial Sequence: Synthetic coding sequence
  source 1..3657: mol_type = other DNA
atggcatttactgagagggtaaatagtagcggcaatagtctgtacaacgatgatcgtaatctgctcaggattagagagaaagagcgacgaaaccaggaggctcatcaggaaaaagaggccttcccagaaaagatccctctgttcggagagccatacaaaacggccaagggagatgagctatcctccagaatccagaatatgcttggcaattatgaggaagtcaaggagtttctctctacaaaatctcatactcataggctggatgctagtgagaatcgcctggggaaaccaaagtatccgctgataccagataaaggctcatcaattccctcatccagcttccatacttccgttcaccatcaatccattcacactcccgcaagcgggccactctcggtcggcaacatttcacataatcctaagatggcccagcctcgcactgaaccgatgccgtccctgcatgccaaaagctgtggacctcccgatagccaacacctcacacaggataggttaggtcaagagggctttggctcctcccaccacaagaagggcgacaggcgtgctgacggtgaccattgtgcgtccgttactgacagtgctcctgaaagggaactgagtcctctcatcagcttgccttccccagtgccacccctgagccccattcacagtaatcagcagaccctgcctagaactcaggggtcaagtaaggtccacgggtccagtaacaacagcaaagggtattgtcccgcaaagagccctaaagacctcgccgtgaaggtacacgataaagaaaccccacaggactctctcgtggccccagcccagccaccctcccagaccttccctccaccttccctaccctcaaagagtgtcgccatgcagcaaaaacccactgcttatgtgcgaccaatggatggtcaggatcaggctccaagcgagtcaccagagctgaagcccctgccggaggactaccgccagcagacgttcgaaaaaaccgatctgaaagtacccgctaaggccaagctgacgaagctcaaaatgccttctcagtcggttgagcagacctactctaacgaggttcattgcgttgaagaaattctcaaagagatgacgcattcatggccgcctccccttacagcaattcacacgccctcaacagcagaaccctctaaatttccattcccaactaaggattcccagcacgtatcttctgtaactcagaaccagaagcaatatgacaccagctcgaagacacatagcaactcccagcaagggactagctcaatgctggaggatgacctgcagctgagtgactctgaggattccgactcggaacaaactccagagaaacctccgtctagttccgcccctccatccgcaccgcagtctctgcctgaaccagtggcgtccgcacactcgagttccgccgagtctgaaagtacaagtgattccgacagtagctccgattcagaatccgaatcttcttcctcagactcagaagaaaatgagcctcttgaaacccctgcaccagaacccgaacccccaaccaccaacaagtggcagctagataactggctgacaaaggtgagtcagcctgcggctccacctgaaggacccagatccactgagccgcctcggaggcaccccgagtccaaggggtcttcggactccgccacctctcaggagcactccgagtcgaaagaccccccaccaaagtcttcaagcaaggctcccagagctccccctgaggctcctcatccaggtaagcggagttgccagaaaagtcccgctcaacaggagccaccccagcgacagacagtggggaccaaacagccaaaaaaacctgtgaaagccagtgcaagagctggaagccgcacaagtttgcagggagaaagagagcctggtctgctcccgtacggatcccgtgaccagacttccaaagacaagcctaaggtgaaaacgaagggaagaccgagggcggcagcctctaacgagccaaagcctgctgtacccccaagctccgaaaaaaaaaagcataagtcatctctgcccgcaccctcaaaggccttgtcaggacccgaaccggctaaggataacgtggaagacagaacaccagagcatttcgcccttgtgccattgacagagagtcaagggccaccccactccgggtcaggctcaaggactagcggatgccgtcaggccgtagtggtgcaggaagactctcgaaaagatagattgcccttgcccctgcgtgacacgaaactcctgagtcccctaagggacacaccaccaccgcagtcactgatggtgaaaatcaccctcgatctcctgagccgtatccctcaaccgcctggcaaaggatcacgacagaggaaggccgaggacaagcagccaccagcaggcaagaaacattcaagcgagaagcgcagctccgatagttcttccaagttggcgaagaaaagaaagggcgaagccgaacgggactgcgacaataagaagatccggcttgagaaggagattaagagccagtcttcttcaagctcctcctcccacaaggagtcgtctaaaaccaaacccagccggcctagttctcagtctagcaagaaagaaatgttaccaccgccacctgttagcagtagcagtcagaaacctgctaagcccgctcttaagagaagcagaagagaagctgatacctgcggacaggaccccccaaaaagcgcctcgtcaaccaaatccaatcataaagattcttccatccctaagcagcgaagagtggaaggcaaggggtctaggtcatcgagtgagcacaagggttcttccggcgacaccgcaaacccgtttccggtgcctagtttgccaaacgggaattctaaaccaggcaaaccccaggtgaaattcgacaaacagcaagccgatctgcacatgagggaagccaagaaaatgaagcagaaagcggagctaatgacagatagagtggggaaagcgttcaaatacttggaagcagtgctgtccttcatcgagtgtggtatagcgacggaaagcgagagccaatcaagcaagagtgcctatagtgtctattccgaaacagtggaccttattaagttcattatgtccttgaagtctttctctgatgccacagctcctactcaggaaaagatctttgctgtcttatgcatgcgctgccagtccatcttaaatatggctatgtttagatgtaaaaaagacatagccatcaagtactctaggacgctcaataagcattttgagtcatcctccaaggtggctcaggctccctccccctgtatcgcacgatccactggtacccccagtccgctgtcacctatgcccagcccagcgtcatccgtgggcagccagtccagtgcgggaagtgttgggtcatctggtgtggctgcaaccatcagtacaccggtgacaatacagaatatgacctcatcctatgtgactataacaagccacgtgttgacggcattcgacttgtgggagcaggcggaagcgctgacccggaagaacaaagagttctttgcacggttgtctaccaatgtctgcacgttggcccttaatagctcattggtcgatctggttcattatacaaggcagggctttcagcagttacaggaactgacaaaaaccccttag

SEQ ID NO: 27261 - DNA, 1221 bp, synthetic construct
  misc_feature 1..1221: note = Description of Artificial Sequence: Synthetic coding sequence
  source 1..1221: mol_type = other DNA
atggcgttcacagagagagtgaatagctcaggtaattctctctacaatgatgaccgcaacttgctgcgcattcgggagaaggagcgacggaatcaagaagcccaccaagagaaagaagcatttccggagaaaattccgctgttcggcgagccttacaagacggccaaaggagatgaattgtctagcagaattcagaatatgcttggtaactacgaggaggtaaaagagttcctttcaactaaatctcatactcatcgtctggatgctagcgaaaaccggcttggtaagccaaaataccctctgattccagacaaggggagctcgatcccgtcctcttcctttcacacttccgtgcaccatcaaagtatccatactcctgcatcagggccactctcagtaggcaatatctctcacaatcccaaaatggctcagcctcgcacagaaccaatgccctctctccacgccaagagttgtggccctccggactctcaacatctcacacaggatcgtctgggtcaggaagggttcggcagctcacatcacaagaagggagaccgcagggcagatggagatcactgcgccagcgtcactgactcagctcctgaaagagagctttccccactcatatctctgccgtcaccagtgccgcctctgtccccaatccactcaaaccaacagacactaccgaggacccagggcagtagcaaggtccatggttctagcaataattcaaagggctactgccctgccaaaagtccgaaggatcttgctgttaaagtgcatgacaaggaaacaccgcaggatagcctagtcgcaccagcccagcccccatcccaaacgtttccccctcctagtctcccctcgaaatccgttgctatgcagcagaagcctaccgcctatgtgcgcccaatggatgggcaggatcaggccccttccgagtcacccgagctgaaacctctaccagaggattataggcagcagacattcgaaaaaaccgatctaaaggtccctgccaaggctaagctcacaaaactcaagatgccgtcccaatccgtggaaacctacagcaatgaagtccactgcgttgaagagattttaaaggagatgacgcactcttggcctcctcccctcaccgctattcacacccctagcacggcagagccttccaaatttccctttcccaccaaagattctcagcacgtaagttctgtgactcagtag

SEQ ID NO: 27262 - DNA, 1473 bp, synthetic construct
  misc_feature 1..1473: note = Description of Artificial Sequence: Synthetic coding sequence
  source 1..1473: mol_type = other DNA
atgcccagccagagcgtcgagcagacatacagcaatgaggttcattgcgtggaagaaatcctcaaggaaatgacacacagctggccgcctccccttaccgccattcacacccccagcactgcagaaccatctaagttcccctttcccacaaaggatagtcaacatgtgtcaagcgtgacacagaaccagaaacaatatgatacatcaagtaagacacactccaactcccaacagggtacctctagtatgctggaggacgatctgcagcttagcgactccgaggatagcgactccgagcagactcctgagaagcctcctcacctccatttgcaggtgttacactccccttttcagaaccagtggcaccaacacattcccgctgttcaatcccaaaaggctcccgtcacgcagacggtgccacagactcagcgagctagagcagtgcaagactccgaagagaacgagcctctggagactcctgcccctgagccagaaccccctacgacaaacaaatggcagttggacaactggctaactaaggttagccagccagcggctccgcctgagggtcctcgaagcaccgagccacccaggaggcaccccgagtcaaaagggagttccgactccgccacatctcaggaacatagtgaatcaaaggatcccccacccaaaagtagtagcaaggcccctagagcgccacccgaagccccacatcccggaaagagatcctgtcaaaaatctcctgctcagcaagaacccccacaacgacagactgttgggacaaaacagcccaaaaagcctgtgaaggcttcagctagagcgggatcgaggacctcattgcagggcgagcgcgagccagggctcctgccctatggcagtcgggaccaaacaagtaaggataaacccaaagttaagacaaaagggcgacctcgggcagcagcttctaatgaacccaaacctgccgtgcctccaagcagcgagaagaagaagcacaagtccagcctgcctgcgccaagcaaggcactgagcggacccgagccagccaaggacaacgtggaggatcgcaccccagagcacttcgccctggtcccactgaccgagtcccaaggacccccacacagtgggagcgggagccgcacgagcggctgcaggcaggcagttgtagttcaggaagactccaggaaggataggctgcccctgcctcttcgtgacaccaagcttctatcaccactgcgggacacccccccacctcagagcctcatggttaagataacattagacctgctctcccgcattccacaacctccgggaaagggctctagacaaaggaaagccgaagataaacagcctcccgcaggcaaaaagcatagctccgagaagaggtcatccgactcttcatcaaaattggcaaagaagcggaaaggtgaagctgaacgcgattgtgataataagaagatccgattggagaaatag

SEQ ID NO: 27263 - DNA, 2550 bp, synthetic construct
  misc_feature 1..2550: note = Description of Artificial Sequence: Synthetic coding sequence
  source 1..2550: mol_type = other DNA
atgacacattcctggccgcctcccctgacagccatccacacacccagcaccgctgaaccaagtaaatttcctttccccactaaagatagtcagcacgtgtcgtcggtaactcagaaccaaaaacagtacgatacatctagcaagactcacagtaactcacagcaggggactagcagtatgctggaagacgacctgcagctgtcagactccgaagatagtgacagcgagcagacacccgaaaagcccccaagttccagcgctccacctagtgccccacagtcacttccagagcctgtggcctctgcacacagctcctccgccgagagcgagtctacctcagacagtgatagcagctctgactccgaatctgaatcatcctcctcagacagtgaggagaacgagcctttggagacccccgcacccgagccagaacctcccactacaaacaaatggcaattggataattggctgaccaaggtcagccagcccgctgctccgcctgagggaccgcgaagtaccgaaccgccaaggcgccaccctgaatccaagggttcatctgactctgctacctcccaggagcacagcgagagcaaagacccccctcccaagagcagctctaaggcaccaagagcaccccctgaagcaccgcatccaggcaagagaagttgtcagaagtctccagctcagcaggaaccaccacagagacagaccgtggggactaaacaaccaaaaaaaccggtcaaggcctctgcacgcgcagggtctcgcacgagtttacagggcgaacgcgaaccaggcctcctcccctacggatcacgggaccagacaagcaaggacaaacccaaggtgaaaacgaaaggcagaccgagagcggcagcgagcaacgagccaaagcccgcagtaccaccgagctccgagaaaaaaaaacacaagagcagcctacctgctcccagcaaagctttgtctggacccgaaccggcaaaggacaatgtggaggaccgaacacccgaacacttcgcccttgtacctttgactgaatcccagggtccccctcatagcggatcagggtcacggacttcaggctgccggcaggccgtggtggtccaagaggatagcaggaaggaccggctgccacttccactgcgggatacaaagttgctgagtccccttcgcgatactcctcctccccaatctctgatggtcaagatcacattagatttgctgtcccgtattccacaacctcctggaaaaggttccagacagcgtaaagcggaagacaagcagcctccggctggcaaaaagcacagctccgaaaagcgcagctccgattcttctagtaagctggctaagaagagaaagggagaggctgaacgggattgtgataacaaaaaaatccgacttgagaaggaaataaaatcacagtcaagcagctcatcctcatcacataaggaatcttccaagacaaagccttctaggcccagcagtcagagcagcaagaaggaaatgctgccgccaccgccagtttctagttcctctcagaagcctgctaaacccgcactgaagcggtctcgacgtgaggctgacacatgtgggcaggatccccctaaatctgcttccagcaccaaatcaaatcacaaagactctagcattccaaaacaacgacgagtggaaggaaagggttcaagaagctccagtgagcataaaggctcctctggcgacactgctaatcctttccctgttccaagtctccctaatgggaattcaaagccaggaaagccacaggttaagttcgacaagcaacaggccgacttgcacatgagggaagccaaaaaaatgaaacagaaagccgagctgatgactgatagggtgggcaaggctttcaagtacctggaggctgtgttatcttttatcgagtgcggaatcgccactgagtcagagagccagagctccaagtcggcttattcagtgtacagcgagaccgtggatttgatcaagtttatcatgagccttaagagtttttcggacgcaacagctcccacccaggaaaagattttcgctgtgttgtgtatgcgatgtcagagtattttgaatatggcaatgtttcgatgtaagaaagacattgcaataaagtactcgcgcaccctcaacaagcattttgagtcctctagcaaagtcgctcaggccccttccccttgtattgcaagaagtactggaacgccttcccctctgagtccaatgccgagtcctgcctcatctgtcggatcccaatcgtccgccggaagcgtgggtagctctggtgtcgctgccacgatctctactcctgtcacaatacagaatatgacaagctcctatgtcacaatcacatctcatgttctgacagcttttgacctctgggagcaggctgaggccctgacgaggaagaacaaagaattcttcgcacggctgtctactaacgtgtgtactcttgcactcaacagctccctggtggaccttgtgcactacaccagacaggggtttcagcagctgcaggagcttaccaagacaccatag

SEQ ID NO: 27264 - DNA, 2376 bp, synthetic construct
  misc_feature 1..2376: note = Description of Artificial Sequence: Synthetic coding sequence
  source 1..2376: mol_type = other DNA
atgccagacatgcatttcaaagctcctaagatatctatgccagacgtcgacttacatctgaaaggacctaaggtcaagggtgacgtcgatgtatccgtgccaaagctggagggtgacttaaccgggcctagcgtgggagtggaggtgccagatgtggagttggagtgcccggacgccaagctgaaggggcctaaattcaagatgcccgaaatgcatttcaaaacccccaagattagcatgccggatgtagacttacacctgaagggtccaaaggtgaagggagacatggatgtgagcgtaccaaaagtcgaaggagagatgaaagttccagacgtggacatcaaaggacctaagatggacatcgatgccccagacgttgacgtgcatggaccagactggcatctgaaaatgccaaaaatgaagatgcccaaatttagtatgccgggatttaaggcagaaggaccagaggtagatgttaatttaccaaaggccgacgtcgtggtaagcggacctaaggtcgacgtggaagtgcctgacgtgtcattagagggcccagaaggaaaactcaagggacctaagttgaaaatgcctgagatgcacttcaaggccccaaagatcagtatgcctgatgtcgacctccacctcaagggacccaaagtgaagggagatgttgacgtgtcgctgcccaaactcgagggcgatcttacagggccttccgtggatgttgaggtaccagatgtggagctcgagtgtcctgatgcaaagctgaaagggccaaaatttaagatgccggagatgcacttcaagacccccaaaatctccatgccggatgtgaatctcaatctgaaaggacccaaagttaagggcgacatggatgtctccgtccctaaggtcgaaggagaaatgaaagttcccgatgtggatattcggggtccaaaagtagacatcgacgccccagacgtagacgtgcacggcccagattggcaccttaagatgccaaaaatgaaaatgcctaagttctctatgcctggcttcaagggcgagggccctgaagtggatgtcaatctgccaaaagcagatgtggacgtaagcgggcctaaggtggatgtggaggttcccgacgtctccctggaggggcctgagggtaagctgaagggacctaaattcaaaatgcctgagatgcactttaaaacgcctaagatttctatgccagacgtggatttcaatctaaaaggtcctaaaattaagggcgatgtggatgtcagtgcacccaagttagaaggagaactgaagggcccagagctggacgtgaaaggacctaaactcgacgccgatatgccagaagtggcagtcgaaggtcccaatggtaaatggaagacgcctaaattcaaaatgccagacatgcattttaaagcccctaaaatctctatgcccgatcttgatctccacctcaagtcgccaaaggctaaaggcgaagtcgatgttgatgtgccgaaattggagggcgatctgaagggtccccatgttgatgtttccggtcctgacatcgatatcgaaggccctgagggcaagctgaaaggtcctaagttcaagatgcccgatatgcactttaaagccccaaacatcagcatgcccgacgtagatctcaacctcaaagggccaaagatcaaaggtgatgttgacgtgtccgttcctgaagtggagggcaaacttgaggtcccagatatgaatattcgaggacctaaagttgatgtcaacgcgccagacgtccaggccccagactggcacctcaaaatgccgaagatgaagatgcccaagtttagtatgccgggattcaaggctgagggtcctgaggtggatgtgaaccttcccaaggctgacgtagacattagcgggccaaaggtggacattgaaggacccgacgtgaacatcgaaggacctgaaggtaagttaaaaggcccaaaattaaagatgccagaaatgaatatcaaggcgccaaaaatctctatgcccgactttgacttgcatctcaaaggccctaaggttaagggagacgtggacgtgtcgctaccgaaggtagagggagatctaaaaggtcccgaggtcgacatcaagggcccaaaagttgatatcaacgctccggacgtcggcgtccagggtcccgattggcacctcaagatgcctaaggtgaagatgcctaagttttccatgcctggcttcaaaggtgaaggcccagacggggacgttaagttaccaaaagctgacattgatgtctctggaccaaaagtagacatcgaaggtcccgacgtgaatatcgagggccctgaaggtaagctgaaaggtccgaagtttaagatggctcaacgttggtggtag

SEQ ID NO: 27265 - DNA, 450 bp, synthetic construct
  misc_feature 1..450: note = Description of Artificial Sequence: Synthetic coding sequence
  source 1..450: mol_type = other DNA
atggagaaagaggaaaccactagagagctgttacttcctaattggcaggggtctggcagccatgggctgaccatagcccagcgcgacgacggtgtgttcgttcaggaggtgacccagaattccccggctgccaggaccggcgtcgtcaaagagggggaccagatcgtcggtgccactatttacttcgacaatctccagtctggtgaagtcacacagttgcttaacactatggggcaccacacagttggcttaaagttgcaccgaaagggagatcgatctcccgaacccggacagacgtggactagggaggtcttctcttcttgttcaagtgaggtagtgttaaacacaccgcagccatctgccctagagtgtaaggaccaaaataagcagaaggaagcaagctctcaggctggggctgtctctgtttcgacccccaacgccggactgtag

SEQ ID NO: 27266 - DNA, 17673 bp, synthetic construct
  misc_feature 1..17673: note = Description of Artificial Sequence: Synthetic coding sequence
  source 1..17673: mol_type = other DNA
atggaaaaggaggagaccaccagagagctacttctgcccaattggcaggggtccggctcccatggtctgacgatcgcccagagggacgacggcgtgttcgtgcaggaagtgacccagaacagcccagctgcccgaacaggagtggtgaaggaaggcgatcagatcgtaggcgctacaatatattttgataacctgcagtccggagaggtgactcagttgctcaatacaatgggccatcatactgtcggcttaaagttgcataggaaaggcgacagaagccccgagccaggccaaacgtggacgcgtgaagtgttctctagctgctctagtgaggtggtgctaagcggtgacgacgaagagtaccagcgcatatatactaccaagattaagcccaggctaaaaagtgaggacggcgtagagggcgacctcggagagactcagagtcgaaccattacagtgactagaagagtgaccgcctataccgtcgatgtcactgggagagaaggcgcaaaggatattgacattagcagccccgagtttaaaattaaaatccctcggcatgagttaaccgagattagtaatgtggatgtggagacccagtccggtaagacagttatccggctgccctccggctctggggctgccagtccaactgggtcagctgttgatattcgcgctggggctatatcagccagtggtccagagttgcaaggagcgggacattcaaagctccaggtgacgatgccagggattaaagtgggcggatctggagtgaatgtgaatgccaagggcctggatctcggcggtcgtggaggtgtccaggtccccgctgtggatatcagttcaagcctgggtggcagagctgttgaggtccagggccctagcttggaaagtggtgaccacggcaagattaagttcccaacgatgaaggtccctaaatttggggtgtctactgggcgtgagggacagacaccgaaagctggactcagagtgagcgccccagaagtctcggtagggcataagggaggaaagcctggcctgactatccaggcccctcagctggaagttagcgttccatctgcgaatattgaaggactagaaggtaagctgaagggcccacagattactggaccctccctcgagggtgacttaggattaaagggcgctaagccccagggacatattggagtggacgcaagcgctccgcagattggagggtccattactggcccatcggtggaagttcaggccccagatatcgatgtacaaggacctggctccaagctgaacgtccctaagatgaaagtgccaaaatttagtgtgagcggggcaaaaggcgaggagactggaattgatgtgaccttacctaccggagaggtgactgtccctggggtgagtggggacgtgagcctgccggagatcgccactgggggtctggagggcaagatgaaaggcactaaggtgaagaccccagagatgatcattcagaagccgaagatatccatgcaagacgttgacctgagtctcggctctcccaagctgaagggggatatcaaagtcagcgctcccggtgtgcagggcgacgtgaaaggccctcaggtggccttaaaaggtagtcgggtagacatcgagacacctaacttagaaggaacactgactggcccaaggctcgggtcgcccagcgggaagacaggtacctgtcgtatatcaatgagtgaggtcgatctgaatgttgcagccccaaaggtaaaaggtggtgtggatgtaacccttccacgggttgaagggaaggtgaaagtccccgaagtggacgtccgcggacctaaagtcgatgtgtcggctcctgatgtggaggctcacgggcctgagtggaatcttaaaatgcctaagatgaaaatgcctacattttctacccctggggctaagggggagggacccgatgttcatatgactctgccgaagggtgacatctccatctctgggccaaaggtcaatgtcgaggccccagacgttaacctcgagggactgggcggtaaactgaagggtcctgatgtgaagctccctgacatgagtgtgaagactcccaagatcagcatgcctgatgtggatctgcacgtgaaaggcactaaagttaaaggggagtacgacgtgactgtgcccaaattggagggcgagctgaaagggccaaaggtggatatcgatgcgcctgatgtggatgtacatggaccggattggcaccttaagatgcctaagatgaaaatgcccaagttctctgtccccggattcaaggctgaggggcctgaggtcgacgttaacctgcccaaagccgatgttgatatctctggcccaaagatcgatgtgaccgcgccagacgtgagcatagaggagccagaaggaaagttgaaaggcccaaagtttaagatgcccgaaatgaacattaaagtcccaaagatatctatgcccgatgtggatctccatcttaaaggaccgaacgtgaagggcgaatatgatgtgaccatgcctaaggtcgagagcgagatcaaggtgcccgacgttgagctcaagtcggctaagatggatatagatgtgccagacgtcgaggttcaggggcctgactggcacttaaagatgcctaaaatgaaaatgcccaagttttcaatgcctgggtttaaggccgaaggccctgaggtcgacgtaaatctgcccaaagctgacgtcgacattagcgggccaaaggttggcgtcgaagtcccagatgtaaatatagagggccctgaaggtaagttgaaagggcctaaatttaaaatgcccgaaatgaacatcaaagcccctaagatttctatgcccgatgtggacctgcatatgaaaggacctaaggttaaaggggagtatgacatgacagttccaaagttggaaggagaccttaagggtccaaaggtcgacgtgtctgctcccgacgttgagatgcagggccctgattggaacctgaaaatgcccaaaattaagatgccaaagttcagcatgcccagtctcaagggcgaggggccagagtttgacgtcaacctctcaaaagctaacgtggatatctcggcgccaaaggtggacacaaatgcccctgacctgtctctagagggtcctgaagggaaactgaaggggccaaaatttaagatgccggagatgcatttcagagctccaaaaatgtccctacccgacgtggatctcgatctgaagggaccgaagatgaagggcaacgtggatatcagtgcaccgaagatagaaggtgagatgcaggtccccgatgtggacatacgaggacctaaggttgacattaaagctcctgacgtggagggccagggcctagattggtctctgaaaatacccaaaatgaagatgcccaaattttctatgccgagtttgaaaggtgagggtcccgaggtcgacgtgaatcttcctaaagccgatgtagttgtgagtggaccgaaggtcgacattgaagctcccgacgtaagcctggaaggacccgaagggaagctgaagggaccaaagtttaaaatgccagaaatgcattttaaaactcccaaaatcagcatgcccgacgttgatctccaccttaaaggacctaaggtcaaaggggacgttgacgtgtctgtacctaaagtcgaaggggaaatgaaggtgcctgacgtggagattaaggggcctaagatggatattgatgctcctgacgttgaggtccaggggcctgactggcacctgaagatgcccaagatgaaaatgccaaaattctctatgccaggcttcaagggcgagggaagggaagtggatgttaacctaccaaaggctgacattgacgtcagtggaccaaaggtggacgtcgaggtacccgacgtgtctcttgaaggacctgagggtaagctgaaaggcccaaagtttaagatgcccgaaatgcactttaaggccccaaaaatctctatgccggacgtggatcttaatctgaaggggcctaaactcaagggtgacgtggacgtgtcgctgccagaagtggagggcgaaatgaaagtgccagacgtcgatatcaagggccctaaggtcgatatctccgctccggatgtcgatgtgcacggtcccgattggcacctgaaaatgccaaaggtgaagatgcctaagttttccatgcctgggttcaagggggaagggccagaggttgacgtcaaactgcccaaagcagatgttgacgtctcgggtcccaagatggacgccgaggtccccgatgtcaatatcgaaggccctgacgccaagctgaaaggcccaaagttcaagatgccggagatgtccatcaagcctcagaagataagcattccagatgtaggcctacatctgaaaggcccaaagatgaagggagactacgacgtaaccgttcctaaagtggagggcgaaattaaggccccagatgtcgatatcaaaggtcctaaggtggatattaacgcccctgacgtagaagtacatggtcctgactggcacctgaaaatgcccaaggtaaaaatgcccaagtttagcatgccagggttcaagggtgaggggccagaggtagatatgaatctaccaaaggctgaccttggggtctcaggaccaaaagtggacattgatgtccccgatgtgaaccttgaagcgcctgagggcaagctgaagggtcccaagtttaagatgccgtctatgaatatacagacccataagatatctatgcccgacgtcggtttaaaccttaaagcgccaaagctgaagacagacgtagatgttagtcttcccaaggtggagggtgacctaaaaggaccggaaattgacgtcaaagcccctaagatggatgtgaacgtgggcgacatcgacattgagggccctgaaggcaagttgaaaggtcctaagtttaaaatgcccgagatgcattttaaagcaccgaagatttccatgccagacgtggatctacacttaaagggcccaaaggtgaaaggcgatatggatgtgagcgtccccaaggtggagggcgaaatgaaggtccctgatgtcgatatcaaaggaccaaaggtggatatagatgcgccagatgttgaagtccacgacccggattggcacttgaagatgcctaagatgaaaatgccgaaatttagcatgccgggtttcaaggcagagggtcctgaagtggacgtgaacttacctaaggcggacattgatgtgagtgggccttctgttgacaccgatgccccagacttagatatcgaggggccagaagggaaactgaagggcagcaagttcaaaatgccaaagcttaacattaaggcgcctaaggtttccatgccagacgtggacttgaatcttaaaggacccaaacttaaaggagaaatcgatgcaagcgtccctgaacttgagggcgatctgaggggtccacaggtcgacgtgaaaggaccttttgtggaagcggaggtccctgacgttgacttagaatgcccagatgcgaagctaaaagggccaaaattcaagatgcccgagatgcacttcaaggcacctaaaatctcaatgcccgatgtggaccttcacctcaagggtccaaaagtcaagggggacgctgatgtgagcgtgcccaaactggagggcgacttgaccggacctagcgttggagtggaggtgccagatgtggaactggagtgcccagatgccaaacttaaggggccaaaattcaaaatgcccgacatgcacttcaaagctccaaaaatttccatgcctgacgtcgacttacatcttaagggccctaaggtcaagggcgacgtggatgtgagcgtgccaaaactcgaaggcgatctaaccggccctagcgtaggcgtggaggtgccagacgttgagctggagtgccctgacgccaaactcaaaggaccaaagtttaagatgcctgaaatgcatttcaagacccccaagatttctatgcccgacgtggaccttcatctgaaaggtcctaaagtcaaaggagatatggacgtgtccgtgcccaaagtggagggcgaaatgaaggttcctgatgtggatattaaaggtccgaagatggatatcgatgcaccagacgtggatgtgcatggtcctgactggcatctgaagatgcccaagatgaaaatgcccaaattctctatgcctggattcaaggcagaaggacctgaggttgatgtaaaccttcccaaagcggatgttgtggtaagcggacccaaggttgatgtggaggttccagacgtctccttggagggacctgagggaaagcttaaaggtcctaaactgaaaatgcctgagatgcactttaaagctcctaaaattagcatgccagacgttgaccttcacttgaaagggcctaaggttaagggcgacgtcgacgtgtcactgccgaagttagagggcgacctgaccgggccttccgttgacgtggaagtacccgacgtggagctcgagtgtcctgacgctaaactcaaaggcccaaagttcaagatgcctgagatgcatttcaaaaccccgaaaatatctatgcctgacgttaatctgaacctgaaaggccctaaggttaaaggggatatggacgtgtcagtacctaaggtggaaggggagatgaaggtacctgatgtggacattcgcggacctaaggtcgacatagatgcccctgacgttgatgtccacggacccgactggcacctgaaaatgccaaagatgaaaatgcctaaattctcaatgcctggttttaaaggcgagggaccagaagtggacgtgaatcttcccaaggcagacgtggatgtctcaggccctaaagtggatgttgaagtgccagatgtttcactggaaggacctgagggcaaactgaaaggacctaaatttaagatgccagagatgcatttcaaaactccaaagatcagtatgcccgacgtggattttaatttgaaagggccaaagatcaagggagacgttgacgtctcagcccctaaactcgagggtgaactgaagggtcctgagctcgacgtaaaggggcctaaacttgacgctgatatgcctgaggtggccgtagaagggcctaatggtaagtggaaaacaccgaaatttaagatgcccgatatgcatttcaaggccccaaaaattagtatgccagatctcgatctgcatctcaaatctcctaaagcaaagggggaagtcgacgtggatgttccaaagttagaaggcgacctgaaggggcctcatgtggatgtgagtgggcctgacatcgacatcgaaggccctgagggaaagctgaaaggccctaagttcaaaatgcctgatatgcatttcaaggccccaaatataagcatgcccgatgtcgatctgaaccttaaggggccaaagatcaaaggtgacgtcgacgtgagcgtgccagaggttgaagggaaactcgaagttcctgacatgaatattagaggtccaaaggtggacgtcaatgccccagatgttcaggcccctgactggcaccttaagatgccgaagatgaaaatgccaaagtttagcatgccgggttttaaagccgaagggcctgaagtggacgtcaacctgcccaaagccgacgttgatattagcgggccaaaggtcgacattgaagggccagatgtaaatattgagggaccagagggtaaactcaagggccctaaactgaagatgcccgagatgaacatcaaagccccaaagataagcatgcctgatttcgatcttcacctgaaggggcctaaggttaagggagatgtggatgtgtcgctgcccaaggtggagggcgacctcaagggacccgaagttgacataaaaggtccaaaggttgatatcaacgccccagacgttggcgtccaagggcctgattggcatctgaagatgccaaaggtcaagatgcccaaattttccatgcccggatttaagggggagggcccagatggagacgtgaagctccctaaggcagacatcgatgtgtcgggtcctaaggtggacatcgaaggtccagacgtcaatatcgagggaccggagggaaagctcaaagggccaaaattcaaaatgccagagatgaatatcaaggcacccaaaataagcatgcctgacatagacctcaacttgaaagggccaaaggtcaagggcgatgtggatgtgtcgctgcctaaagtggaaggcgaccttaaaggccctgaggtagacatcaagggcccaaaagtggacatcgacgctcctgacgtggacgtgcatgggccagactggcatttgaagatgccaaaaataaaaatgcccaagatctctatgcctggcttcaaaggcgaagggcctgacgtggatgttaatttaccaaaagccgacattgacgtctctggacctaaagtggacgtggaatgtccagatgtgaatattgaggggccagagggaaagtggaagagtcccaaatttaaaatgccagaaatgcactttaagactccgaaaatctcgatgccagacatcgatctcaacttgactggtcccaagattaaaggcgacgtggacgttacaggacctaaggtggagggggacctgaaaggacctgaagtggaccttaagggccctaaagtcgacatcgatgtgccagacgtgaatgtccaaggcccagactggcacttgaagatgcctaagatgaagatgccaaagttttcaatgccaggcttcaaggctgaaggccctgaggtagatgtaaatctgcccaaagccgatgtggacgtctccgggccaaaagtggatgttgaaggaccagatgtcaacatcgaaggccctgagggcaaactaaaagggcctaaattcaagatgcccgagatgaatatcaaggccccaaagattcccatgccagatttcgaccttcatcttaaggggcctaaggtaaagggggacgtggatattagtctccctaaggtggagggcgatctgaagggccctgaggtggacattcggggaccccaagtggatatagacgtacccgatgtgggggttcagggtccagactggcatctgaagatgcccaaggtgaaaatgccaaagtttagtatgcctgggttcaagggagaaggtcccgacgttgatgtcaatctgcccaaggcagacctggacgtttcaggaccgaaggtggatatcgatgttcctgatgtgaatatcgaaggtccggaaggaaagttgaagggtcctaagttcaagatgcccgagatgaacataaaggccccaaagattagcatgcccgacattgacttaaatctgaaaggcccaaaggtgaaaggcgacatggacgtgagcctgccaaaggtggagggagacatgaaggtcccagacgtcgacattaaaggccctaaagtcgacatcaatgcgcctgacgttgatgtacagggccctgattggcatctgaagatgcccaaaatcaaaatgcctaagatcagcatgccaggctttaagggagagggaccagaagtggatgtgaacctgccaaaagcagacttggacgtcagcggcccaaaggtagacgtggatgttcctgatgtgaacatcgagggtccggatgcaaaactgaaggggccaaagttcaaaatgccggaaatgaatattaaggccccaaagatcagcatgccagatctagatctgaaccttaaggggccaaaaatgaagggagaagtcgatgtgagcttggctaatgttgaaggagatctgaagggccctgcattggacattaaggggcctaaaatagatgtagatgcccctgatattgacattcacggaccagatgccaagttgaaaggcccaaagctgaaaatgccagacatgcacgtgaacatgcctaaaatttctatgcccgagatcgacttgaacctaaaggggagcaaactcaaaggagacgtcgatgtgagcggccctaaactcgaaggagacataaaggcgccttcactggatatcaagggtccagaggtcgacgtgtcaggacctaaattaaacatcgaagggaagagtaagaaatcaagattcaagttaccaaagtttaatttctcagggtctaaagtacagacgccagaggttgacgttaaaggcaagaagcctgacatcgacatcacagggcctaaagttgatatcaacgcaccagatgtggaagtgcagggtaaggtaaaagggagtaaatttaaaatgcctttcctatcaattagcagtccgaaagtttctatgcccgatgtcgagctgaacctaaagagcccgaaggtgaagggcgatctggacattgcaggtcccaatttggagggggactttaagggcccaaaagtagatattaaggctccagaggtcaatctgaacgcaccagacgtagacgtccatggaccggactggaaccttaagatgcccaaaatgaaaatgccaaaattctccgtgagtggactgaaggcggagggccctgatgtggctgttgacctgcctaaaggggatataaatatagagggtccctccatgaatattgagggacccgatctgaatgtagaaggacccgaagggggtctgaaaggacctaagtttaagatgcccgacatgaacatcaaggcccctaagatctctatgcctgatatcgacttgaacctaaaaggacccaaggtgaagggcgacgtggacatctcactcccaaaattagaaggcgacttgaagggcccagaagtcgacatcaaggggccaaaagtcgacatcaacgctcctgacgtggatgtacacggtcccgactggcacctgaaaatgcctaaggtgaaaatgcccaagttcagtatgccgggatttaaaggcgaggggccagaagttgacgtcactcttcctaaggccgacatcgacatctccggccctaatgtcgatgtagacgtgccagacgtgaacatcgaggggcctgacgccaagcttaagggacctaagttcaaaatgcccgaaatgaacatcaaggctccaaaaatttccatgcccgatttcgacctgaatctgaaggggccaaaaatgaaaggtgacgtcgtggtctccttgccaaaggtcgaaggtgaccttaaagggcctgaggtagatattaagggaccaaaggtggatatcgatacacctgatattaatatcgagggaagtgagggcaagttcaagggcccaaagtttaaaattcctgagatgcacctgaaggcccctaaaatctctatgcccgatatagatctgaacctgaaggggccaaaggtaaaaggcgatgtcgacgtaagtcttcctaagatggaaggagacctgaaaggcccagaggtcgacattaagggcccaaaggtggacattaatgcaccagatgtggacgtccaggggcctgattggcaccttaaaatgccaaaggtgaagatgcctaaatttagcatgcccggattcaagggagagggcccagacgttgatgtgaaccttccaaaagccgacctggatgtttccggcccaaaggtcgacatagatgtccccgacgtcaatattgagggacctgaaggaaaactgaaggggccaaagtttaagatgcccgaaatgaatatcaaagccccaaaaatctccatgccagacatagacctcaaccttaaagggccaaaggttaagggggatatggacgtgtcccttcctaaggtggagggggacatgcaggtacccgacctcgatattaaaggtcctaaagtggatatcaatgcccctgatgtggatgtgcggggacctgattggcacctgaaaatgcccaagatcaagatgcccaagatctccatgcccggattcaaaggtgagggtcccgaggtcgacgtaaacctccctaaggcagatctcgatgtgtccggcccaaaagtggacgtggacgtcccggacgtcaacatcgagggcccagatgcaaagctgaaaggaccaaagtttaaaatgcctgaaatgaacatcaaagcgcctaaaattagcatgcctgatttcgatctacacttgaaaggacccaaggttaagggcgacgtggacgtgagcctgcccaagatggagggggatctcaaagcacccgaagtagacatcaaaggccctaaagtggacattgatgctcctgacgtcgatgtacacggaccagattggcatctcaagatgcccaaggttaaaatgccaaagttttcgatgcccggatttaaaggcgaaggtccagaagtggacgtgaatttgccgaaggccgatatcgacgtgagtgggcctaaagtcgacattgatactccagacatcgacatacatgggccagaagggaaacttaaaggtcccaaatttaaaatgcccgacctgcatttgaaggcccctaaaatcagcatgcctgaagtggacctgaacctgaagggcccaaaaatgaagggagatgtggatgtgagcttgcccaaggtggagggagacttgaaggggcctgaagtagatattaagggacctaaagtggatatcgatgtgccagacgtggacgtgcagggcccagactggcacttgaagatgcccaaagtgaagatgcctaagttcagtatgcccggttttaagggagagggtcccgatgtagacgttaacctgcctaaggccgatctcgacgtgagcgggcctaaggtggacatcgatgtgcctgacgtgaacatcgaaggacccgacgcaaaactgaaagggcctaagtttaagatgcccgaaatgaatatcaaggcaccaaaaatctcgatgccagattttgacttacacctgaagggccctaaagtcaaaggcgacgtggatgtgtcacttcccaaggtggagggtgacctgaagggtcccgaggtagatatcaagggcccaaaggtggatattgatgcgcctgatgtggatgtccacggcccagattggcacctgaagatgcccaaggttaagatgcccaagttttcgatgcccggatttaagggggaggggcctgatgtcgatgtgactcttccgaaagccgacatcgagatctcaggtcctaaggtagatattgacgctcccgacgtgtctattgagggtccagatgccaaacttaaaggcccaaaatttaaaatgcccgagatgaatattaaggcaccaaaaattagcatgcccgacattgacttcaaccttaagggacccaaggtgaaaggtgatgtcgacgtttcattacctaaggtcgagggtgatctgaaggggccagagatcgacatcaagggcccttccctagacatcgacactccggacgtgaatatcgagggcccagaagggaaactcaaaggtcctaagttcaaaatgcccgagatgaacattaaagctcccaaaatatccatgcccgatttcgatctgcacctgaaaggccctaaggtgaaaggcgatgtggacgtctctctcccgaaggtggaatctgacctgaagggacccgaggtcgacatcgagggaccagaggggaaattaaagggaccaaagttcaaaatgcccgacgttcactttaagtccccgcaaataagtatgtctgacatcgatctgaacttaaagggcccaaaaataaaaggggacatggatatctctgtacctaaacttgagggtgatcttaaggggccaaaagtagatgtgaaggggccaaaagtcggcatagatacgccggacatagatattcacgggccagaaggcaagcttaagggccctaagttcaagatgccggacctgcatctgaaagccccaaaaatcagtatgcccgaggtggaccttaatctgaagggccctaaagtcaagggggacatggacatcagcctgcctaaggtcgaaggggacttaaagggtcccgaagttgacatcagagaccctaaagtggatatcgacgtgcctgacgtggatgtccagggacccgattggcatcttaaaatgccaaaggttaagatgccaaagttctcaatgcccggtttcaaaggagaagggcctgatgtcgacgtcaacctgcccaaggccgatatcgacgtaagcggaccaaaggtggacgtggacgtgccagatgtaaacatagagggcccagacgccaaattgaagggccctaagttcaaaatgccagagatgagcattaaggcacctaaaatatctatgccggatattgatctaaacctgaagggtcctaaggttaaaggcgatgtggatgtaacactgcctaaagtggaaggggacctgaaaggaccagaggccgacatcaaaggaccaaaggttgacattaatacacctgacgtggatgtgcatgggcctgattggcatctcaaaatgcccaaagtgaagatgccaaaattcagcatgccaggatttaagggcgagggaccagatgtcgacgtctccctcccaaaggctgatatcgatgtatcaggtcccaaggtagacgttgatatcccagatgtgaatattgaaggcccagacgccaagctgaaagggcctaaattcaagatgcctgaaattaatataaaggctccaaaaattagcattcctgatgtagatctggacctcaagggtccgaaggtcaaaggcgattttgacgtcagcgttccaaaggtagaaggaacccttaaggggccagaagtggacctgaagggacctcgacttgacttcgagggacctgacgctaagttaagcggtccatcgctcaaaatgccgtccctagagatctcagctccgaaggtcactgcccctgatgtcgacctgcacctgaaggctcccaagattggtttctctggccctaaactcgagggaggcgaagtcgacctgaagggaccaaaagtggaagccccaagtctcgacgtccatatggacagtcccgatatcaatattgaagggcctgacgtcaagatccctaaattcaagaaacccaagttcggcttcggggcaaaaagcccaaaggccgatatcaagtctccgtctctggatgtgacagttcccgaggccgagctcaacctggagacgcccgagatctctgtgggaggaaaggggaaaaagagtaagtttaagatgccaaaaatacacatgagcggtcctaagatcaaggccaaaaaacagggctttgacctcaatgtcccaggaggggaaatcgacgccagcctaaaagccccagacgtcgacgttaacattgcgggaccggacgctgccctgaaggtggacgtgaagagtcccaagactaagaaaacaatgttcgggaaaatgtacttcccagacgttgaattcgatatcaaatcccccaaattcaaagccgaggcgcctctgccaagtcctaaactggagggcgagttacaggctccagaccttgagttatcactgcccgctatacacgtggagggactcgacattaaagcaaaggctccaaaggtgaaaatgcccgacgtcgatatctcagtccccaaaattgagggggatctcaagggccctaaagtacaagccaacctgggggcaccagatattaacatcgagggactcgacgctaaagtgaaaacgccttcttttgggataagtgctccccaggtaagtatacccgacgtaaacgtgaaccttaagggaccaaagatcaaaggggacgtccccagtgtaggcctcgaaggtccagacgtcgacttacagggtccagaagctaaaataaaattccctaagttttctatgcctaagatcgggatcccgggagtgaaaatggaaggcggaggagctgaggttcacgcacagctgccttctttggaaggagatttgaggggccctgacgtgaagctcgaaggccctgatgtcagcctcaaaggccctggcgtagatctgccctccgtgaatttgtcaatgccaaaagtgtctggcccagacctggacctgaatctgaagggtccatctctgaaaggggatttggacgccagtgtcccatcaatgaaggtgcatgctcccggactgaacctttctggtgttgggggaaaaatgcaagtgggcggtgatggcgtaaaggttccaggaatcgacgcaacaaccaaacttaacgtgggtgcaccagacgtgacactgaggggtccctccctccagggagatctcgcagtgtctggcgatattaaatgccctaaagtttccgttggggcacccgacctctcactggaggcttcagaggggtcaatcaagcttccaaagatgaaactcccacagtttggtatttctaccccgggaagtgatctgcacgtgaatgccaaggggcctcaggtgtcaggcgaactcaagggacctggggtggacgtgaacctaaagggccctcgaatttcagcccctaatgtggatttcaatttagagggacctaaggtgaaaggaagcctcggggctacaggtgagataaagggccctacggtcgggggtggattgcccggtatcggagtccagggcctcgaaggcaatttgcaaatgcctggaatcaagagctcaggctgtgacgtgaatctgccaggagttaatgtcaaactgccgacggggcagattagcggacctgaaatcaagggagggttgaaaggatccgaggtgggttttcacggagccgcacctgacatctcagtcaagggcccagcctttaacatggcttctccggaatccgacttcggaattaacttgaagggacctaagatcaagggcggtgctgatgtctctgggggtgtgagtgcccctgatatctcactgggtgaaggccatttgagcgtgaaaggctctggtggagagtggaagggcccacaggtgtccagtgctctgaacctcgacacttcaaaatttgctggtggtctccacttctcaggcccaaaagtggagggaggcgtcaagggagggcaaattggacttcaagcccctgggctttctgtgagcggtccccaaggtcacctggagtcaggaagcggcaaggtcactttcccaaagatgaagataccgaaattcacattttcaggacgcgaactcgtgggcagggagatgggggtcgacgtgcacttcccaaaggcagaggcctcaattcaagctggcgctggagacggtgagtgggaggagagcgaggtaaaattaaagaagtctaaaataaagatgcctaaattcaacttcagtaagcccaagggcaagggtggagtcaccgggagtccagaggctagcatcagtgggagcaagggggacctcaaatcctctaaagcttccttgggaagtctggaaggtgaggcagaagctgaagcctcgtcaccaaaagggaagttcagcctgttcaaatccaagaagccgagacaccgcagtaacagcttctctgacgagcgtgaattttcaggacccagcactcctacagggaccctggaatttgaaggcggagaggtttctctcgagggcggtaaagttaaagggaagcatggaaagctcaaatttggaacattcgggggactggggagtaagtcaaaaggccattatgaagttacggggagtgacgacgagacaggcaagctccaaggaagcggcgtctcactggcttccaaaaagtcaagactgtccagtagctctagcaatgatagcggcaacaaagtcggaattcaactcccagaggtcgaactatctgtatcaactaagaaggagtag

SEQ ID NO: 27267 - DNA, 372 bp, synthetic construct
  misc_feature 1..372: note = Description of Artificial Sequence: Synthetic coding sequence
  source 1..372: mol_type = other DNA
atggagaaggaggagactactagggaactgttgttaccaaattggcaagggagtgggagtcatggattgactattgcccagagggacgatggagtattcgtacaggaggtgactcagaacagtcccgctgcccgtacaggagtagtgaaggaaggcgaccaaattgttggggctacaatatattttgataacttgcagagtggagaggtcacacaactgcttaacaccatgggtcaccataccgttggcctgaaattgcaccgcaaaggagatcgctcccctgagccaggtcagacttggactcgagaggtcttcagcagctgctcatctgaggtggtgctgtcgggggacgatgaggaatatcagcggtag

SEQ ID NO: 27268 - DNA, 435 bp, synthetic construct
  misc_feature 1..435: note = Description of Artificial Sequence: Synthetic coding sequence
  source 1..435: mol_type = other DNA
atggaaaaggaagagacaaccagagagctgctgttgccaaattggcagggatcaggcagtcatgggttaactatagcacagagagatgacggtgtctttgtccaagaggtgacccagaatagcccggcagcacgcactggagttgtcaaggaaggcgaccagatagttggtgctaccatctacttcgataacctgcagtccggcgaggtcacgcagctgctgaataccatgggtcatcacactgtgggcctcaaactgcaccggaaaggggaccggagcccagaaccaggccagacatggacccgggaggtattttctagttgcagttctgaagtagtcttatcaggagatgatgaggagtatcagcgtatttatactacgaagatcaagccacggttgaagtcagaggatggggtggaaggggatttgggatag

SEQ ID NO: 27269 - DNA, 261 bp, synthetic construct
  misc_feature 1..261: note = Description of Artificial Sequence: Synthetic coding sequence
  source 1..261: mol_type = other DNA
atggagaaagaggaaaccacgagggagcttttactccccaattggcaaggctctgggagccacggattaactatcgctcagcgtgacgacggggtttttgttcaggaagtgacccagaactccccagctgccaggactggggtggtgaaagaaggagaccagatagtcggggctacaatttattttgataacctccagtccggcgaagtgacccagctgctcaacacgatgggacatcacactgttgggctgaagctgtag

SEQ ID NO: 27270 - DNA, 366 bp, synthetic construct
  misc_feature 1..366: note = Description of Artificial Sequence: Synthetic coding sequence
  source 1..366: mol_type = other DNA
atggagaaggaagagacgactcgggagttgctgctccccaactggcaggggagcgggtcacacggcctaacaattgcccagagagatgatggtgtgtttgttcaggaagtgacacagaactctcctgccgctaggactggcgtcgtgaaagaaggagatcaaatagtgggggctacgatttatttcgacaacctgcaaagcggagaagtgacacagctactaaacaccatgggacaccataccgtcgggctgaagctgcaccggaaaggcgacaggagtccagagcctggacagacttggacgagggaggtattctccagttgtagttcagaagtggtcctcaatactcctcagccgtccgcctag

SEQ ID NO: 27271 - DNA, 2904 bp, synthetic construct
  misc_feature 1..2904: note = Description of Artificial Sequence: Synthetic coding sequence
  source 1..2904: mol_type = other DNA
atggctaaagggttttacatctccaagagcttggggatcctggggattttactcggcgtggccgctgtgtgcaccattattgccttatccgtagtgtactcccaggaaaagaataagaacgcgaacagcagtcccgtggcatcgaccacgcccagcgcttcagcaactactaaccccgcttcagctacaaccttggaccaaagcaaagcttggaacaggtacagattgccaaacaccctcaaaccagattcctacagagttactcttaggccatacctgacaccgaatgatagggggttgtatgtgtttaaaggctcatcaactgtgcgcttcacgtgcaaggaggcaacagacgtaattattatacacagtaagaagttgaattacactctgagccaaggtcacagggttgtacttcggggagttggaggttctcagccccctgatatcgacaagacagaacttgtcgagcccacagaatatctggtggtccacctcaaggggtcactcgtgaaggactcacagtacgaaatggatagcgagtttgaaggcgagttggccgatgacctggctggattctacagaagcgaatacatggagggcaacgtgagaaaggtcgtcgctaccacacagatgcaggcggctgacgcgaggaaaagtttcccttgcttcgatgagccggcaatgaaagccgaattcaacatcacactcatccatcccaaggaccttactgctttgtctaatatgctccccaaggggccttcgacaccactacccgaggaccccaactggaatgtgactgaatttcatactacacccaagatgtctacatacttattggcgttcattgtgtctgaattcgattatgttgaaaagcaagcgtcaaacggtgtattgattagaatctgggcgcgtccctccgccattgccgctggtcacggagattacgctctcaacgtgacaggcccaatcttaaacttcttcgctggccactacgacacaccttatcctctgcccaagtcggaccagattggtctgccggattttaacgcgggtgcaatggagaattgggggctagtcacctaccgggaaaatagcctgctgttcgatcctctgagcagtagctccagtaacaaagaacgtgtggtgactgtgatagctcacgagttggcacaccagtggtttggaaacctggttactatcgagtggtggaatgatctttggctgaacgagggatttgcttcttatgtggagtatctcggtgccgattacgccgagcctacatggaacctgaaggacctaatggtgctgaacgacgtgtatcgggtgatggcagtagacgcactggccagttcccacccgctgtcaacaccggcttctgaaatcaacacaccagctcagatcagtgagctatttgatgccatttcgtattctaagggagcaagtgtgttgaggatgctcagtagttttctgtctgaggacgtgtttaagcaaggccttgcttcctacctccatacttttgcttaccagaacactatctacctcaatctctgggatcacctacaggaggccgttaacaatagatcaatacaactaccgaccaccgttagggatatcatgaataggtggacattacaaatggggttccctgtcattaccgtcgacacaagcacgggtaccttgtctcaggaacactttctcttggacccagattccaatgtgaccagacccagcgagttcaactatgtctggatcgttcctattacctctatcagagacggaagacagcagcaagattactggctgatagacgtgagggcacagaatgatctcttctccacttcggggaatgagtgggtgctgctcaacctgaacgtgaccggctactaccgagtgaactatgatgaggagaattggagaaagattcagacacagctgcaacgcgatcactccgcaatccctgttatcaatagagctcagataatcaatgatgccttcaatctggcatctgcacacaaggtgcccgtaacattagccctgaataatactctgttcctgatagaggagcggcagtatatgccctgggaagccgcactctcgtccctcagttatttcaaactgatgttcgacaggtccgaagtgtatggcccaatgaaaaactatctgaagaagcaggtcaccccgctgtttatccactttcgaaacaatacaaacaattggcgcgagattccagagaatctgatggaccaatactctgaggttaatgcaatcagtactgcttgcagcaatggcgtccctgagtgtgaagaaatggtctctggcctgttcaagcaatggatggaaaaccccaataataatccaatccaccccaacctgagatcgactgtctactgcaacgctattgcacaaggcggagaagaagagtgggactttgcatgggaacagttcaggaacgcaactctagtgaatgaggctgacaaactgagagcggcactggcctgcagcaaagaactgtggattctcaaccgatacctgtcgtacaccctcaacccagatctcatccgcaaacaggacgctacttccactattatttcaattacaaataacgtgatcggccaagggctggtgtgggatttcgtgcagagtaattggaagaaattgtttaatgattatggtgggggtagtttttccttttccaacctgatccaggcagtgacacgtaggttctccactgagtatgaactgcaacaactagaacagtttaagaaagacaatgaggagactggctttggctctggcacccgcgcactggaacaggccttggagaagactaaggcgaacatcaaatgggtgaaagagaataaggaagtggtgcttcagtggtttactgaaaactcaaagtag

SEQ ID NO: 27272 - DNA, 312 bp, synthetic construct
  misc_feature 1..312: note = Description of Artificial Sequence: Synthetic coding sequence
  source 1..312: mol_type = other DNA
atggccaagggattctatatctccaaaagcctgggaattctgggaatactgctgggagtcgcggcagtatgtaccatcatcgctcttagtgttgtttattctcaggaaaagaacaaaaacgcgaacagtagccctgtggcatctaccaccccttcggcttctgccactacgaatcctgcatcggccacaaccttagatcagtccaaggcatggaatcgctatcggctgcctaatacgctgaagcctgattcatatagagtgaccctccgaccttatctgacaccaaacgatcggggactctacgtgttctag

SEQ ID NO: 27273 - DNA, 186 bp, synthetic construct
  misc_feature 1..186: note = Description of Artificial Sequence: Synthetic coding sequence
  source 1..186: mol_type = other DNA
atggctaaggggttctacataagcaagagcctggggatcctgggcattttactcggggtggccgctgtctgtaccattattgcattgtcagttgtctactcccaggagaagaataaaaacgcaaactcctcccctgtcgcatcaactacaccgtccgcgtctgcgacaaccaaccccgcaagctag

SEQ ID NO: 27274 - DNA, 381 bp, synthetic construct
  misc_feature 1..381: note = Description of Artificial Sequence: Synthetic coding sequence
  source 1..381: mol_type = other DNA
atgaaccagaacacagataagatctcaggcagcggatccaattctgatatgatggagaatagtaaagaggagggcaccagttcttccgaaaagtccaaatcctctggctcctccagatcgaaacgcaagccctctattgtgacaaagtacgtggagagtgacgacgagaaacccctcgacgacgaaacagttaacgaagacgctagcaatgaaaattcagaaaacgatataacaatgcagtcccttcccaaggggaccgtgatcgtgcagcctgagccagtgcttaatgaggataaagatgactttaagggcccagagttccgctccagatccaagatgaaaacggagaatctaaagaagcgtggcggaaaatacaagtag
